United States Patent Application Publication US 2008/0114160 A1 - sequence listing, part 31

SEQ ID NO: 8533 - DNA, 50234 bp, Oryza sativa
gcagcttggtcgctgcaccattcttggttgcatctgattctctggtaatcctcttgcatcggcttgctctgtcatcttcttcccctccattctccatgcttggcttcaattctcttggggtggagaagagtggagcttctctcttgtctgaatgggagttgagaaaagcttcgctttttatacttgtcctgatgagaggagagagaaagagcagcaacaggttatggtgattaagagaccccactaagtactaactgatgggaaaatattttaatatgtacctgaatataagattaggtgcataagatggaaggtgaactccatcaatcgcacaagtgacacaatcagattagtggcagcatgacaatgggaatctactgttccaaggtcctccattttcatttggttgaatggcaatatataatgtcagttgtcatggagactggtggcaatttccactagtaagtggcccacttttgtattggatccctgagcctttttttcaccctgtccacttcgtgttagaaacaacaaaccaccgcagtagaggttacttgcagtaggctccaattcaaaggtaagcattacaacagttaaatattcaacaaacgttgtttctatgcaagcatttctgttaggatttggtatatttattttcttgcagacaaacttttgtgtttattctactatcatgtaaggcaaaatagttcaagttcttggcaccttctagcatgccagattaaaaatgcaatcaacggagttggtattgataaaaaaaggtgaaaagaaaagggattggagcaatctaatggaagaatcagggtgctgtttaggtatacctccggctatgttttattgtccttgagtatatccttaaaactatgaaaaaaagtcagaacaagaaagaacaaaatttagggctcttctgtagagtaggcaaagaggaactgtcaactattacacctctcataaacactagaattaaaccaaaaaaacaagatcatcactggcatgcattcagtgtccacctgcatcgaaagtgcggtattgtttgaatcaacaaggaagtctgtggtttggtgctcttaattaggttgttatcattgttgatagacagatctcaacaatccaaatggctctggtattgcttgacagtcaaacagagagctacatgagcccaatccaaaccggctcaaagcatttgaatcaagatatttttcaaaaacgtctaatgagaggctaaaggattctaaaagaagggatctaaagctcatcgaatctttgtggatgatcctcattgacagacacacgtattaaatccccctttattttcttgatgtatactgtgcttaacatccattttttaaggacaatctgacatgacacctaacagctttgaaaacttttggttgcacattagaaatgtatggaacaaatcaccatatatatctgaagtaccaaagagaaatgcttagaagtaccgaatgttaaaaacaaggggcatgatatcttcaaacattctgctctttctgagcacgctagtgaccaagattgccctctcaggtttcaacattagcttgaacaatcatttccacttcgagcttacccacaacttgtagcttccagagtgacatgtttccaacgcctggaatggatagtacatgaagcaattgacctgtaaacttgcacgttagtacacgcctcttcaatcatcataaatccatttctctctgtaattcataagtgtatatctccacagttcgaagccaggaaacttcagagttgcatgtatcatgcaaagcttcaaaaaacagttgcgtttgagcacaaggaaacacatagagcaccatgaattcaactacctctgtctttcttaaatctctcaaggcagttggaagtaggaaacttcaggtttgcatgtaaagaaatatttaaagccagttgcactcgagcacaagaaaaacaaatacttcatgtcaagaattcaacgtcatcagtttagcagaacagcatgttagtacttgctggacaaaaataatggagggaaatagtaagttgaatccataagcgtatgtggacgtatgtggacaacaataactagtagcatacttccaagacgacagtacagactacagttaaactccataaaagtcttgatagcaaaaggagaactatatgttattgtctattttaatctacaatttcctttgaatagaaggaacaaccgtactaggttgaaattgagcaagaaacccatgatacaaaattcagtgccttttatgcttaacgattttatcgcaaagttagaaatacaagtaacagtaaaaagatttaagcaataagcatagaagaatatcatttgatttaagtaaaacaggcacaggtacacaacaaagcttatagcctacaggtaactaatggaaataacaggtcagctcaaagggaatgttctttagtatggttctattaacttgatgtaatcatctgaaatcaataaaatcttccttttatcttaaacaaaaagtactatcgaaaaaggacctgttgcactcgaacaatgcttgttcgataacacaacaaatcaaataattgagctgacctccttaataagcaataaggtaaacaagtctgcagaaaacgatatttgtttctctaagtttaacaaaccagttagacatattttattgttcctagcagaactgtctacaaagatatgttggatgccctcatgcacagggaacatcgacaggcctcttatcaattggtggttgtgtctttgctttcttaggcaaaaaatgcaacattagcagagtccagcacaccaccgacatttttcatccaatcatttatgcaagaaggatttttcatccatcggtttttcacccagaagaagccagaagaatagaactacagaagggttagtcctcaaagaaagatatctccccactggtcagcctgttagtagccattagaaataacacaagaacagtggcacgggaaatgcgcagttgatggcatgcgaagggaaagatgatgctgcagggtacaaatacagagtcagttcaccaaaaaaatacaatatcaattactcagttcagattcaagaattcggtggcacccagatacaagaaaatgcttcaatatttgcattcaggaggaatgcgatttcagttatatcggaagatttgctcaataacaatacaaacatgtatagtaaattggaaaccagttatgtcaaatgactgtttggtgtcattttgtcagctcatttccaagttctaagaccaatcagttctgatctgtgattactaaattaaaatgcagaagaaatgtccactgtgccaggatacaaaatgcaggaacatctgaacaaacagctcttttaacagacaagataatcatgacagacacagatagaggcaaatgattctattaataacagggtgaaagaagaagatctggtcattacaattatctaaaactctaaacattttttgctacttcccatatatattaatctatattcctgagaggaagggcatttggttccagatgccatgacccttttggtatatcacggtctttaatttcaataactacataagcaggaacacgatgggaaaagcttagcatttcagaccttgaaatcaactttgtcaaatggaaatcttccactattactctctggaaaaaggttaaacagccttttacccgagtcagcctgcatacattgactccaatttcatctgagtaatcagagaggatctcaaccatgcgaggttcacatttgtcgatgtcagcattactgaaggctatcttccagtttttgtacattgcccatatttctcctttctttgggaaaattcggtagaaagacctctttgcgctccagtcacactccaccggatgagagaattctgatatctctttgcaagcagtctcactaccagctcgaaacaccccacaagcaactggtagaccatcttcaacccaatgtatttcttcattgagcatagggtgaggttccagcttcaacacagaaactgcagtatgggataccacacggattactctgacatacaaccttggcattctatccggagcatcatatacagcccagatctgcccctccacaaaatgctcaggtgataacttattattgtagttcatcattccttgttgggggttacctaaatccattttgctggttgaaggatttgataagtgtgtggcagcaacttcatgaaaaccatttgagtcatcatgtaaaccttgaagagggtacaaaggagcaacacttgctgatgtattttcatattgcaagttttctggaacagcagaatgttcaagctcaaacaccgttccaacatcacaagtaaatctaaatgaaggaatcctgtgagaaaacatgagcagattatgaatgtggacttgtaataactgctctctcccactcctcacgtgcctctggaaaacgcttctatatccatctacctttaccaattgtgcgacagtgcagcctgagccttttaaataactgttaagaatttctacaacataaaaggtgcttttcttccgcatcccagggtcattgcaccacccaatgtcccaatcactgtagattgcccatacctccccttcctggggataaactttaagatgatgattccaattgtcagaagatatctgatgacataacatagttggacaagttaccgatattttacattcatccgcaataaaaattccacaaacaaatggcaagcttgcactaaaccacctgttctcgtcatgggattgtggggatggtttgaaccatgaaacatataagtgctctttgtcagccacaatcttgttaatccgtgcatatctgcgagggaacttctcccagtcatatgctgcccaaatctgaccagcagcgaaattcactatctccctatcattctcaaagttatgaacgtcatattgtgtaatagagcaaagctcgtcttctctgttatccaatggatcagtaaacctgtcatccaaatctacatgtggcgatgacacacaatgcacatccttttcgcacacactcttttgcttcttgtcaacatggttctcatcaggtaactgaaaaccatcatcagctagaaagcatgaatcagtcctcttagttttggaagagctagcaacatttgaacaatcgcccacatccaaacatgatctgtcagtctgttgagcatatgaaggcacattgtttgagatgccagccaccgcattacagtctgcctcaaggctgcttaatctacccagttctgcattcggataatcatgagttgatctatcagcagcgcaaatccctttcgtttgtaaaatgtcttcgcaccacagctcaacatttgccaccgtagaatcataccgcaccttcttcgccggatcagacagcacggcgtacgcatcgttgacgagccggagggcagcctcggcgccgggcaggtcgtccctgaccggctccacctggcgcacgatgctcctgtactgcgcgtcgatcttggcagcgtcgtcgcgggggaggacctggaggatcctgtaccaatccacgccgcgcccgcggccgaggccggggcggcgcgcccgcgtctcggcggcggcgcagaggacctcgagcacggagagcatctcgaaggcgtcgtccagcctagggttggtctggagcgtctcgagcagcagcgtcctcgcgccggcgtagtcctccccgcgcatcttcgccgcgatcgcctccctccccgccgccgcctcggcgtcgccgcccatcccctccccgccgccgccgcctcagaatcctccgcgagcacaccacctgtgagacggaatccgattcaaacgcgagcattccgtccccaaatccagatcccggtgaccaaattccgccgcatttgagcccatgctgcagatgtgaggatggatggattcaattcgagaggaaattgggaacgggctcttacccaaactgatttgggcgaaggttggattcaaatcgatggctcgattccgagaaccctaaaccctagcaccgatttggatttagggacggtggctacgcatgaacacggcaatcaatctggaggtggaatgctgctcctccagctggtgagtgggttcttctacgcatgaacgctgcggcttcgtgggccgtgtcagtggcatcagaagaaatttctgggcctttggggaataaatgggccggtccttgtgtattgggtctagccgcggcctgcgagaagaacacggggggcgaggcgacaggcggtgggcccacctcctggcacgtggggaggggagtgtccccacatgtcagggagaggacgcgtggcccgaaacggggcaaacgcgagcggcgggaaaaaggggagtcatcaaagtacgggcccctgtttggttgtggtaattactcatctcgtctcctccgctgtttttttttttcgcggcagcccctagaaagaaaagcaaaggtgccaaaagaaaagggaaaagaaagacccaacaacaattgtagtatggctgaatgttgttgtatgcccgtaggtgtatggctgaaaagcagtgaaaaataagtaaaagaataaaaaataatttatagatatatttatctattatcaattaaagtaaatgtctagaaaataaaccgtggtgtaaaatagctaaaatcaatttaaatatattttaaaattaaaatttgactgtaacaagtactactaccgttgcaaccgcctcctgataatattcgttaagcactgaatgcaaactaaaatcttgtttgatataactccagatcttaattcacgttggatttaaagtttgtgtgttataatatagcgttttaaaattttatatttcttctaaaatagaaataaaaataattttctaaatgttactccgtattaaggtaactatagatttatagagttagaaatatccggttctaagaaattttggtttaaataggacctaaaaatctcatatttgaaccagaagagagcaaaatgcgtgcattttttgcagtgttcttcacagcgggtgaaactaaaactggactacggccctatttaatttcctaaattctcgacttttctcatatcacatcacatcgaaaacttttctacacatataaattactaaatttttttcaaactactaattttctcctaacccccaacttttccacaatccacagcctacatacaccgagcaaacactcctatggaaaaaagaagttactgctatgctaccctcgcagcagtagcagcagcagagtgagcgtggaggggaggagatcgagatagttctcactttgaggagggacagaggtaaaaaagaaaaaaagaaagattggaaacagtgttgggtaccgtacgtgcacggctaccaacacgagcccctgctcagctgctctctcctctccggtcgctctccgctaaagccaccccctttgctgctgctgctgctcctgctctacccaagttcataatttcagtaaaaatcggtcgaattttacgaaattttgatattttgatacggctcggaattaagttttgattagaatttcgaagattaaacagtaaatttaatcgaaatttattaaaatcgattaaaatttatcgaaaaccgtaatactgatgaggatcaaaatttagtgatcaaccgataatgtaagcactagctccaccctccggatcgaagcggaggaggtggtaaaagaaaaaggggagagaatgtctggcccggtcagcgtgccgcggtttggtttgggtgcgtggtgaaaagtctcggcttttggatttgatttcggctcccgcaccaatgcccacgctagctgctgctgttgctcctctcctctcctctcctctcctctgctctccgagtgaaacttgcttctagtaccagctgcgagcttgttatgttccgtttcttccagctttggtgctctctcaactctgaagaagaagaggttttctctgtctaggagggagagattgtgcagcgaggtttctttctctcactaggaggtttgaggttgctgggagtggttacgaagctaattaggagctttgccgctttggttgagtttcttggtgagaggtgaggagagcgtgagcgagctcgctctcagtctcacgccttttgtgttgtgttgtggaggaggagaaaggaggcggttttttgttgtttctgtcagcgttttctcgtcaggtacagcctactatacttctttcgagttcatataccgtgctgctctcgaattcggaagcccttttttttctgctatcttgcgaagctcctgtgtgcaaagtcgaaaaagtttgccgaagatgaagtcttgctgaagctgccctgctttgcagctgcagtttcttgtcagtttccatggatgagtagcatgaacaagacgcgagcagaaaatggcatcttcaaccagtggaggaactcgagctcacccatttgatcctgttccttgagcattctatctcccaaaggagcaatcgcttctcctctttccatggagatgatggcgagcaagaaccctaccaaaaccctcctcctcctgctcctcctcgtcttcttcctctcgctggcttgctcccagccgctccactcggagcccatgtccaccaccaccaccgccacccagcccgcgccaccgcctcccccgccgcaatccaagattccccacgcggaggccggcggcgccgcccgcctccgccgcatcgtgctcggcgtcctcttcggctccctcactggcttcctcctctccctcgccttcctctacgccatccgcgtcgccatcctccacgccaagtacgccccggcaatcgtcaggggccccgtctccttcaccccgcagatttcccccaagaacctccactccgcgctcccctccgcgcagccgctcgcccatggccccaacggcaagtattacaagctggttcttgacaacgatgtcaccgtcgccgtcaagcggctcgaggctagccgccctgaggcctcgccgtcgtcgatgcccaatgtttccaagtctgacatgaggagggtgcagaggcagctggagttgctagctcgggtgaggcaccagaatgtgatgggattgaaggcgtatgtccgggaagccgaccggctatcgctggcgtacgatttcgtgcccgggggcagccttgaggatgtgatgaagagggtgaggtctctgcaggtgaacctcaattgggatgcaaggaacaggattgcgattggagtggccaagggattgaggtacttgcattttgagtgcaccccccggatactgcattgcagcctcaagccgtcgaatgtgatgctagatgaagatttcgaaccgagattggcagattgcggcgtttcaaggctaattgcatcaggttcagctgatccagaactggccagcagcctttattctgccccagagtgctaccaaagcagcaggtaaaatccatacgttcacgatttctgatcatattgtttagtctaacaagcaagtttattctctgaataatttcatcaatttttagtttattcttgacaatataactgaatgtgtttagatcggtctatgtggtttgcacatttgaactattgaggggaaacttaaacataaatcattcttaattttggtattttcagttcacctgcttacaagcttcgacatagcattattcttgaatgcaagctaatattcatatcttctcatttgtttatattatgctcgcgctgtaaaagatagacctgagaaaatctttagtaaaatctggttgtattttttcaaaatgatcgttatggcattggaatttttatggtccttgggaggtagccataagcttatacttccttaggttatttagagattcctcctatcgttaggcagtgagaggtctatagactaattaaaactaggaggtataaatgcctcttgatatctgccatgaacctctgtgaggatatgaaacaaacaactcatggtatttcatatttgcagaactatctagtgtatatggatgtttgcttacttgcattgggtaccttagatataataattttgataaccagcatggagtgatacatcagattagttggttctacaatcgcaaacaatagtacatttgttttggcaaaacaaccattcagagactctttgattatagcttacatctgcagatgcattcttttttccacatttggctttctttcccaaccagcagtatcaatccttaccttgttaatactgtccttttttttttcttatatgcatctctgttgcattttgtttcacaagtcgttttctgataatgagtagtcttctaagccattaattaatgaaaaggctcaaacagaagacataaagcatatagataaagaacggccccatggcttaatgtaggtatccgacttttgctttttgtaacacaagaatctttgctttattagagaacctgcatttgtcccttttgaaatgcctttgatccttatgcttttcatatattcctacgtgcatgcatgtggtatttggtctgcccccaaattttaaattgttctttttcattctgacctcccatatccccatcagagaataaatactttcaggattggcgttctgattctatattctttttctgttctcttttagccaaacctagatacgtcattactatatttttgaaagttaatttctcgacaagtgctttgtaaccagacctgattcattcaatgcccaagaagggcctggttagtgctttatctttgtcaaggtggatattatttccaccatatatttttgttgtttccaacggatccagcgttagttccagttaaagtttttccatttcatagaggttctgcttattaggtcttactgcccccttttaaattcaaaatatttgattgtgcagatacacagataagagcgatgtctacagttttggcatgatccttggcgtgttgctaactgggagagacccaacagatcattttttctcgggagaaaccgggcgcggtggattagctagatggcttcggcacatgcaacaatctggtgacgcaaaagacgcactggatagtagtgtcttaggagaggaaggggaagaagatgagatggtgatggctgttagggttgctatcatctgtctctcagatttaccagccgatcggccatccagtgatgaactagtccccatgctcacccagctccacagcttatgatctccgtcgaacgcttcttcgtaaagtactaatctctggatgttcttcatccatggcacagtttctgaatcatgctggagggtcaaaactcaaaaccctggatgcacaaactagtgtagctttcagtgtattcccttggaagagcccatgctaaatggcccacatgggaggggagctaacagttttcagaggccaatgtaggaaggaaatctggtaggtcttactagttcagttgtcagttatgttgtgtgttgcagctacatgctggtggttgagtgagcctcattgtcatgtgatgcttctttgcccttacatgatttggaggaggtaggcaaggaagatgtgaatattgtggtgtctttgtagagagaaagctgtctttttcttggatctattgcagacctgcagtggtggtggtatgatgatgtgcttctgcattgaccgatccatcaattctatcatgtactagcagtacatcggctccaccccttgcccatgacttgctgcaggagtgtcggggtccaaacaccattttgatggcatttttctcttcagttcacatgctcgcctgtccaacagcattttgatggccatgtatcatgcacagtcacattttgtgtaaaatgtaagggcctgtttggagagtttttggcagctgcggattctgagaaatcatagttgtagaatagttttcccaacttctcacaatctgaaagttgcttttcagaatctaaaactcccccaaattggctctgtaaatctcctttggcatgggaaaatttcattggaaacctaggagtactcttcctatgcttagcttagcatgtctgcatgtgtaacttgtgttgttgagcatgaggagaggagcctactactagtatgttgacaagaatccaatgtgaaatgaaattgtgaacctgaacaaacgttgagcatctttttttttcccttgcctgtctttctcttgcttatctctaaaactctgaccaagggttgcaatgtgtagtaagcagtggctatatttagttcgcgccaaaattgaaaaattgattgaaattggaacgatgtgatggaaaagttggaagtttgtgtgtgtaagtttttatgtgatgaaaaagttgaaagtttgaactaaacacggccgaagtttttagagtagcatagtactagtaattgagagagcttttactgcaacctaacctagtaggagtagttcactattttgcctgcatcatatcctgcagcttgcattggctgggcctgctgcaatgcgatgcaaggcaggcctgtgggcctctcatggcagaagaagaaatgaagagagagtggtttggctgctgtttgttttgcggtcagctttccattgctttggcacttctgctgttctgcattgcagtgcaggcgaaggcggcagaaagacggaactccacagtgaaaggcaggcagtccggagaagggcattgccgcattgccattgacatggagtagtacgttcctagtactggtagtacttctctttctttgcattgggggcattatgctattgagatagtaatggagatgtgctgatatatgctcactgggaaaaaaaaaactgcacggatattaaagctgatcagtgttgcagattaaaaagttactctagtacttagtacgtcagcacagatattaaagctcatcagtggtgcagattactcctttttcatactactttacgttttagttgttttttagggtgaatagccatttcacacagtttcatgggagaatgacttggcatacttacgtggcatattttgtgggtcgaaggattatgttaacctaaataattaatttggatgacttgttcagacgatttaaaacctcatggactaaattgttcgcttcaggaccgtattagctattcacccttttttttaagtcaaatttttctaactttaacaatcgattcctaaaaaaaattaacatgtgaataactcatggttacaaatatatttctcatagttaatctaaaaacataaattttacaatattaaactatacaaacttctaagaattgatggtaaacattagtaatgtttgactcgtgacaaagctaaaacaataagtacttttcttctagaaaacacaacacaaatacaagtgcccacaacatgtgtacgctcacccatgtggagacgtacatacacacatcctatccttataaacaccttcgaaagactggaccatcatatctcgagattgatgaagtctccacggatacctcactatcgacgagtatgtcgtctaccaaactaccaatgaaagaataattaaccgtaaatgcaagtgttgatctcaactgggctggttccaaaaaaacctaatctctactacttaaaaaataagaggtgcttccatcgtccgtcaaaaaaactgagcgaaaaaaccgagcgaaaaaaccgggagaaaaaaaaatgtccgatccaaaaaaaagatgtccgatccaaaaaatatgaaccgggcaaaaaaaaccgagcaaaaaaacacatataaaaaaacgtctgatcaaaaaaaaaggagaaaaaaatgtccgatccaaaaaaaagagcgaaaaaaaggacaaaaaaaaacaaatctatccgatccaaaaataatacggggcaaaaaaacgaaacgaatcagtaaaaaaagcatttttttttaaaaaaaactgtccgattccaaagaaaaaggaattatatgtgacgcggtaaaaaaaatcgaatcctattatacctagaaaggtccgacactataataaagtggtgaaaaaaaaccattcgtaaaaaaatgcacgataaaaaaaagggcggaaaaaagcgcggtgaaaaaaagtctaatttatatttatcattttagtagtccgtttatatctcttctttatctctaatctaatctaatataactatttaaaaagagaagtttctaccatatattaaaaaataaaaaatgcgcgagaaaataaaaacggtttaaaaaacgcgtgaaggaaaaaatgtcagaaaaaaatcgcaaaagaaaacgcgctagaaaaaaagttccgtagtccgtaaaaaacacgcgagaaaaaaaatatttccatcgtctgtaaaaaagcaaaaaactattagaaaaaaaggctaaattgatggacacttggtcggataggctccatcgacttttttccatctcctacacgacttttgtttcgttatctattctcctatattagagagcctgcacatctttgtaggcaattatcataatatttttgtgaagtatagctattattcttgataacatattatatataaataatcttagaaaataaatatattctaattgttatttagagaagagtgcatagtgactctattttgtgtagacttgaccatacgagacagtgtatgatttgattggttgcaagaatgagattaaaagaatattttagattatatgcatgttgttatatgaataatccaattattttaggtaaagcaaatatcgtaaggttgccatcatggaggttgggctattacatttaagctgttccaattttctaattttctaattgtcatcgacatggttatgcatgaacaacgtatattatcattacgttttttcacccgttgcaacgcacgggcatgtttgctagtagaataaaaataagggagtaaaagttaacccctatcactttatcagatagtcgaaaatagccctgcctcatatgttttctctgcttttttaaagaggaaaagaaaaacgttcggatagtcgaagaaggtttttgctgcagtacagtagcgatggtacacgaggcacagcgcaatgggccaaggcagcacagcagcgcagtgaagcgagcgaggaggggggcccacccaccggcccaagctaagcgaggacggcgtggcggtgagctgcagcgtgtgtgggccagggcctcctccgcctctctcccacccgtgactcctcctcgggcgtcgcttagactttcttttgcttttggatggtgtacggcccaccacgacccatccggatggacggccccgatccaccaacgcggcgcgaatctcgaggccgatgggcttttcggaccgtacgatggatgggtggtcgacgaggtgactggccttgtcgcagagagggggtgtgggtgtgtcagtgcaactcagtagtgggcctccatggcccatgccagatggggcccatctctctctctctcactcactctctgctacgactgcaagtctgcgatgcctgcgtctctgctcgaatcgatggatggatggatgtgcttgggcgctgctgagctcgtgatcattaggctccggttaattatgacaaaacactattactgtctatactgattagtagtactacgtactcctactaagtagtactcctatggtatttggagtattttgagagcaaatcaaagccattttggaatcaagaatagatccaaacttatcgctgcaaattgacaaccacctgtgagattttcttttagctggtgcttccgtgaacttatctgatgcagacgtatggagtattggagcactactgtactatacaactacagtactactgtagactgtagtaaggccggcttgtttgttcatgtagctacaactttctcattttctgttagcagggttcctaaattgctaggtcaattttttttaaaaaaaaactttttatgtagaagtctttttttaaaaaaaaaacgaacatgcactgatatcttaatcatgtttaatgtgtaatccagttaaaaaagctaaccgccacctctcgctagaactgagctagtgctcccttccagcaagacgcgtgatctgatgaatgttctttgctgtctctgtgttcttgcgtgtgaactttcacttcacggggaggaggccgtttttactttaaccgctcgacgaccactggccggggaattatccccacgcggtcaattcatagatttcgagtcgccacctcaggcgatccctccataaaatttttcaccacgtcacatcaaagatttaaacacctgatatttagtattaaatatagcctaaaaagtaactaattatacatattgtgattaatttaagagacggatattttaaacctaattattctatgatttgacaatgtggtgccacagtaaacatttgctaatgacagattaattatacttaataaattcgtctcgtgatttacttgcggattttgtgattagtttttttattagtgcccgaacaacccatacgataccctatataatacccaatatgacacgtcaaaactttacgcactgaatctaaacacccctcaattttccataatatatactcctacttcagcattatgtatctgggtctccattcctcctagtcgtagctgacttaaaaaataactactaccagctgttatttttcctttttataagtgtatttatcaaggaaaacaccaagtttattcctttcatgttacagttggtcagaaactggtcgttgaaatagagaggacctaattgagctatagctccatgacttgcagttttcacaacacaccacacttctctgtctgaatgaaccttcctaggtttagacctagtcttcatctaaagctcaaacctacaaatgatgaaagtgactttttttaacgtttttcattttttttttctttatcgaaggatagttttgcagctagcaaatgctgcatccattcccaagtataagggttttggctacacgctattttagaactaagatagcaagtattagcaagtacacatcaaccgagaagtcatcgtgaaagtacttagaaaataatgttgtgtcaatccaggtgcataactaaaatatctcatatttccaaatgttagacggtgataagcactaagtaagtatacatcaaccgaggaggtgtcacgtaaaagctttaaaaaacaaagttgtgtcaattcagatgcataactcaaattttttatatttccgaaaaaatagtaagtgctagtttttcgcatattccgcacataataacaatattaaaccagaaagattagaatactcttactttaaaaaatccaaatacgattatttctctctttatatactcttgttgtatttattccttgttttcataaaatccgatgcaataattgtttaaaaattagagttatttggatacaaacaggagaagccgtcgcgaaaaagcctcagaaaattacagagtgtgaaatgtccactacgatccatcagcagagacagagatcgccattcccaaccggtcatgccaattaagcataggaatcagggagcgtgacagtgtcatttactccatttagcagcaacaacagcaacaacaacaaaaaagaaagcgtcgtcgccgatgcaaataaaaagttctggaaatgtggatctcctctgatacccgctgaattaattaattaatcagccagagaaaggctgtccgtgttagggaggattatataagagcaagtcatctataactaatataatagccaattcatactattaatatatggtcccacctatcatacgtacagtgtgtcttagagtatgtgctgcagctggctacagatctatagaccgctgctcttttctctcatcgtttatctcattaaaatatgtttatagctggctaatagcctactattgtacatgctctaatctatctccattgtcaaggcagcattagcatccactaatttaattgttaatttaattgaagggaaaaccaatgaaatgtcactggattcagtattgttcccggtcagagcccaacagcgcgatggcggagattaagatgcctgcaattacgcatgagtacaaatttgttttcttttcaataaatggagcctaagtccaacaaactcagcatggttcgtcgcacattctttgattatttttgttattgtcatatcattttccacatctgatagcaatgcccttgccacgtcaaagacctagacaaaaacagacaaaatgtcaacgtaaaccaattaacagattaaacaaacggacatgattttcttttttaaaaccacacctgcttatcctatttttcagctgtaccgacagagatttccatgaaattgacacacgttacatagccaaggtgaaatttctatcctttttttttctttttgataaccaattatacaaaatttacagtcaaaataaccacatattactgcaaaatataatttgtaataaccgactaatacaaagtttgtaaccaaaacaattacatattattgcaaaaatacaatttgtcaggaaacaatagaggttgtgtttagttactgaaaaaaattaaaagtttgagaaaaaatggtagtttagaaaaaaaaattaagagtttatgtgtgtagaaaagttttggaagtgatgtgatggaaagatgaaagttggggttaactaatcacggccagaaataaccgaaacgccagtctaaagactggtataacaatctggtgaaccttcatcctcgattggctaaagacaggtaaaacaatccacggctaaacctttatcttgatttgtaaaaggctgcacaatctttttatataaatatgtactctagttcttgtcccctattccttttcctttttccttttcaatttttttaagaagcagtgtgaaaatttcaccatctgtccgagtgtggaagccgggcaggtccacgtgtcactttcggatgatccccatcaggtgagctggagctgctcgacggcagtgactcgccatggatggacggcagctggctctgtagggatggaaggcaggaagcagctgcagctggctggcctgcatgcttgccgtgtcgaccagctacaggagaggcggtcaaaattagtgccgtgaggacgaaacccacatcattagagcaagtatactataaacctactataaacttacgtaaaggagagaggtaaacaaaagagaaatgtgttggctctcatacaagagctaacttaacacaagctctaagacaaatacattaaatatataagtgagagatagagatagaagaagaaaattatagctaaccttatagctaatctattatatgtgttgactttagtttaggctaatagtaggaagtgggctatattagtatccttgctcttagcagcatactaatcagcccagccttttagggccccgttgaattgtaggagtaaaaaaatagcggaataaaaaatacaggattctgacagaaatacaattgtagaacaaaagattacaaaacacaagaaaaacacacgaatgaccgtttaattggaccaaaaaaaaacacaggaatcagatgagagagatagactcagaggaaatgttctaaggggttagacctcttgcaaacttttctccaaaatatatataggattacctattgcatagtaattttaaagaattggataggatttaatcaattgtttcaaagactttcggtttttttctataggattgaaatcctccaaaattcccgcaaatcaaaggcgcccttagcttagcttccggagcgttcaattatttaattaccgcctcggatacacaactaatcggttaattaattattagtcgagatgagatgagattccttggacgactcagcagcaggatgcacagtagtagtgctaggtcttcacgaccggagagagataagctaaacaaatatactagcgccactaccatagttaattaattattatttaattatatcgtctctctaatgacccagtaatgatgataaactttttagtattttttctccatttagttttgggctgcaaagcaggagacatatgtagtactagtagagcaagtttaataggatagctaaatggtggcttcaaatcatctatagctaatataatagcctatttatataatagttaactataaaaatatactacaacattaatatccggtcccatatcatacacacacgtaacgttttaaagtccgtgttgcagctggctataaatctgtagcccatttttttctatttattttcttttttcttgatacgtggttatagcggcttatagtgctactgtacctcctcgtagtagaagactagaagaggcaatagcttagagtaggtacaatagcagtctataagtcagctataaatatattttaaagagataaaagaagagagagaagagtagcgggctacagatatgtagccagctgcagcacgggttctaatatataatgtgcgtatgacaggtgggaccagctattgatagtatagtaagtatctattgtatgaattggctattacattgactatagatgatagtagtaggctatattattaaacttgctcttagccacagtgcaggcccagcctgagccagccatcgtggccagctcgcgattagggattattaattagtgggtgcaatcaattatggtggctaatgggaggggattagtagtttaatcacgttcccccgcggccgcggccgtcgcggtggaaaggaacaggagacgcgcgcgttgttgccgtcggatgccgcgacagcgcaggccctgctccccgccgtccccgcacgccgggctccgtctccctcgccgttaagcaccgcaattattgcacccctcccccctctcgccgttaagtatagttaattagtggatcggattcgatttgattaggacagtcccaaccttccatgtaggatgatgtctatggtattaactacattgtcatataggaattttagcttatgtgtcactatattatttaagagagagtaaagagagaaagaaactgagtctcatgcaagacacaactttaacacgagaaataaaatgtgatgctgctgctttttcctctgatttggtggtgatcgctccatggtgcggtttcttgttatggagcaaacaccaaagcgttggtcgtgtttattgctgcctttttttagctcttactttgagtacgagaattcgtttctctttcttataaaataatcaacgcgtacaggttcttttttttatatatatgaaaatctgcgtttctggaaaatgctccatgcttgtttgttcatataagtctctgaatcgtggagctttgaccatttcaaatttacaaggaattcataaatattctgaaatattttatattatcatcaaattttgtctgcgtgctaaatacagccatacaattttctttccaatcaatttaataattcaaaataattagcggtcaacatcaaagcaacaacgatcagcaagtaaacctgtaaacggaaaccaggggtaatgttctttctatcaagagcaatcagtagtttctacgagccaagttacgtggttgttaatactcgaattattccatcaaacaagttaataaagctgggggggggggggacattctttttttttttccagaaaaagaaggcgccggcagaggggttgggcaacccgttcaagggctcgttttgccttgccttttccgggcgagacgaaaggatccatcacacggccggggggctctcattcccaaccccgctttccacatttccaaatctagacgtgctttgcttcgccggaaatccaacccacttgctcccaccctaagccccttccaaacacgaaaatttttttatcccgtctcatgtaccgtttcagtataagggtaacggtgggtttccatatttaatgtttgattattcgttttattttaaaaaatataattaatatttttattgttattagatgataaaacattaatatactttatgtgtgactgattttttaagaaaagtttataatttttcaaataagacggacgattaaacgttagatatgaaaacttacaaacacacttatattaggacggagatagtatgatgtatacaaaatcttggatgacgtttgtgtaaatcgtatgcgtatgatttcactcgtcgtaaatttaaattctactagtgtttaacaaaaatcacataacatgcgggtgtgttttcaacggaattacggtgagaatagagagtcacagctactctatgtctgtttgttctgtttgtttgcatgtgttttagcgcatattcgtcggtatgtgagcgtggtgttgagtgtacagcagagtgtaagcgtgaattgaaaagaaaaagaccaatactagcactagaataatgaaattgtgaaaatgatcgaaaagaaaataaaggaaagggagatcacttgcttatcacctgcggtccaatgggcgacggaaacatggagcccgtgatgtaaaatactcgagagaaaaaagaagaattagcaggaaaacacgagcagcggcagcgagcgatggaacggagcaagtgggggagagaaaaacagggaacgggggtgcagcttggtctctcgggtcatcaccgtccacatcatcacgcgccacgaaatatctcccccttttggtaaactcgaaattaggaggaaactgtttgggttctgtagcagttagtgacctattagagcagatacaatagtagaccataaaccagctataaacatattttaaaaaggtaaagagagagaagtagtatcacggactccaatacgtaatgtgtgtatgataggtgggaccggatattaatagtatagtaagcaactattatatgaattggctataaataatttagagctaatagttggctatactattaaacttgttcttgcttttagtactagtgctctgttttaacaccactgctgccaatagttttactgataccgattcttcatgtctcagtagccatcaataccagcggcttgacaaaatttaactctacaaagataaaacgcaccttcaataatgcggtagagtggagttttccatcatggttgtacacacgaatcctggtgcagtaactctgtgtttaagcgcgcaatactacaactaattaagaagtcttttgagctactccaccggacaattatcgtggactaattttttgatgcctccatttattataaaagtactatttctattgtagtactgcttagggctaaacacactttaaccgtttatcgctttatcaaattttaaaagttctataagttttttctcttaaaactataataaaatttggcaaaaggcatgaaagtaaacaaaaccaacactaaaatgtgcttaaattttcgtatggttgattcggtgaacaagtccttgttaacttgatctcagcatactagtatcacttatctcctcctgtggcatacatgttagggtgacacaccactgcttgcccgtgtgttacgcaacagagaagagagacaagatagtagtaaaagaaaaagaaaatatcctatatactccagcaaggggagcagcgtgtgtgcacgtagcacgcacagcagtaggtgcgcgaagcaatggggcatcgtccaagccaaaaaaaaaagaaaaaaaaagaaaaaaagaaaagctgtccgtaggtgagggtgtgaggcgagagacggtgctgcatccaccaccccgctgcgcccgctgccgctgcagcctggtcagccagccagacagcccgcacccacgcggacagggcccaccacgaaccaaaccggcccggttcggttcacagccacacgccgcggcccggtttatttctcttgatttatttaattggtttaacttctttttaatactaatgttttagcgtgtggttttttggtgtactccctacaaagagaccaccaccaatccggctaccccatcccccctcctctttctctcctcttctcctctccacaaaaacatttctactgcttgctcgtctagtattccccacctccctttccttgccttcctcgctgcctcctcctcttcctcctccgtctccgctagggtttccgcgccgccgccgccccgatccgagatgccgccggccgccatggctccccctcccccgccgcagggctcctccacaggtacgcgcgcgcgcgacccgccccgcgcggtcagatctggtcaacacagctctcctcgcttgcgagcttcgttggggttgggtttcgaggttgttaatggttttggtggtggtgcaggggatccgctctacgacgagctgtggcacgcctgcgcggggccgctcgtcaccgtgccgcgggtgggcgacctcgtcttctacttcccgcaggggcacatcgagcaggtggggtgaagcttccccttctgattcggcaattttcggcttgagaggttgctttttcgagcgctgattttggttttttgatttgattgattgtgctgggttgctgcaggtggaggcgtccatgaaccaggttgccgacagccagatgcgcctctacgatctgccctccaagctgctttgccgtgtcctcaacgtcgagctcaaggtgtgcttcctacttcccctttgatttgcttgctcttcaattccggagctcaccgacgcgacccctctctgcttcatctgtttgtttgtttgttctgcttcgattttgactctgttgctttgttatttttttttgttggggaattttgtaggcggagcaagacaccgacgaggtctacgcgcaggtcatgctcatgccggagcccgaggtaaatttcccgcgtgaattcttcggaggatgagtaatttttgccgtctcggtgaagttgtttaatttctttctctgtttgaatttgtttaatttctttctctgtttgttcctgcagcaaaatgagatggcggtggagaagacgactcctacgtccggccctgtgcaggcaaggccgccggtgaggtccttctgcaagacgctcaccgcgtctgacaccagcacgcacggcggcttctctgtactccgccgccacgctgatgagtgcctccctcccctggtatgtgtgtcttttaaccctggagtagatgatcctattaatgttcttcatttgaagtgtgtttaagttgtaattgatctgtgctactagctgacctgatctgcttgcttgtcaggatatgacccagtcgccacccacacaggagctcgtggccaaggatctgcacagcatggactggcgcttccgtcacatctttcgcggtaagttgtgtgcccctttgcttaccatggttcatgccatttttacaccgtcttgcatacacctgcggctctgcagaccactagttgtaattgctgttagttctttgtcaattgattagaccactgtaccattcaagcatttctggcaatgttacacatcaaatctttcaatgaatcgcaaaagttttttctttctgtacttgatgttgacgatgatgatgattattgtgttattgctgttgaatatcatcagggcaaccgaggaggcatctccttcagagtggttggagtgtgtttgtcagttccaaaaggcttgttgctggggatgctttcattttcctcaggtctgttgtggtaccctctctgcccagcatttcaattccttgatcaagtgttaactttgctgtgctctacgcagaggagagaatggtgaactccgtgttggtgttagacgagctatgaggcagctgtccaatgtgccttcttcagtcatatctagccaaagcatgcacctgggagtccttgctactgcatggcatgctatcaacacgaagagtatgttcaccgtctactacaaacctaggtatgttgagatgtccactacaaatctattgttttatctggctgttaggctattcttgcatagttgcatgatctgtaacatatcgaagctgttcctgccactgtgatcccatctaattaaacttctctgaatgatgatgataggacgagcccttcagagttcattataccatatgatcagtatatggagtccgtcaaaaacaattactctgttgggatgaggttcaggatgaggtttgaaggagaagaggcaccagagcagaggtatctgttgtcttgatattctatgtaaatatggttttatgtggattattccaagtgattgcttgattaaacttatttccattatgtaggtttactggtactataattggcagtgagaatctcgacccagtgtggcctgaatcaagttggagatccctgaaggtaggttcttgtttactactggcattttatgtggctggagaagttatgtattgatgggaggagtttttcaataatgtaggtgcggtgggatgaaccatcaactattccgcggccagatagagtctctccttggaaaatagagcctgcttcatcacctcctgttaacccccttcctctttctagggttaaaagacctaggccaaatgctcctccagcatctcctgaatctcctattcttacgaaagaaggtaactacacaatcttatagatcttaagaggaagggtgatgataatgcgtgttcaattaatcctctgaaaactgttggtgccatttgcagctgctactaaggttgacactgatcctgctcaagcacaacgaagtcaaaacagtacggtcttgcaaggtcaagaacaaatgaccttgaggagcaaccttactgagagtaatgactctgatgtcactgctcataagccaatgatgtggtctccatccccaaatgctgcaaaagcccaccccttgacatttcagcagagaccccctatggataattggatgcagttgggaaggcgtgaaactgactttaaggatgtccgttctggctctcaatcttttggtgattccccaggcttctttatgcagaattttgatgaggctcctaaccgtcttacttctttcaagaaccagtttcaggatcaaggttctgctcggcacttctctgacccatactactatgtatctccacagccttccctaactgttgaatcaagcacacagatgcacacagacagtaaggagttacatttctggaatggccagagtactgtgtatggtaattcgagagaccgaccacagaatttcagattcgaacagaactcatcaagttggttaaatcagtcatttgcccgacctgaacagccaagagtgattagaccgcatgcatcaatagctccagttgagttggaaaaaacagaaggcagtgggtttaagatttttgggtttaaagttgatacaaccaatgctcctaacaatcacttgagctccccgatggctgcaacacatgagcctatgcttcaaactccatcatcattgaatcagttgcaacctgtacaaactgattgcattcctgaggtatcagtaagcacagctggaacggcgactgagaatgagaaaagcggtcagcaagctcaacagagttcaaaagatgttcaaagcaagactcaggttgcttcgacgaggagttgtacaaaggtatagtattgttttcttgatggtcatgacaatgtgcatgtcttttctgttgcacaattttcttttacttaagaattactgaatgtttgttgtctagattatgctagctgttgagaacaaactatccagtcatatcagagtgaattgattctggtggtgttaaagcacatattgttcttttattcagcacatgaagttttttcttctcgtagttgacatgctgaagttctcgttttgtaaatttcttgcaaaatctcagttttatcccctttgtggtatggtaaacccaattttgctatttcttgtcccaaaaaaaaatcatgagcaatattattcagtgcagcatgagtgtgtcaagtttgactattggtctgcactatgtaataacatcatgtcattgattcttcatgcaggtccataagcaaggcgttgcacttggcagatctgtggatctttcaaagttcagtaactatgatgaactcaaagctgagctagacaagatgtttgaattcgatggtgaattggtgtcttcaaacaaaaactggcaaattgtttatactgataatgagggtgatatgatgcttgttggagacgacccatgggagtaaggcttctatcttgggtacctgcttgatgttttgttaagctttccttcctaatactgattctagctggttcattttatgagcagagaattctgcagcattgtgcggaagatttatatttacaccaaggaggaggtccagaagatgaattcgaaatcaaatgccccaaggaaagatgactcttcagaaaatgagaaaggtcatctgccgatgcccaacaaatcagataactaggtatgcctgctaaattgccttatctggattaatttattcaattgtcgataaaacttgaaaacaagaaaggaagtcgtagattggaagtgtagccgtaggatagtaaaattcggtttctgtgaacttttattctctttccattgcctctgcctggcttttacttattcttgatctgcaagcatggtcacgtgatattgttgtttgctatgaagagcttgctccgaaagcgattcacctttcagttgctgtttttggcgtttgtgcaggttcagtgaagcgagatgatacaagaggtagatcgcatggagtcttgagagagagatgccattctgcgggtcccagtcaagtaaaccccctgatgtgttggtgatcacccctgcccccccttttgcttatctgatggctgatgcaatgcaaaccctatggctttagctagtatgagatgtagactgcctattgtttatccttttgttcctttttcttctcttggcagaaagatttagggccaagatttatcattattgctattgcccctctcaactcctcccaactctctgatgtaaatatttatctacgtagccagccacccagccagaagtagagcagtagtagtagagttaccccctaccttgtattaaccagcagcctattcccccggataaatttgtgtaagctctgtagctcgagataaaaaaaaatggcgatcgaacgaacgaacaaatggcgtatgtattgtctgatctttgatataaatatttatcaatgaatgtatcatagatggatatagatgaaggcatgctgcaacgtgtttaatttggcaacgttggtgtggaaaagcagaaagctgagagatcattgttttgttgtatatgctcgtccagtaatcgattggtgatttggcagcagttgattgcgtggtcgggggagggggatggggatggggatggggatggggatggagacgcggccgtgtgttgggggtgttggaacaaacaagacttggttggaattggatggccgcgtcgtgagtgctggtgggcgcccactttgcctcctctcccttatcatcatcttctcttcttgttgattcctacggtaggtactagctgatgaggaagtcttgagtggtgcggtcttgcagtgcaaaccaagggaacaggaaataaaaggggaatagtagtattggcatggcatatgctgcaacccccttgtgtcactttcggtgctcgtgtgtttcgttgactagagagaatggcaggtgctctgtccgtcccataaaaagtctcataaaataaaaaaaaacttatactggatatgacacattctattacaacgaatctaatactagaatgtgtcatatctagttctagaatcgttttttttccaaaaaacatttagttttagatttgtttttttttttccagatggagggagtactccagaaagctgcctctactagtgtgctctcaatactgcgctacagtagctagtaccactgctattgctgcagtgcttacctgggacattttgttgcgatacttagtgttgcgaggacttgatcactcgtcgaccggctttcccatcgatggagagaggagaatgaatggatcaatcaatccctctatcccttcctgtgggggagcactgaagaagtcgactttgaccgagtaattgactgcatcgggaggtcgtcacggggaagatgagatgcgatcaacacgagccgacgccgacggccaccgagtccaacgccggtgctgagcctcagcacacaaataattataattgagtattaattattactccctccattctaaattaatttacatataatatttttgagattattcctaaatgatctacatatttgtgttcatttattaagtctattcgttatttgtgtattggagtaaatggacattaatacatgcatccatgcacacaagtatttataacccacatgcaatatcttgatttgctattggctaagaaatagtgggaatggtgcatgcattgagtttgttgctaaagtaaatatagtatgagagagttattagtttttcttggtcttggtgtacctatgaaatatgtagatcaatttggaatagagggagtacaaattttagaaataaatttatttgatttttttgaaaaaacttatatatatatattttaaaagaaccgtgcgttaaatttgaaaaccgtgtcaacggaaggagctgaagtttagttgaagaaaagaacggggcttgcacggcactggcaggtgggcccgtcctacttcgcatagcaggcgtagcacatgctgggccggcccgctcgtggtggcagtggcactgacaaggcggggccactgaaagcgaggtggggggcccatcttggttgggcctgacaggatcgagtccacgcaggcgggcgagtccaagcgcgtggcgacaaggcctctgctttactcgtggccagcagccagcagccagggccccacgcgattctctgtctctcagactctcactcgtctcgtttttctcatgctactcctacatttgcatcactaattcactacctcctctgtgccttttgttgtacgaccatggcctggatcgatgaatcagtgatctccgaatcaaagtccaagtcttctcgacttctcctctttagaagggcatccacgagaatattctattcaaccacctattaccattgtgcaactagtccatatagaaaaatagcaaaagatacccatatacatatggactatccatatggaataaattatattatctatctctactcctctctcttctcctaatgataccttgtatctatatacattgtggacattgccatatggataaactatttatgtgggttccatttatatggatcactttgccatatacattggtgatgcccgaactagttcaatactaatacatcaaattactaacttcatatatatatatatatatatatatatatatatatatatatatatatatatatatatatatatatatatatatatatatatatatatatatatagtcagttcgtacattagttatttatactagtagtacactattaatatctggtgacatctatcatacacacattatgtcttaaagtccgtgctatagctgattataaatatgtagcccactactcttgtttttttatagcttcatgtaaaagaaaaaaaatgtttatagctgatatagagcaagtataatagtaggctataagccggctaaatgctgagttggaggaaagaagagaggagagagaggagaagcgggctgtgaactaacagccggcttggatgcaagaaccaagaaactctttgagagagacaagtggactctgtattaattgtgaagagctaactattatatgggtaggttgagaaaagtctataaagaaccttatagccagcaggtcggctgtattattagccttgctcttataatctgttatgttatggtaactactgttactagttttgaatcgaaatgctagtgagtactaatgcttcgttgacaatccaacgtgaccaatgctcctaataactcatcgagtcgtcatcatcatctctcacatagcatctttgacaaaaacactttagttctgcacggacgaacagcagcagcaagcatcgaatcgttttcgatgccgtctatcacgctgtcattactactccactttaggatgcgcatacggtgagacatcttctgaaacatatcaggaactcttgtagttcatgtgaaagtcctgcaaaattcctacagtatattccaaaggaatcaagtgttacacagaacagaacacaattgtattgctagcttcaaatttcagtgccattgatcttaaacaagttcaggcgaggcagttgtcatgcaagctccagttgcttgcatcctgagtacttacttgccagaaccagaagagtaaagacagatcaatgtaccaaacatcaaactaaaccaactgaatgagagagaggcaacgcctaagcatcgaatgctggtcatgcgagtgaagtgataaactggaggcgatgctagaaggatgcaacaattttcaagtgtgagaagagtcttatcaaggactaccttggatgcaatatactcctagaaactgagggattatcttttgtaagttgatacaaccaatgcttgtaagttgtaacaatcacttgagctccccgatggctgcaaaaaacatgagcctatgctacaaactccatcatcattgaatcagttgcaacctgcacaaactgattgcactactagaatcagtaagtagtaaaagtacagctggaactgcgactcagaatgagaaaagcggtcagcaagctcaacagagttcaaatcaaaagatgttgaaagcaaagtctcaggttttctctgaagttcatgacgatgtactacatgtcttttctgccgcaattttccttttttactcaagtattattatgggccgagaaatgggcccaaatggcagcctgaatcaggcttgccaagacctaaccctaccaagtctcgcggatgccgccgttccttcctccctcggtaaacaaatacgaatctttcctgtttttttttttgattttgacgatttcatcctccttgttggtaaaaaagatctttcctgtttagtttttgattctgattagctcgaatttcgattgattttgaagttacactccgacaagagtacaatggccctctcacggaggtttctgaatctgatcgtggacaaccgcttccctggatccaaatcgctgcgctgcatcgaccttacgctccagaatttcttcaacatatcagattccaaagttgtcgcggctgatgcctccgcagccataagcggcagcatggattggatccaacttccaagcccaatgttcaacttccaagcttcaagtgtggcccatcactgggaaattagctgcttcccgctaagaggtcgtgaggtgctctgcatcgaccaggatgaatgttgtttgatcttcttgttactatgcctgacctctatcaccccaagggatgccccatctccctattcgttcccagcaccaatgttgatgatgatgatggtgatggcaccctcttcatcatggagagggtcgttaaaccggagtcgccgagaagttcaccgtcgcacagcgatcagttcgaggctgttttctaccgaacgcagagctctgtccgcagtgtttcgtccacctgcaaacctctacctccaccgcctttcgtcagagaccccaaattctccaacacacgcaccacgatcaactcgtacgcggtggtcagtggtggatctgagatctgcatttcggtggagggtgctggcacttactgcatggacacagtgaagcatacttggaggcatgtaggtcagtggacattgccattctatggcaaggttgagtatgtacctgagctcaagctatggtttggcctctctgacaagaccaatcacttggctgctactgatctctccgccatggatgactgcttccagaggccagagctagtgagagcttggatggaactctcaccttgtcagcctgggctccggcaggttctgcatcgcaaggttcttctacactcaggcattttgcgggctactatcgtgatcaaataattgatgatccctttgttgtcttgactggtgtggatgttgtgccggatgatgctagtggtgatgcaaatggcagcatgggggaagtccagctccggatgatcaagtattgagtctaaacttgccagcggtgcgatcgagagagtgttctgaataatttggatctttcgttcaactctatctgctagcattatgtaatttttggtctagggctgtaaaagagatttggtatctttcgtaacttttgtgacaattactaaagttatttatccatgagatattgatatgatgtttagttttgtttggtaaacaataatcaagttaataacttttgtgactgttacaaaactaactgacagaaagccttttattttcctatttattatatctagcctagatttcattgagttttatttcatattcaaattctcccatttaaatttctttgcaatgttataaacagctcaatttattcctctaaaatcctattatattagcacagctttttttcctaattaattcctatgacctatattttttttatcctacctacacataaatttcaaagttcctacatctatgacaccccttaacctaaattcttaatcaaccccttctagatctctttatttaaattcgtttgaaatcctattcttacaaatattctgaattcagacatctatcttgttcaacatcttccatttaacaccttcccaattttataaacatctcgatttattttcttttggctaacacttgttcttttagccatatccctttttccataacttaaattccttaatttccgcctccatagacattctgaagtatttataccaaaggctcgactctaaattcaaatatttattcttctatccaaatactcttcctttacaccaaaaacccaaataaaatccctatgaatttctccctcctccacctaggccgaccaccagcccatccttcttatccagtcctcagtagcccatcaggctccaggcccagagtcgcggcccactgatccgacctcttctcctcctcacccccctccgccgtcacgactcacgagccctcacgagcaaaaatctttcctgcttgattttgattttggtgagagctcgaattcaatttccaagttgattccgacaataccgaatttcatccttcttcttggtagtaacaagtacgaatctttcctgtttattttgattttgatgagctcgaattttgattgaatttgaagttcaccccaacaatggccctctcccggaggtttctgaacctgatcatggacaaccgcttccctgtatccaaatctctgcgctgcatcgacctcacgcaccactgcaatctcttcaacgccacaccaccgaatttcttcaacggatcaaaatccaccataatcagagtggagaacaggattcaacttccaagccccatcttcaacttcgcagcaggtttcggcgaagctacacgtgcaggtttcggcgaagattggaggatggattgcctgccgtttcttgatcgcagggtgatctgtgcggaccagtcgggacgctgttttctcttcgaggcagacaggagccgcgtggttatgctgcctcgtcttcacggacccaagcaggtgcccatctccatcctcatcccctgccctgaagaagaatccggtgaattcgacggcggcaacttctacatcatggataagatgagcagagctggagtgtcgggaaccaatcagttcgaggcgttcgtctactgccactatcgtggaagtcgcatcatgaaatcatggacatgccagcttctcccgccaccgccgtatgtttatgacagaacatacttgggccgatggctggagatcagatcttatgttgtggttgattatggctcgaagatctgcatctctgtcaaaggtgttggaacctattgtatggacaggaggagcctcacgtggagtcacctgggaaaatggatgctacccttcattggcaaggttgagtatgtacctgaggtcaagctctgggttggcatttgttcaagcacccatgaactggctgctgctgatctctcatcgatggattcgcagccacaattagttggtacttgcaaggagtttgaaccgccggaggaatggaagcaatgcagggatcctcaacttgtcaacctgggttccggcaagttctgcgtcacaaggttctttcgcaatcaggctcccaaaggggattctgatgatgagttcattgggaggaacattactgtcttgaccggtgtggaggtgatgcagagtgcttgtcatggcaatggcaatggcaatggcaatggcagcagtggggaaatggaactccagatgatccctcacagatcgagatggtatggtggcgataccatcgggacagtgtgctgaataaaatgtttcatctgggacaactcagtatcttgtcggacaaattctgctcttctgtgctgcccatttcatacttcgatgtattttggtagtatcctctgcagtggtttgtaatgtagcacgggtgtgtttagtttgcgaaaagaaaatttttgggtgtcacatcagatatttgatcggatgtcggaacgagttttcgtacacgaatgaaaaaaattaatttcataacttgtctggaaaccgcgtgacgaatcttttgagcctaattcagccgtcattagcacatgtgggttactgtagtatttatggctaatcatggactaattagacttaaaagattcgtctcgcgatttccatgcaaactgtgcaattagtttttgtttttatcaatatttaatgctcatgcatgtgtctaaagattcgatgtgatgtttttagggaaaaaaattttgagtactaaaccagaggccttagttagatgagtgatgacatgtcttgctgtgacatagaaaggagaacgcaaactaagactttagatcaagtttttttaatacttttaaggcactttagatccaaagtgaaagcacattcaagcgaggaacttgtgacgcatgctccagtcgttttgcatcctggtaaaaaacagatcgagctaccaaatgtcaaactaaaccacctgaactagcgaggaaacaacgcatcgaatgctggtcatacgagtgaaaaaataactggaggcgatgctagaaaacctgctccaggttgcaatatttgtttttctggggttgtacggactaagctgatcagctcatgtgaagggcttcttcctcgacttctgtcaggacatcgtcctcgaagaacgcctggtggagggcctttatgcactgctttgcctcgctatcatgaacaatcagagacatgttaacctgttgaaggcggcaacattgatatcaggaaccaggacatggatacagcgttgtcaagtgtgagaacagtcttatcaaggactaccttggatgcaccttgcgagatcatctggacattcaccccgcttttcctcaacacttgaaaggccttcaagaccagatgtgtaggtgtgttcagtgtgagtattgcggctatcctatggaaagaattaggtatgcgcagaaaatcataccttttccagtataagagatgatcgccgtacgtttccaatgagtgatattattgccctctgctgaagtagatggacaactgcaattttctcaagctcttcaactacatggtcaagttcctggaaatttggcaacaaagcgaacaagactgagaaggcaatgatcagagcagaatgattctgagaatagctacatgccacaaaactatggggaagctaacatttttactacctatatatgccacctttagagaatgagcagtccaagtgcactaatgaacatttaccatcacaaaataccatagtaagttccatatttatcactaacatgcaattagaacctaaaatggtcaaagttgcggactggagaccgtgttgatgtccaaaacaacacctaactagaaactgagggagtatcttttataaggcaacagccaatataaacaaataataagctcattttttgcaattatatagagttagttttaccttgaaagaatgtactagtttggtcagaagtaccggcatacagtattacaactacttgattttgcatgtagataggtgcacttgcctgttgaataagttccctgctccagatctttgatggatcaagcgacacagaaatactaacttcactagtagccacacaatctacagatatccctagatcttcgaatatagagaagaccttctcaagcgcatacagagagcgatcagaataatgacatgtgaattaaaattactggaccaattgctgaacatacctttgccagaaaaccaaattgaccaagcatccgagtgcttactatatccaacatagtgacatttgacttgagcactatgctagttagcacaacctatccagagaaaaataaagaacaatagaaataaaatccatggcccgagagttgaatggtactgatgtgagaacatgttttaattaatctgctacagaccttatccatctctctttgtttagtgatcagggtgcctggagctttagggttgtacgaattcttaaccctgactggtatatcaccttctctagcaggtctcatagattgtggatgtaatacctatcatggagcacaacaatgcattactatcaactaaaagttctcttttctaaacgtgcgaagagcaacttaaattgacatagtgagcaaacccttatcactttgcactttgcatatatagcatttactttgcagtttgcacttcgcacaaatattttcatttacatctaactgtgaagagcgtaagccattcatgctccaaatgaatacatacctgggcaccaaaataagcaagttctgctgcctcttcaaatgttaagtatggcacagtggttgcattcgggtagatatttggatcacaggtcagtacaccatcaacatctttccatacctatgacaggcagtggtatgctttcagacaaagtaggtagtgactttctgctccactaagctaatcagcatgataaacaaattaaaatagcaaactgtaggctctaatttttgtttgtgaagagcaaaattatatttagacttcaccatggacctgaatttctctcaaccccagggctttaccaatggttgtagcagtcaagtcactgccacctcggcctaaagtggttacagcgcctgatttccagccctgcaagtgatgacgattgacttctaaaagaaaaggtaataacaattacaatgaactaatagtttgcttcataatgaataccctctggtgagaataccttcccaaggaacccagtaacaataggtatcgctggatcacgaatccagtctccatgtaatctcttcgcaacagcaggataagttgcctccaagatgtccgcgtttccgaaatcgtctgttgttatgaaaccaatatcaaatgcgtcgtactgcaaaagcattggcaaatacaatttaaaaccaacaaaatttcacattacgattcacaacacgtatagctgaaatttgatctacagggaatttagaaagctgctaacgttaggggaaggaatcacagatgcaatggaggatctaataccgaaaagtgaaacacagacagacagtgagatacaactaacaggcatgagtttagaaaatgtgaggaaaaaaaaacagcttcagaggctatcaccaaactttcaatacttccttccatagtaattaaatacttatatgcttgcaaattcatgcagattgataaaatcacatgctctgaagaacaatggttcactgcgtagacaaagaatatgcaaagaagtacctgccgtgcttttactccgattttgttcaaataagcagcaaaaatccgtgtagacatgcactccccaaatgaaacaaggtagtcagtggtccgaagtgtcagctctttcatcattgcaatacctttcaagagctgctccagttcatccagcatagctatgagttccattcacagggagccataagattattgcattaatggaacgaaatctagaagatgttattatggtagtggagttactgtgtattacagatcttggcagtgcaagttcctccacagttctggattgatagcaaagaaaccatcaagtgaaattagaaaacagtttgaccagtaaactgtttgaaaagtagactcacttaatgtgtagatctttgatcaaattccactcttcaatttccgaaacacggatcacgccgcatcccactgccttctcaccagcctacaaggatcacagtaacatgtgttcaagacttcaaagtagtagtgctaaacaagtaaagattctttaagtcgctctgcgctcgaatatctcggctacaatgcaacaatgaattctgaaggaaggtttgccgttaaccaaattttcatttacttacagctaaagctactgtgtactatcgtccagagagcctatatatatagtcaatgttgagacactgcaatagcaaatgatggatagaaatgaagctttcacctagcaactctaatgtccacatattcctggtcagttgcgatcatcattatggcagtagaggtgcaaaattcacttcatctaacactacccagtgattacattgaaatgaatgctcatggattcaggaaaaacttggtaaagcagacacatattacagagaggcatatctatagcctagaggaggaggaggggaattggaaggcggaaacagtacgaggaggaggagattggtggtcttccccatggcggagaggacgacgacggggcgctcctcggggaaggcgaggatgaggcccgccacctcccgcatcctcgccgccgacgacaccgacgaccccccgaacttcatcaccacgctcagctggtccccacctcccaccccgatcccacctagggtttccgccgcggcggcggcggcgcccactcccttggcccgacagcgagcggagtcatcggcggccgccgccgccacctccagtctcccgcctccgccgcggcggcggcggcagcgagccctgcccaggacaccgatacgagctgctcctcctcctcctcgtcgtcctccatctcccgcgccgccgatcgccggaggggccggcgagacgaggcggaggcggagcggcgcggccgctaatcggagagcgatcgccattctcctctcctctgcagtttggtagagtgagagagggagaggggagctcactgtactgggtagcgtgaaggcggtttttcggttttacgtaacaggactctaaaggcggaaaacgtaattgcgagagttcgcatggatggagaacggtgagaggccctccctgtgctcttcccccttctttcctaactgacatccatcattttccacgcgcacattttttaagctgctaaacgatatatatttttttaaaagttttctatagaaaatttacttaaaaaattatattaatccatttttcaataatacttaattaatctcgctctgatcgcttgctttgattccgtgtcaagaggggaaaccttgccttctgaacacatcctgaagttgacgagtgataataaacttataagcttactagaaatttagcattgattctttttcttatcgaatatctctcgagctaacattggcacgttgctaatgggatctaagagaaaaagaaaatactccgtctggtcataaatatttaatgtttaaaacaaaactcggtcaatcttacagaagaataataagtatatgatttcaaaagaaaagaaagagaaaggaataagtttatggtactactatgatagtgtactaacttttaagaaaaatcttgaaataccattttttttagtttttaaactatttaaactaagtacgtacttgaaaagttattgatggttaaagttttaaaaatgtttgaccgaatcttatttaaaacgtgaaatatttatgaccgaacatgatttttctactgattttgagcataagttaatgctgcatttcaaatctggatttggtccgggaggctgatggcaggaggcaacaactgctccaacctgcatgtctgcatcctgctttgccaggttgggggacagggatcactgaaccagcacagggaagcagccaatccaatccaatccaatccaaccaaatccctaactaatctcttcatttgtgtaatgtattagccagatgtgcatatgagcaaatcaaatctagtatgaatctagtatctatcacctcagcgttgcacataggcatgattcagctggcaatggcttcctcactgtctgcaaaaaacagtttgcataaataataagaggccagagaattcaattgtgttggatcaaggaccagactgcctgcccgctgatcagtgacaaaatcattgttggattcagaagaggctgaatctcttgtgcataagcttctttattgtgcatcaagctgtgtgtgtctgcatgatcgatgtcatggaattcattcaaaagacactgggttcatattctcatcatgataatggacatggtttcaatggacaaagatcctattacatcacaaacaacattcagaaaaaaaaacgacaacagaaagaaagaaacccagttacatcatcatcatcacacatgtctctagatggcgagcctcatctcatcagttctcctagataaacagcatatatgccatacttactataactttttgataaaccagatcatctgatgcaaatgatcactgatcaaatcccagtgcattggtcttgactgctttctgacttgctgattacattgcgttctgaaggccagcagagtgcaggagcacggtcttaatttcttcaggcccgagtccaggaccatccctgcattgctggcaaaacagaagtacagagcaagcattaagagagtgaacaacaacggtaggatcagatcgaacacaactgaaaaaaaaccctcagctggaggagaaaaatattatgatgtggagaatgcaaacctcggcgcggaaaacatccattgcaaacccattgaaacagctgatgaccgcctgctcgatcccgaggccaaggctgtcgagagccctcaatgtggacatcagaatgccgggcctgcgtgcgcagaacatgtggatattgactgcatgaccttccctcatcctaacttcgacctgaacaaacaagagaggtgaatgtcacttggttgctatacaccatattgttaccgctacatgaatcaacaaggcctgaatgatcaagtacttgtgcagactgcaaagtgcaagtaccgcgaaataagtaatattccctccgttccaaaatataagcatttcttgtccagatacatagcaagaattgcttatattttgaaacaaaaggagtagctcccaagtgcgttaatcttgagcactaaagcatgcttaagcatataagtatcaagggccaattgcataattgccactagtgcaaaggcttaacaatcatggtcaaaatttgactaaccgtggcttgttgaccactagggcttggaaatgaggttgggcaaagttcctccttaacgcggccaggaaacgtctgcaatgtgggtgttgatgggtggaagctagccgatgatggtccagtaagcgaagagctaggagcagactcaagttcattgtgaagatcgttaatcctctgcaggagctccttcaagtactcaattgcatcaccaaggatagaagctctgtccatctgtcacaaaggagaagaaaactggtaatgagatgataaactatagatattaacatgaaacgagtcagacatagttggcattaagaacactttgacataaattgttttgtactgctacactaaaaaacggcacatcgtacatggcgctgaattgttagactgcaacttgtcataatatcccaagaactgtagtacatcaggtctttctttattgttcaaaaccatcttgatcgctgtgaaggaaagtagtaagttcttcacacgaaaggactgcagagaactgaatatgcacttcgcatgccgaaacttccaaagtgaacgacttttttcaaggaaaccaacaaaagttaaagacaaaacatccaacacgaagaactacaaaaaaaaaacagaaagaaaagggggaaaagaatttgtgagttatctggtatctggtcactttcaactacatcttgtgcatggcactgtgttaatcatgcatcactaaatctggccatggatcagaatcaaagttccccataatatgtgtaatctcaagctacgacaaattataaagtcctagaaaaaagacattgaagtataatttcagaactgaaattaccataactgaactgtaaaacaaccatccagcaagctgaataggaactcctcatgttaccatgtgaacatgacaaggtatgacatagatctaatgaaaaaaggatgtttttttggatctgaagtggagccaattcaagaattcagcaccaaaattggaaccaatttcagtgacaaatatcatgacaaacacactcctacaggacctacaccagtatacatcactcaagaactgaaacatgttgccaaaactgaaattagaaaagtagaaatagaaaatgctgattaatttaattaataagatacagtctagtagaaactggagctgctgattaattaaataattagcaatgaacagtgaaaaaatagaaatgaggtcattaatcaccttgctgatcttgggcaccacggagcgcagcatgtagaggcggtcgttgagcttcttcctgcgccgccgctccgccatgaggttcttggccggcatccccttcttcttgcccctcccaccgccgccgccaccgccgccgcctcctccggccgccacgggcgcggcattctccagcgaggccgagacacccatggacgaggcgtccacgctctgctcgatctcgtcgtcgtcgtcccaccccatcccgccgccgaacgcgccgccggggggccccaggaacccgagcttctgccccggcggcgcgaggaacgggggcggcgcgtcgtcgaacgggttggaggaggcgaagtcgtggaacggcgggagcgccgccgtcgtcgtgggcggcggcggcgggacggaggacgacgggaaggccgcctggaagtcgaacatggccgcggcggtggccgcgtccatgttgaggagcagcgacgacggggtcgacgccgagagcacgtcgcggtggtggtggtggtggtggtggtggaacgggaacgccgtgaacgacgccgccgccagcgcgtccgccgcgaggtacgaccagtcgccgccgcctcctcctcctcctcccgccagctcgtccatcttcgccgccgccgccgccgcctccgcctcgtccatggcaacctcgccgccgcttcttgctcgcctccttgcctcgcagcgctctgagaagagaagagaagagaagaggagtccgagtagagacgccattgctgctgcttcttataggagaggagaaagaagcagccttgagccgatgtgcttaattacatttatacctaattaattaatttaattagttaaaccaaaacttgcttaactttttcttaaaaaaggactaatacttacaaggttaattagctttttttttggtctgacaaaaataaggttaacattacaagattagcctatgatatgactatgatgacactatgttttttttaatagagatatacatgcatggccagcttgttcagtttgtgtcacgctagctacaaaacatctctgggtttaattgcagaaaaaaaaaggacgactttttttaggttgtttaacactttggtttttggtaattgcatctttctgttcgttgcagacgtgaaacagacaaatctgacaagatagtacaagggctatacgggaggtgttttaattggaaacagtgttgttctatttccttgctttataattttttttacaagattcataattgtaaaaagctgtgatattctgcgtatttacttcttttatgcagtgttttgctgcaatgttgaaacaaaaactgttgcaccggggtagagacggcaggaggcgaggaggggcttggtctcccaaatggcttcgaatttttacggcaataggtttcgcaaattttcaaaaaagtaacactttggccttcttcaatcaaaaaatttttaaagtgtttttggctccgcctttgcacctaataatttacaaaattctaaaatgtaaaaagctgtctttatattattttcatgttattgtttttttttataaatttgtttttatgcagtgttgtgctgccatgtttgaaacaaaaaactgctccacctaatcattcacaaaaattctaaaatgtaaaaatctgtgatattctgtatattattgtttttataatttttttatgcagtgttgtgccgccatgctgaaacaaaaactgttgcacctaatgaaagaacaaatgacctggcagacatgtctcttgaagcttagatggatcaaaagggccaaaaagaaagatgttttttttctaattgatacgaagaacctgcagggaggtgtacacgtgtaaggctgcctactgcacccagtagccaaaagttgccttctgtttctaatctttggatggtctcacaaaaacagatgcttatctactggtaccttgtggacatatgtaaaaactgtctttagccaacagatttgtcagttgctttagctcattggtcaattttattctatttcagctttccaagtatactaaagtttaggacgatatatggactttagcttaaatataacacggcattgaggaaaacctgcatataatctattagcaatatgtaggataactgaaacgtagcatcttatctaaatggatcagccatatgatgtgtattggatgcattgtatttgtatctaacgtggtgagtcaatcattcagatattttagaaacctgtaaaattttcacttagaacacatgtggttattaaaaaattgaaaaggagggagaagagagataaaaaaaaaaagaagagggaatgatcattctattcacggtttgagaatgagaggagggtacatgattacattgctgctcaacacacctcgagagtgtgcaatgcaacatgcccaattacaagttctcccaagcatcttgtgaccctgccggagatgagccaagaaaatcataggatggaacacaatggaatagaattgaaggagaaaactgtgggcaaaaaaaaaaaaaagtatgccctgcccactacactagggctagggatcacatgagttcctgtaaagagagagagagagagagagagaaatttggttgctcttgccattcgctggtctaaattgtcatggtcaatttttacactataactattatcacaagttggcacgctaatacaagagtgctgaacaaataaagggcaagaatttttaaaaacaaagatctgaacattagagaagggagtgctaactagtgctagcttggatataagtttcaagttaaacacatatatgtgcacaaatagaaagacaagttcaaagacctttgtctgttcacctgacatttaacgttgacaatgtttgcatcttcatgtatgcctctaccatcgacgcctatgtcctaatttgatgcctcgacatctcaacatgtcatagatcaccatatcaccacaacaataattgataattttgcatcttagatctcatagtatatccaatagatacagtcggtagtagccaacctcaacgcttccaagagtcgatgcgccatcaccatctatatatatggtctattgtcatcactagaattcgaaacaaccatcgtaccgctagctggtgaaactaaccactggttgtgaccatggataggggatgacagtgctattgagtttgttgagtatgggagaggaacaagagaggggagagcagatataggctaatgacaagaggaattatctatttatagactaatttttgggtgggctatacgttagaggtgaagcagtgcaaaacaagaggaatgagataaaaaacttactgcgtatgtgacgtaatatatagtagtgaggtggaaaacatagacactcatagtcatgcgctatgggcatctatcttgtggctacacattatgcttgtgcagaagcccccttctgtttccaatgagtttgattactaattgttgcaaatcagaagatggtaaaaaaatatatagatgatgtgatgtatttgttgagggttggagataaatatgaaagcgtggagtacgtgtcaagatagagtgagtagtaaatgcataatgaaaaagaaagaaagaaagaaaacttagggcactatatcactgtatccgatgcaataaggtaatggattgaaaaacttaaccgctattttttttcgtacacattttatggccacccacatattatgttggtgtagaagttacatgtctatatccaaaccctgtccatgtggaactaatgttgatcatagtgttataaggggacaacctctaacaagccaatggtgttttttaccctattgtaagaacacttctagatccccttaaacacatcttgttatatactactacctccgtccttaatataagggattttgcgtatggagttgcataggtaaaatcccctatattataaaatgtaggtagtaatttggaacggtgagagtaagtgtttgtcaagcgtactataaaaaaaatccaatgtttttgtgtggaattcataaaatcgtgtcaacatccatcgcaggaacataagtcccatcttggtagttctcattccgtcccaaaaaaaacacttaacgtaggataggatgtcacatataacaaagaatccagataagcttcaatttgttcagatttattatcctatattaagctttttttttgagggggtacatgtctttgctgacaggtcaattgtagctctctactagatctgattacatcgaacccttgattttgagaggccacttgtatatcatcaacttgcagttccaggtgctgcagcatacttacaactctaccgtccattcataaatttgtcattatttttgttgaaattaaatcaacatcaacacaaagtgtagggtgagatgaggccagtgtcatcaagaggggaaaaaaagctggattctatttcagcgtggctccaaaacacatctttattttttcatgcaagctagaaaactgagaaacaattaattcaatagcaaaatataactcatgcaagctagaaaggatatgggctaatctgaaccgtcaagataccatctagggatatcaaaaataagtgatgatgtgcctttttatggtggctagcttatttatactccctccgtttcacaatgtaagtcattctagcattttccatatttatattgatgccaatgaatctagacatatatatctatctaaattcattaacatcaatatgaatgtgggaaatgctagaatgacttacattgtgaaacggaggaagtagcaataagtacattaaagcagattgcagctactcgcctactccctccatcccaaaatatttttaattttcacccatctcacacgtaccgatacaaaacaaaaggactagaatgcatctactttattgaatctcaatgcaattgttccccattttatctattctcaatacaattatttcatgctttcataaactccgatacaatgattattataaaaataaatttattttggaacaaatgaaaagagctaaaaatggaacttatttggaacagatggagtatgtagaacacatgatcgtggtggatcttatgatatctttttgcgaacacatcctacaatacaattgcatataaatataagtatatttacaaaaatataagcaagggttgtgtattaattataagtcttgttttgaagacctaatttcgtgcataattgcacgtgaaaatccattattagttcgtgagaaaacaacggctcccatcggatggcctattcagccaaagaaaaagccaaaatttgaattttcaaacttaattttgatattgattttgagatattttcaacgtattttctttttcagcattggcttttaagtcaccgagaacacatatatgaaagttttacctacaaatttatttttattctctaataaaccgttttggcttat

SEQ ID NO: 8534 - DNA, 8867 bp, Oryza sativa
aacattattaaattattgtcggatagtgaattggaattgctagctgctttcatacaaaaccggccacttatcttatgcttttgtgttctgcaggcgttggacaagatcaggttcgagagcttgacggacaagagcaagctggatgctcagccagagctgttcatccatattgttcctgacaaggcctccaacacactgtcgatcattgacagtggtattggtatgaccaagtcagatcttgtgaacaacctgggtaccattgccaggtcagggactaaggagtttatggaggcactggctgctggtgctgatgtgtccatgattggtcagttcggtgttggattctactctgcctaccttgttgccgagagagtagttgtgaccaccaagcacaacgatgacgagcagtatgtgtgggagtctcaggctggtgggtccttcactgtcacacgtgacacatctggggagcagcttgggaggggtactaagatcaccctctacctcaaggatgatcaggtactaacagaatttcattgaattcttgttcaatttgtgctgcttgtattgctgaatgcccttatagttcatgaatgtggcttgctattgataaatgcatcaactagtaattctgtcctcgtaggattattacgaatattgttggtacttgattttatagccacttttagaaagaacatgttgatgtgcctcaagttttcaccataggcatgcttgagccaggtgcttaatcggtctgtttaagacataaaaaatgtctctatgtaggggcatttggtgaattgattgaacagaatgaacatatttcacacactgttgacattgtgataatctagatagatgccttaacatttcgaactcctgctgtgaaaattatgttagtatgtttctgccttggatgttatgagtaatcatgttacacatgtacttaggatctataagcttattgttgagctcataaactgattgtgtatgcattttttttctttgggtctggttttgtgtcagtttgattgcgtgtggttgtctaatacttcctccgtttcacaatgtaagtcattctagcatttcccatattcatagtgatattaatgagtttagacatatctctctatctagattcattaacattaatatgaatataggaaatgttaaaatgacttacattgtgaaacggagggagtactatgaattaattagtaacaagtattactgttctactgttgtgaatttttagaatcacctgaactcctaagttgaactgtgaaatgtgctataaggtgtcctggctctaatgtgttcatttgttattgacaacttgctcatgcttcctgcagttggaataccttgaagagcgccgcctcaaggacctgatcaagaagcactctgagtttatcagctaccctatctctctatggactgagaagaccactgagaaggaaatttctgatgatgaagatgaggaagagaagaaggatgctgaggagggcaaggttgaggatgttgatgaagagaaggaagaaaaggagaagaaaaagaagaagatcaaggaggtttctcatgagtggtccctggtcaacaaacagaagcctatctggatgaggaagcctgaggagatcactaaggaggagtatgctgctttctacaagtccctgacaaacgactgggaggagcatcttgctgtcaagcacttctctgtggagggtcagctggaattcaaagctgttctctttgttcccaagagggcaccattcgacctctttgatacgaggaagaagctcaacaacatcaagctctacgtccgccgagtcttcatcatggacaactgtgaggagctgatccctgagtggctgagctttgtcaagggcattgttgactccgaggatcttcccctcaacatctcccgtgagatgctgcagcagaacaagattctcaaggtcatcaggaagaaccttgtcaagaagtgcgttgagctcttcttcgagattgctgagaacaaggaagactacaacaagttctatgaagccttctccaagaacctcaagctcggtatccacgaggactccaccaacagaaacaagattgccgagctcctgaggtaccactccaccaagagcggcgatgagctgaccagcctcaaggattacgtgacgaggatgaaggaaggccagaacgacatatactacatcaccggcgagagcaagaaggccgtggagaactcccccttcttggagaagctgaagaagaagggttacgaggtcctctacatggttgatgccatcgacgagtatgctgttggccagctcaaggagtttgagggcaagaagctcgtctctgccaccaaggagggactcaagcttgatgagagcgaggacgagaagaagcggaaggaggagctcaaggagaaattcgagggtctctgcaaggtcatcaaggaggtgctcggagacaaggtcgagaaggtggtggtctcggaccgtgtggtggactccccgtgctgcctcgtcaccggcgagtatggctggacggccaacatggagaggatcatgaaggcccaggcgctgagggactcgagcatggccgggtacatgtcgagcaagaagacgatggagatcaacccggagaacgccatcatggaggagctccgcaagcgcgccgacgccgacaagaacgacaagtccgtcaaggacctcgtcttgctcctcttcgagacggccctcctcacctccggcttcagcctcgacgaccccaacaccttcggcagcaggatccaccgcatgctcaagctcggcctgagcatcgacgaggacgagacggcggaggccgacaccgacatgccgccgctcgaggacgacgccggcgagagcaagatggaggaggtcgactaagcgggtttccttttttttcccctcgtcaaatccttcgcagcgaaagtacaccatggagcattggagctagcttatctgttttaccttttgaacatcgcgttgttgggtcggttcggtttattttgtgcgatttgctttacctttacctagcctgcaatgcatggggctagattgtgctatgggttctcgaactgcgtacgttaattatattgctaaatatgagtattatattagtgtcctcatgagttgtctattttttcctctgcaagttagatgtatcaattaattttgcgaatattcttctgcctcaattccaccttcgagcaccagctttgcaatttacagttacagaaacatatgattgcgtagtgtgaatgggagatcttgtcacgctgatcaaattgatcaacagcaacgggaggagttccttgcagcgaatgcccttggcaatttatactgtgctttgttggtggtttgctcgctctggtgtttgttggcgattgcccgttggcgtccaatccttgcagctgatttctttggtatccttggagcacctgatgaaaatttcttcagctcacgataacaattaaatatatctgttttctgttagcaataacaatcaactttttcttcagagcaaacaatcgactgtttcttcagagcagctcactccggattacctgacaaaaacacaattaggactagtaggtacctgacaaaaaccaaaaaacaacataacactcggtcctcgttcatattcacatcagctaaattttatacttcctcttcatcatattataaatcacatagtagaaaaaacatagtagcatctataacacaaaataaacatatcattacaattattcaatgttagatttaatgaaactatttttccataaaattggttaaatttaaaaagcttgactagaaaaaaaatcaaaacaaattacaatatgaaacagagagtaacaaacactgctaacagacgagtctcgaagaccatgaagtgggattatgtctacgcttatgcacgtatagcatattgtcattggatcttctataagggtcaaggaaacacgaccgctgaaaaaattctgatgatttaaataagttttgcctatgttttgatgctcaaggaaattgatggtcaaggaaacaagaccaactgaataaattctgatgaattttaagttttggcctgtaaagacagatgctgtgacataatccatctttggcgttatggcaatttcaatcagctctgaagcataacgagcatagtattttgctatctggggcttatgagttgtgatgttctaaccacatttccgataacttgtaagcattaagcaatatacccaccagtgccaccacttccattgctcaaaagcgtaaagtcaatatcaggcttctgcaagaatcttaaacctatcgtgtccatttcctgatgccagacctctgcacaacttgcctcgcctccagaacatcgaaccatttaccagcagcagcataaatgtcagaaatcaaaacatggcagccagactgctgggcgttgagattgaggctatggatctcactctgaactctttcagccacatcaaatctcttgtgcattcgacaggcacccagtagagcgccgaaaaccatgacatcgggtgccatcggcatgctccggatcaactcctctgcctcttcaagaagccctgctcggcctaacatgtcaaccatgcaaccatagtgcttcacctccggctgcactccgcaggtagacgccatgctctggaagcaccgtcgaccttcatccaccagcccaccgtgggaacaagctgtgagcacaccgacaaacgttatgtcgttcggcttttcacccgttctcttcatctgttcgaatgcgtctacggaatcccgagcattgccgttcattgccaacctggtgatgagcgcgttccaggccgagacgttctttcggtccagggagttgaaaattttgacagcaatgtcagttctcccgcacttggcatacatgtcaataagagcagcaccaagattgtactcgttgttgagcaccatcttgtgcttgtcgatgaaggcatggacccatcttccttcttccagtgctgttaaatttgcgcatgctgaaagcacactcaccatggtcacctcattcggctgtacattgctctcagtctgcattgcgcgaaacagctcaagggtatcctgatagcgtccagcctgagcataccctgaaatcatgcatgtccaggaaaccacatccttctctggcatgacatcgaacaactccctcgcgccatccatgtcgctgttcactgaataaccccggagcattgcattccatgacaccagattcctgactggcatctcatcgaacatcttcctcgctaacggcagcagcccgtggcgcgcgaatcctgtcaccatggagttccatgtcacgacattcctcccaatagctggcatccgatcgaacatctcccttgccacatccagctccccggccgcggcatagccccccaccatggtgctccaggacaccccattcctccgtggcatttcgtcgaacaccctcttggcactctccatctccccgcacttcacgtagccaccgatcaccgtgttccacgacaccacgtccgcgaccccggcgcacgacccgaacacctctcgcatcgacgccgcgtcccggagcgcgccgtacatcgcgaggagcgcgttgacgacgaagacattcgccaagaacccgtgccggacggtctgcgcttgcacctgcgcgtccgtgcgcgggaaggccgggagcttacccacccaaccgaggaggggcggcaaggtgaacctgtcagggacgagcccgcaccggaggagggaggagaaggcggcgaaggaaaggcgcggggacgcggaggaggcggaggcgcggatgaggatgttgtggaggaaggtggcggaggaggaggggaagagcgggaaatggacggcgcacagggcggcggcgaggtgggggtgggaagggaggagcgggacgatgcggcggaggtgggcggggctccggcggaggtcgccggagacgacgaggcggccgaggaggagcgggaggaggtgaggcggcggcgccatttttatcttctttttttttttctcgccgcgtggaggggagaaggctttatttgaatatttgaaagcttgtgattaacgtgagccgttggatgcgcatcggatggctgagatcagataaagctggagaaaaagaaacatttatcactagctactggtttttctatactactgtatgagtggaaaattgtacacattttatgtgcagaactttcattagtacagagttaggcttatcctaagtcaaacctatttaaatttgatcatgtttatatgaaaatatggtaacatctacaatatcaaattagtttcattaaatcatcaatatatatatatatatatatatatatatatatatatatatatatatatatatatatatatatatataaatttgatcatgtttatatgaaaatatggtaacatctacaatatcaaattagtttcattaaatcatcattatatatatatatatatagtaaatttgtttggcgctccatggtgcccgggcaccattgttgaaattgagtatatacctaattcaaatgggtatatatatagggtttttttaaatgatgctatatttttctataaacatgatcaatcttgaaaatatttgacttggtacaaacattaacacaatgtatatatctaagtaaactgcggctcatctggaagacgaggtattcagggagggatgtgcatgatagaaagcagagaatctgaatgctttgcactagagattcatgtcatgttgtctactatcaaattgagcaatggatgcactccgcctgacttcgaaccagaacccaaaacaaaagagagctggtatgttactatgttagctagatgttcataagccatgctccaatttctatgttcagctatccttgttctcagctgccaatcttcaaagcttgattgcctttgatttttacatttgccacgctagccagtgcgctcagaggctctgaatccaccatagttgatttcttgacaggatcaacaaggtcaagcctcttctgcagcttcctccttttgtatgtgaaagggtacctatgaccttcttcaacttctgtaactgactggctggcaggagtcttcagcttcaatccttctgggtaacgcattgtttcagactgctccaataggtgtttgtaagggccagcggtgtctgtaccaagggtcaacacctcagaaatactttcagcagttttcagaccatgcgtcatgtatccatttgtttgatgacaatcagtattccttgtaaatggatcaggagaactttcaggaattacggcattttgttgaccaaagttcttcaaaaggttcttctcgtggggtgcttcattgcaatattccggactatgtttggttgttgactgatggaaggaattcggcattcgagaatagtaaccccttttaagctcctctggaaccataatttgcactccaaacggactttcaactgagtgagggtaagtatcaagtgtgccttctctttggtagggacgcacatgtagatttctcaaagtactcttgcttgtgtttatgtggtagtaataagctgaattcatcgcaaaaccatgaacatccagtgcagaagcgcaaggtaagctggagacctgtattcccagttggtctgctagcatcggttctggtgtacgatgaattccttcattgtgatcaatgagggaagcacaatcggtctttattttcagcacacctttgggcaatctaatacatgtagtaagctcaccaggaacatgaaagacaggactcttcaatgagctcatttccattgatttgtctctgtagactattcccttgcgcttggctgaacaatgagtggttactgtcccatccatacgtttggttcgcttcaaaggtggaagggttgcatctttaacctcattggcaattgatagacttctattgaaaggagaaccgcttatgtcaacacctgtgaggggatcttcatgtcttctgtcattccaactgttaaccttaccctgaagaccagtactcgccccacatcgtcctcctaccttgtccatggatgcaaacttgaaaatcatgccatcatgatgggacttcagaaaatgataatatcttcgtctttcaaagatcatcagtaattctctagcctgggaaacttctggagaataaaacccaccattcaatctgtggaagaagctcttcactggactcccaaagaacaggtcactgccactaaacagctccttcattgttacaaagaaatcatgttggtccatgtctgggagataggctgctagacggaatctatcatcttctgttagacataagttccatgtctccaaagaaagaatatcattcaattcaggcaaatcataaagcccataagggacactacagatctgatctccagactttgcaagctcacaattgacctcttcatgttcatagtcatcggattcatgaataggaaatctctgaagcagcattttctcctcttgtgtaatgtcctcgtctccacagctgtaagcccgctcttctgtaggcgcacaacttgctaccttcacaatgcccattgatcgaaggaagaggtgcaatgctccgatcggtatcagagataatcatagagacgaaagtcaacagtgtgtccagcacaataccatactatccgacggaagatccctgtgaagaaaaaggaaaagaaaaacaaggaatatcagcatcacaattcatctataattcaatttgaagaccatatttcatgacctcatgcaccaagtaggctggaaggaaatacattgcagagccaagcctaaataattcctggaaatagaatgctat

SEQ ID NO: 8535 - DNA, 1707 bp, Oryza sativa
ttttagtgtctacttattgaatgtgtgtcactaccttgttttgccagatgaactttgatatcagttttatgctctgggttgacgtttagtcaggaacctattggagtgtgttcttcatcagttgtacggtgtgcccactcagtcagtcagattagtttccattttgttattgcctagctgatatactgtaatgtaccactgttgatttttttcacgaatagccactgcatgttttatggtgtttgtagatttacttatatcctcttctacaagactggctcgcctactgcggagatttgttttggttacttgcaataggtctcaatattcggatcaatctatccttatttcttatgtgaaatagggaactcagggtagacttcattatacttgctggttacgtgaaacttataccggttgagctagttcaggaatatccaaaatccattttgaatattcacccttcactactcccagcatttggaggcaaaggttattatggtttgaaggtgcataaagcagccatctcatcaggggccaggtacttcgcaatttctctatcacccatcacaagcaactgctgtgcagtttgcgtatctactcaatgctatttccatggaaagcaatatcttggcagttaatttaagctgatatctcacattgtagaacaaaactaaagctcaactatacataggtactcgggtccaactgtgcactttgtggatgagcactatggcacaggaagtactctagcccaaagggttgtgcctgtgctagccaatgatactccagagcaattggctgcaagagtccttcatgaggcaacatatcttatgctcggctaatatttctttgatggaaatggctatgacaattcacttagctgcaaatgcaattgatgatatacgttcttttgctcatttattaaccttacttttcaggaacatcaggggccagaagctggcttttattaagtgcaaatgaatttggatcacaactcaacacatataagtagaaaacgacgacatataccacctaattggacaaaaggattgttggtaacggtgacgccaaaaacacaatatcaacgaggatacctttcagacaacaacatctcctcttccatgctgtattgtctgctcatttccttgcttccctggcctgtaactaacatgtaatgctttgtaatttcagatgcattacatctacttgattttacactatgtgaagcaagcttcttcttgactcgcaagttttcaagtgtcatttccacatctctcatagtaggccggtcttgtccattcaatttagtgcatgttgcagctagtgatgctacttcttggatttggtctccatctccctccgtcatgacttgtggatctattatttcaaccacctgaccttgtctatgaagcgaggcaaaatataacacaagactttcaccgtgatcagtcctatacatgggcctttttcgagtgagcaattctataagaagaacaccaaaactaaaaacatcacttttatctgttagatgacctgtatagtagtacatgggatctaaatggccaattgttccctgaactgctgtagtcacttcagtttgttcaatcggaatataccttgaagctccaaagtctgatacctttgatattaaattttcatcgagaagtatgttgcatgccttaatatccctatggaatattggta

SEQ ID NO: 8536 - DNA, 1466 bp, Oryza sativa
cccacatgtacaacagcagtatgccagtatatatggcttcgtaagctggcttgaaacaacattaattggccgtacaagaaccaaacaaattggcagtaacaaagcctctctgcgcccatcaatggcaacatgaagatacgtacgtactctctagtcaacagcgtgtagagacttacagtagcggtacgaggaaacaaaggcgcaaatgtctcttttcccttgaagaaatgatcaaatgaatcaaggcaagcaaactctatacgttttcatttcagggtttcaaagcttaatcatcgccttcattttctatatatgtttatatcaacttttcttttacaaaaagagagtactgaaatcaaccgggtcagacacgcgctgctataccaaaaggattccaaagaattgcttgtgtgttgacgacgctaggatctttgatggcgtcaacaagaccccgatagaggtcgcttaattggggtattgccatggaaaaatggtgcgcgtgacgaacggccggtcggaggcattgtaatcgaagagatcttggacgagctgtgaatccggctgatgttgccaggcacatttcatgtgtgataccggcttcaagggcaacaacatccttaaatataatgaacgggtgggttcgaaaggtagggtttttggatggccctaccactaggctggctgccttctttcggatgggaagcaggccgggcctgatgggcgagctgttggaaatttggtcataattcgacatattttaattcaaaataacaagataataaatatgatatttacaatgggatttgatccagtgatagtggtgaatgtaatcaacatgagcatgcttaatatagaataagcatcaacaatcacataataacacaatgttgacattgcgatgaacattaacagtaaaacttctaattgaaataatgtaagaaggttataccccaagaatggtcctccgctggagtttgaggcagtattgcctccgttggtattgacgggagcctccgtctccttgtatccagtgttgccgttgtctccagtgttcgacatattggtgaatgtgaagtagatgttgacgaacagtgagtagtcgcgccttgcgctccccaaaaacctgatcgcccgcccgtccgtgcaaacgtcgcagcagcgcgtggtttcggaggcctactctcccaacgcgtgtgcacacactcgtcgggatgggattaccgtagcaacaacaacattggaaaatggatgaaagtgtgtctgactgttctcgcgggagatcaaatccattctcattttataagaggaatggaagatgaagagtaagagtcatggaataggaagaggaatagagcaactaattgtcatcaactagccatgaaccatcctccactacacaaccatcaaccaacaatcaattaggagtaattgatgtaagttaccaatggaataggaagaggaatagg

SEQ ID NO: 8537 - DNA, 11079 bp, Oryza sativa
attggacgtttgttaatgatattttttggattttctcttgttgtttttatcacaggtcgaaatctataagcgatatatctcatattgatttattttaatttttttaaaaaaataatgactatttaagtgatatgaactagtgtctctttatggatggaaacatttttccctgcgtgatacaccagttctacgctcagtgctactaggaggctagcagccacttgctgctgctagagcccaaagaacagtactgtcagttcagatcagttgcaacttgcaaggtctccatcttagtggagtactttagttattcgatcctataaaggtactccctccgtaccctaatataagaggtttttgtgattttacttgcacttgcactttaactattcatcttattttaaaaaattagaattattatttattttatttgtgacttactttattatccaaaatattttaaacgcaattttttgttttttatatttgcataaattttttgaataagatgagtggtccaagtaaaatatcaaaatcgattatattaggggacggaggaagtaattacaaagtctaaaggaatgaaatctccagctagataataaaaaaagtgtgttcttttgttttaagcaggtttggtctgaggtgacaaagactgtctgttagaagtttgcaatgcccatacttttacaaaccccttcatgattagcgattttaatccacaagtctgaataaattccagcatgtctgatgtagctcatagaagcatttcagcttgtcttaatttttttctgtcctcatttttttaatcaaatgactatttcattgtacagtcgtaaagccatttcaaccacagtaatctgctggtaatttttttaatgtcatataaatttcataggtagtgatattactgctgatttcccaccattcaactttcttaaattaatgcctaatatatcatgattatttttgctggcattggtctctttaagcatgtgggatgtatatttgtgggtgtgagtgtggtgagcgtgcgtgtgtcttatcaataatgtaattttaaatttttttatataaactattttataattttttaagtaaatttcatgaaacctcacatgttatgatttaagttgcacaaaatcacaacggctctggtacatggcatataaccatagatattacggtcataagatttcaccaataaaaatagttaacttacctacaatatttaaatgatggattaaaagaattcatatatttcggaacttgtatgcatgtatggtagatcaaagaaaatttagttaatggtgtatataaaactaaatgtcatagtaccagcattacgtgcaagtgtgcaacatgccaaaactccaatagttttatgcaaattggatcataacatcgtggttacgtgaaatttactactatctctgtcttaaaatataacaacttaatactcggatgttatatatcttagcaatgtaaatcttgacatgagacatatatccataataagtagcagtacatattgtgggatagggcgagtagtttttttaaaaaaaaaaacgaaacggtttaaaaactaatccatagttagcaagtggttaagtgagcaaccgtttccatcaaagacggggcaaaagtgagcggggaagacgacacctccgcagctcggcgcacaaagcctgcaggaaacccatcacctgtaaccaatccttccatcttctctgccttctccttcgcttcaccacctcgccaaaaccgccttcccttcccttctcttcccttccaacctctcgttgcggtttgcgctagaaaaaaaagagaggagagatttcaagaaaccgtgggggagaaagaagcaggcaagaagtagcagcagcagcgagtgaggctaatctggtcagtttcagaacagattctttgttgggtctctatccattgcaagaacaggttttgttttttcttttccctttttttgggatcagagtctctccatttctgatgctgctgctgctgctgatgatgatgatgatgcaaggcttgtggcaacttgtttggtgaaagaacaacgagagggatactgggatagggatcaaaggcaaaggtttttgtttttaccccgtggtaattgttcgttcggtttgtgatgggatagttgctgggactgtgaatcattttgccccttcttatcatacagacaggcgcgtgatttgaccagcttgtcgtctctgctctgcctctatccatccatccattcatacatccaaccttgggggttcttgattctttttctcatttcttggggaggcttaattgttgctatcgccctccgcttcaggtgtccatttgaattattcgtcgtttctttcgtatttaattgccatttgctgatttgcctctttatttcggtgggttttatggtaataaaggtgtggttcctttatcatcaaatttgaggtgttctgggttttctttggttcttttttggagcactggatttgtgtgctcttgtaaatcaaatagagtttgtggtttggttcgtattttacacaatcgagttgtgtttttattttagtttgtatcgaaatatttgcatacttgtttctagttccttcaggcttcagttctcttcattattataaaaaaaaatttggtcctttcgtccataatttttttcacaattccatttttgaatgtatgagcttgaattatgtgacttttcagtttgagcttgggattgtcaccttttcatggacgggaccaacaaccatggagcactgatggacgattggatgcttccctcacccagtccaagaacactcatgtcgagtttcttgaacgaagaattcagctccggtcccttttcagacattttctgtgataatggcagtaacaaacatcaggatggacttgggaagagcaaagctttcatcgattcaagccgggaagaaactgctcagctagcaaaaaagtttgaatcaaacctttttggtgccaaccagaaatcaagctcaaatggctgtctgtcagagaggatggctgcaaggacaggttttggtgtcctgaaaattgatacatctcgtgtcggttattctacaccgattcggtctccggtgacgatcccgcccggtgtgagtccaagggaacttcttgagtcgccggtttttcttccgaacgccattgtaagtgacttcctcacctcaatcagtatttgctctgtgtaatgttcagttactctactcatgtggtttatatggaggatatatttgtcagtaaatggtgaaatctaaaccaagatacctattataaaaaatattctaacgcaagatacagcatctttaatttctcttatgtctctgcagcttcgtataattagtggaattttggagaagaaagtgactatatatgttgatgactgattaatcttaatgtcatggttttgatttatgcaggcacaaccttctcctaccactggcaaactgccatttttgatgcatagtaatgttaaaccatcgatccctaaaaaaactgaagatgaaacacgccatgatcgtgtattcttctttcaacccattttgggatctaagccaccaacttgtccagttgcagagaaggtagttttctcaaacaatgtggttctattccctatttactgcaaatctgtaatcactgctcgcctgctcggcgcagttagttttactgttccagcaaatctgacgagcaaaatcaaattatcagtgttatttatgcattggtctgatgatatttatacttttcagggtttcagtgttaatcatcaaaaccagccttcagtgacggataatcaccaggagctcagtcttcagcctatctcaactgcatccaatgatttcacttcaccaactattgttaaacctaagacatctgattccatgttagacaatgatgatcacccttcccctgcgaatgatcaagaagagaatgcttcacacaaaaatgaagagtattcttcagacctgatcattacccctgctgaggatggatataactggaggaaatatggacagatgcgagttagaacagtgagcatcccagaagctactacggatgcactttcacgaattgcgctgtcaagaaggtggagcgttctcaagatggccaaataacagagatagtctacaaaggttctcacaatcaccctttgccgccttccaaccgccgaccaaatgttcctttctcacacttcaatgatctgagagatgatcactctgagaaatttggttccaagtctggtcaggccacagcaacttcatgggagaatgccgcaaatggacacctccaagatgtcggtagtgaagttctgacaaaactgtctgcttctcttacgacaacagaacatgctgaaaaatctgttatggacaaacaagaagctgtggatatctcatcgacgctctccaatgaagaggatgatagggtaacgcatcgtgccccgctttctctgggctttgatgcgaacgatgactatgttgaacacaagagaaggttggctagccttagtcactaatcactcaatgaaccaatcttcactttgagtagctgattgttttccttcaattttattcatttcagaaagatggatgtttatgccgctactagcactagcaccaacgccatcgacataggagctgtggcgtcaagagctatccgggagcctcgcgttgttgttcagaccacaagtgaggttgacatccttgatgatggttaccgttggcgcaagtatgggcagaaagttgtcaaaggaaacccaaatccaaggtcaattctaatgccatttttctcttttggaacaaattctttgcagttcctctaatccttcactacaaaagtaaatgtttagcttcacaatatgacactgtcatcgaaggaacatttctctgtccatatgtgtgcatccatagttggtacaaagaccggaaattactcgcattatctaaaaaactccattttgtatttgcaggagctactacaagtgcactcatccgggttgctcggtgcgcaagcatgtggagcgatcatcgcatgatctgaaatccgtcatcacgacgtatgaaggaaagcacaaccatgaagttccagctgccaggaacagtggccacccaagctcaggctcagccgctgcaccacaggctaccaatggtcttcttcaccggagacctgaaccggcacaaggtggtggtggtggtagccttgctcagtttggctatggctcagctggtcacagaccagcagagcagtttggtgcagcagcagctggtttctcctttggaatgctgcctcgtagcattgcaactccggcgccgtctccggcgatcgccgtgccggcgatgcaggggtacccagggcttgtgctgccgagaggtgagatgaaggtgaacttgctgccacagtctgggaatgctggtgcagcagctagccagcagctgatgggcaggttgccaaagcagcatcctcagatgtaaaaatggcaggaacatgagacaaatggtgtttgctgcttatgtatatgaaacatttttggtgcttttgttaggagaatggagtgttattgtagctcaatttactttcgggggaaaaaaaagcagatagttcaggcaattgtaggtagtagaggttctagaaaagataaatggctttggctgagttctaaataacttcctcctttttcattagcatgtttactggattgctaaactatatattttctgtaaaaaagattatatagtatttttaaaatttataatacatactttaattatgcgctaatgatcccccttgttttccaaggcgtctacagctacagccgaactcagcctcagccttaataagatcagaacttctgcgttgacatcttaggctgactggttttacaatcaacaaattcaatcttgaattctgggagcaaaaaactgcagcaaaaaaaaaggtattttataactttacaggagtaactggtccgcagatttgcattatccagtaattgacgtgcagcagaagatcggacagaaacaataaacagtcaccatttgcaatgcttttttgcgggacagaccaaagtgtacccagtatactgtcatgtcagaacttcgaaacagtcaacgctaacaaaagcgaatcacaccatcaccgcttatatattttctctgcacaaaaatgtgcatatgtggcaactccaagaaactttacatttgacgaggatattttttgagtgaggaggttttaagttaaccctaatcatgttgaaatgtcactttataaatttggtatttctcttcactaaaacgtacaaccaaaacttcagcacttctttttgctcagtggccattaacagctgactgctggaaattctctctttgataaatggctttccaccgctcaagctcttccctgcgaaataatataaacaccagaagttagaaatgggaggagaaattgacccctttctttgggaggagggccagttgcagacaattgcttatactgttgtacaatatcaggttctctaatgcactgttatatagtcgactgcgttagtgctatattatcttatgatgtatgatacaaaagataattgccaatcttgtaggatacaattgtttagctgattattgtgtttctaatgaagcaattaatatatgatcacttatacaaggctactttgtttaagtaattatttttgtagaccactgtctacacctgaacagaatgtacagatgggacaagtgcactgacattgagtatgggagccaaaggagacaaaaaagatcaattaatctgcttgggcatgtttttagattgtttagatctgggaaatatgtgcatagatacagatcattgtttatgtctaagctctactgaaattagctagtcccgatcacttatttgagtttgaccttaaggaacttgatcccaacacagttattaaagaaatcattaagtatcggaaagaacaaaagttgtgtatatatagtccacatagtataatgtataaggtaagtgttgtgtaccgaggtggtaaattcaagtgccattgggcagaaggggccaattgagttatatagtctccccaaggcgattagctgttccaattattggttcacatccaaaaagaagcagccactgcaattcaataaattaaagaaacatatcaagaaggattacgttaagctcccccctatttcatcataatgaagaaggccaaggaccttacgtcttccatcattcctgcggcctagccctcttgtttttaccgactgagaacgtttgctttagatcacctatgtcatctgtcacagtgaagcttccattacgcacgtggctcaggtatcctgatatcttgtgaatatgcagggatcagcctatgtccatcgttatcattcgcgcggtgcgtagctgaacctctcttagtgaggcatgatgaaacaagagaagaatttgcctgaaacaattaaagcatgtaagtatgtgcatcgctaatttccgatattactataagggcgtgtttggataggggtgttcaaatttaaatactttggttataagtttaactgcacgtctgcatcctataaaattccagatccaaagcatcccttaaaacggcaattgctaaattaaattataggctttaaaggtgtgagattttgcatacatccaaagtagatgaatttgccccattccgtggagtatcttcacttaattcagattcaaatcctttacggcgaatgtcaccaatcgtaacaattccttcaagaaaatcttcactgtctactacaagaacacaattttgctgcttatcatgcataagccttgttgcctccttgatagtcactgtaggtgtaaccttaataaattgctttgacattgcttgtgatacctggaacactcgttgttagaaagctgaatgaccacaaaaatatatcaaatttactaaggatgaacttgacaaaataataaagagaatgtagaaaagaggcatggaacctttaaatcatcaagaagcatatcctcattgttaataccatagcggtagggatcatcgtctagaattgcaagttcaacgtcatctctgtctggtcgtctccggtctgtctcattcctatctgtaggaggtaatagtgaagaataaccatgccgaggagatgtagcctcaaacgcctctttgttgccagacattacaacagatggcacccatattgctaaaccaacagctccctgtaaattaaaaataagggtgagcttatgtcacaaggagtgtgcaaactttcatgcttagaagcaaaatagcaaatatatgggatgagacatcaccatcagaggcagtaaaattctgtaatcttttgttagttcgaatagtagtagtactgaagtcaatggaactgagcagactgatgctagtgtggcagccattcccacctgaattaagcagacagtcagtatacttcgtttctatcaaactttaggctaccttcctagctcaaaaaaggaaacttactagtgcataagcttgagggtgtgcaacagcagtgttacccgggatggcagagtttattagttctgctgctgagcctccaaatacagcaccaacagcagcaccaatcatcaagcttggagcataaaggccaccaacaagaccagaacccttgcagagtgcagttgctacaacttttgcagcagccaactgagctaagagccagattccaggggctgaggcactttttccagtatgtaaaatttcatcaacattggtgaagccccagtacagtattccagggtaccttagagctattaaacctgctccaagaccccctaacgcagggcatactacagcagggaggctgaatttcttccttatcaagtcaaaagtctttgtgaaccaaaccaccaactgtctgaatgccacactcactaccccacaaagcatgcctaggataaggtagagtggtaactctgcagaatataacattagtgatttagttggttgcatatttaccagttagacatatcaacatgaaaacagtaatagatacacagttcggcgttcacgtcacagatataccagaacttcaaactattcaattgtgaatggcaagaaaacaagatcggaacaataagaagctgctaaaactaacgtgttgatggtaagggaaccaaccacaaaacttcaaaaccatgagcatatacaagtgtataaatgcgtgatgcatatataaaatagattataaaggcaggatatcacgagtcctctgctatagtagtaagaacaaaaaaaaatctactcaagttcaatacctaactaagcaaaatccaccttcagtaataccaggtttgatcagaataagataaaataccagcagcagattttagttcatacgtcgggacaataaaagctgccttctcccctagcaaaacattggacacagttgatgatataactgatgccaatataatcatagcagtggtaaatggcggtgaattctctgctcgaagtggcctcagtactgtttcaatagcaaaaaaacatccagcaaccgcagcattaaaacctaaagacaaagcaacacaagtgtcaggagagaataaagaaaaaagcattggcctgaagatactggatgttaaagagatgaaattgcaaagatacgtggtacaacaaagatctatagtattgtatttgtagttccagttgcttgcagaattagtttatcttccttttcttgttaacttgtactaacatcttataatgctaaaaggcagtgggaaacgattccaatctgttgcaattcccagatgaatgtaaaaaaatcaaacagatgatgattatttaaaattacctgaagcaatcccagcagctgatccggcagcaacaagagcaattctccgttccctattgttctccatcatttcagcacatccatatgcacaagatttaccaatatcaacgcttggcccttctggccccaatgaacatcccgtccctagagtaattgcagcttgtattgctttgattgtaggaaaaatcgcagccatgaaatcaacaccttccctttgagatgataatgattgttttatctgctcaaatatctccagtaatccgtgcatcataccaacaacaactccaccagtcactggaattaacaatatcctatgccatgtatcagcaagtctctggaggcgaagccaagcagctccctctgtgggtgtgcctgcccatgcccattcatgtatgatatgcacctgaaaagaatagttagccactattgaaccagcagattggtatatgagaaaagtacaaacaggaaacttttggtttagaaatgatcatctaaacttgattggatagctcccgcttaacagatctaagttatttcaaggaaagagccttttctagtaactttaagaaatgggggttcgattaattgcagttcagtcaaagtaaaataggcacatactgtattaacccggtaggacttttctgagtttctatctgatcaattcagatctatgaagtattcagagaacacaaacaatgcaccaaaattgccagcaagtagacataatctagtaaacctcagcagattataataccacgcaagattcgttttcacctaaacccatgccataagaggaagactttaactagcaaagacctcatgtttgtatcaactatccccgtggcatcaaatttcacatgaagaaaatacattatcatctccacgaaacaccctaaacggcaggataaagtaaatgtacagtccatattctcacacgagaaaatggacatttagccacgttcaaaacatggcttcgctagaatgccatcccgaaaacgcgtttcgctaaaatgccaatatgaaacgcgtgctcactgccactttgccattttagcccttttgtgcattttcgaaatcatttttgctcctccaccgggcgatgagacaaaattgcccttcatgtcctgcgtcgccgctgttgaggaagaggagctcgtactcgctggccaatcttcatgtccaccacaagcagctcaccgtcttcctccca

SEQ ID NO: 8538 - DNA, 5529 bp, Oryza sativa
aaccgagccgccgccctctcctctcctctgtgggcgcgcgtgccaccgccatcgcacgccatgggcgccaccgctaccgcggtttcgccgagccaccatgtcggaggtgagcacgcaggggcaccctcccctcgggcgcagccggcgacacctccccccgcgtgcaccaagctcgccgatgcctccccccgcgcccgccgccgccctcttcgccccacaactccggcgctggcccccacgtgtccgttgtcggcaacccctccccctgggcgcggtcggttcaagctcgccctgccgccatcgagctcgcgcccgccctgctcgtggcatcgccgtcctttttttctttccgccgcacaccgccgatctctggccactcgtcgccacgggggcggcaacgtgaccagctgcctcccaaggccgaccgcgaacgcctccttgccgaggaggtactctacctccactccctctggttctgcgccgcccttgctcccgcatcaaccggcggaggcacgagagagaaaaaaaaggaagaagggagaaaaaaataaaattattacatgtcatcgtccatgtggcatgccatgtaggcaagaccacggtcaaacgcggctttggtactggatgatacaataaaccaagtttagagacttcgatgtgcgctttgcaagttcgtagacctaagtgaaacctcctggaaagtttaaagaccgttggtgcattttacttataaataaattacaataaaaacataacaatcaagtttaaaattagataaattttagctgcggctgacaacacgatgaccaaacaaaagagctggtgaggaagtttgaggaatcctgctatctagattttataaagaaggccaaaagaggcacattagtgcttttgtcagtacatcacatgaactcactgagtcactgggtggtttgttgcattgatcatctttataacttgataaagcaataagttaagcaagcattgttcatctttacaacatcaccctttttggatcaccacattccagctctcctgcttttgttatttacactaaagcaaaggatgatcaaagaagcaaacaattcagttttttttttttggaaaagcaagaaacttccttacttgtaagcattgcaatgccactgaaaagtaccagcagtttatggatgctaatgccatcactaatcatccaccagaagcaaatgcaatctactcctactcccccagaaaacaaacaacagagagccaggacagaaaggggcagctcctatctggccagcttttatttagctgttcttcttttggatttactatctttttattttctccagatgaaagcctgaaaacagtagtgagccctctctgtcctctactcaatcctcatcaacagctgccacccatgatttcattatctttttactttccccacattttatatagccactctcctccttaactcccctcctactctcctccattccttcactgccttcacttccctgctcagctcagcagctcaggtcagtctcctcagcattgtttcagctgcaatgccatgctcagaatctcttctcttaattttttggtttccatgagttccagtatgatgtttcatgggttggtcgtcttggaggcagccatttgtttagggcgcatttggatctgttcctcgcagttcttggcccgaggaaagaacagatctttgcgcctctcttgagcttggcgtctcttcttggtgctctgcgtttatgttccttcaggttgaagggaaatgctaatgcaaagcttagcacttaactgttcttggctcccaaattccagagatttggatgcttccagtggtgctgagatctgcaggatgtagtagtaggagtactgtttttgttcttgtgttagattatgtggtctcctgatttggttggtggcacctaacagttgaagtagtagtataatgcagttgtcaattcggactagatcgagtcttgaaagtgccccatcttgtgcatttgtctctcttggtgacagggaaagggccattaatttgtgctaaatttcagtaatctgaaaactctgctctaggagctagaaagatctgaacaataatgagcctggttaaaattctcaatgttcagaattaccacgaactgtagtaatctgaagcacaagaagttggttttctggcatttcagaatacagaacaacattacagatctcttgtatgttgatttgaacttaagtactctactaaatgtgttcagtaaacactgtagaattcacaagattaagagtaattctattcagcagttacagacttgtgctccagaaacgcatgacaaaaaaaattcagtgctgaatgcttcacttcactgttcttgcgtgacatcagggacttcgaggatgatggaatccaaagcagccatgatggtgaccatcctgctctgctgctcctccatctcaccggcgttcgcgcagaagcacaagggtccgcccgccgcggcggccgtgagcctcccgccgtcgccggcgccgtccccggcggcgccgcgccacgtggacctcgccgacctcctgagcgtggcgggtccgttccacacgttcctcgacctcctggagaagacggacgtgctcaggacgttccagagccaggcgaacggcagcaaggacgggatcacggtgttcgtccccaaggacgcggcgttcgcgtcgctggcgaggtcggcgacggcgaacctcacctccgaccagctcaagtcgctggcgctgtaccacgcgctgccgaggtactactccctcgccgagttcaacaggctgggcggcgcggccagcccggtgcccacgctcgccggcggcgagtacacggtcaacgtcaccgacgacatgggcaccgtccatgtcgggtcgatgtggtccaaccccaagatcagcagcagcgtctactccacccgccccgtcgccgtctacgaggtggacagggtgctcctcccgatgcagatcttcaggaccgacccgcccatggcgccgtcgccggcgccggcgccggacgccaagccggcctccgacgccgccagcccgctccccgggaagtcgtcaagcgccaaggcgaaggcggacgagaagaagagctcgtcgtcgccgccgtcgtcgcgccgcggcgccggcattgccggctacttcttggctcttgctgcatctgcctcagctggattgctgctcctgtgttgatgctaagaaacttttctaattcttttttttttttgcatggattgttggttgctggataattttattctttggacatagtaggggcattgtgttaggattaagttttatgggagtatttccgtcatatgcttgtatgattagtcgatgattacttgtttatccgatgcatgttgcgaattgcacaaggtattttatagggttaatttgatccatgccactctaaatatggcaaataaaaaaataccactactattcgcgttattggctaagtgccactgaaaatttttaaaattggatccatgccactcccgccacttttaccatcctccttcctcacgtcagcatcctcaccgtcaccagcagcagcagtggaagtagcagcgggagcgggagtagcggtggcggtggcatggtgcacgcgaggcgcgggaggagaagtagcggcggccctcgccgaccggagctggaggaggagacagggatcgggaggagcggcggcggcgcttgagctaaaggaggagatggggatcgaggggagcagtagcggcgacagccctcgtcggtggggttggcggcgacggagctggaggaggagacggggattgggaggagcagcggcggaagcccatcatccgcggtgccgtcggtgtggaacctagtgctcgccggaagcccatcctcctcgctgcggttgtggggtgtggaaggtggtgcaaagggctgcgaggtcggggcaacgtcctacacggagccccctcgtcccatgggcgttcggcgcgcgacctcgtcggcggcaaccacggtgaggttggcggcgtgagagaggaggacggaaataatgacgggagtggcatgattttaattttaaaaattttcagtggcacccagtcgataacacgaatagtagtggcatttttttatttaccacatttgtagtggcatggattaaattaaccctattttatactgcatcggcagtgatatgcatgctcatgatctgtagaaacaaaccggcggctaaaaacgaaaactgttttgttttaagataatatatatgattttctattaaagttggttaattatatatcgagatgatataactacggtgcacactcgcggtcccttagtaaaaacaaaaacaaaaactaatggtcgggtggccgacggctagggctagtcttcctgcgcatcttcgtaaggtttcgactctctaatcctcatggtttactgtagctttggaaagagcggaacgttagggttttcgattctttcgtttcaccagggtttttgattcttccgtttcatcggtctcgatagttctggggtccatccgcttcattggggacctatttggagattaggaagctcctcctcctccgccaccccctcccgctagatagaagcaacagcttttagtttttactcttttttgggttcgaaatcctttccttgtaactggcaacgaccagtctggtcggctgcattgtgtaacaacaactctattttcttctaatatactgatgtgtaatatctattttgcgcgtttgcgaaaaaaaaactattggtgtgtggttaaacgtaggccccttgaaacgttttgacagtgcgaatgctaattaatattaatgaaaattgtttggcgattcaagaatattctcagggggggtaaaaacgctacagacaaggaacacattttcatctttgagccaaaacctggctacttatcagttcaccgccggagcatggctgatatcttcggtggccgccggcggcggcgaggctgaggccggcgcagtgtgattagtgggccaacgttggatcagccaatggcccggcccagataccacaagattagccatcaattagcaaaccgttggttgtttggcagataaagtttattttagatccctcagctaagcatcgagtttaaattgtgttcgttaatcataaaaccggatataaaacatcccttatcttttaaaactaattattagaagagagacctaaagtgaacatttttcttgttcagcggcctatttgtctaaccataattttccaagctgggcctttgctcgaaaggccgaaacagtgatgaatggagtggtaagagaagtactagcggtagaggccaaagcggttggtcggatgacacgtcacctctcgtgctaagttggttaactttggttattactcgcaccgattaggcgaagagtgcattgcaaatttaaaatgcttatgtaagtactccctctgtccacaactacaggggataaatgaccctttggtttgtccaatattataagg

SEQ ID NO: 8539 - DNA, 1823 bp, Oryza sativa
gcctctcgtcacagcgcccctcctcatctcggtgatgcctccctccgttcttcctcctcgccccatctcctccccctagcttacggtagtagctcgagtagactccccgtagctagccggcgccgccccgaccgttgccgtcgctcgccgcgtgctcgccgccatcgccgctcgagctccgtagcacccgcacgtcgccagcctcgctcggcgtagctccgtccaatccgacgctagtatcggattcccgtggtcgcgtggatgctctcaccgccgggaatcggtctctcgtgacctcgtcgccgtttccctcttctctcgccgccggttgccgccgccgcaatccgccgccgtcgagcaacctccgacgaatccgagccgttggctcgtctccccttgtcacgtgcaaccgcccggtgtgcacgcttttgcccgtatcaccgtggttcgcaccgccgctcgccaccgccgcccgccgtccattcgcagccgggtcgtcgtctacctcccgccggcccgcgtggcagccacgtaggcaccacgtcggcgccagctcagcctagaccggatcgagccgaccccggtcaatccctccccgtgcgcgcgttccaccgcgagccgtgaggctgcgcgtgggcccgccgcacctgcgtccaccgcggaccgcgcgcatgcaccgcgtcccttccccgcccgcgcgcgtgcgtcgcgtgctccctccgcccggtgagccgagccactgacaagcgggtcccacccgggaccgcgcatggtgagcccggtccaccggctctctctctcctccctcccgcgcgcgcgagtttgggccgccttgggccggccggcccatttagctcggccagaccgctccatttctcttaggccgcgccctagccgtccgagaaaagtctatattccctccctcccttcttttctttttcttttccaaaaaaggatttaaataaatcctttttcctttagaccaaaaatccaataatcttagaaattcaatatcttcccaccgtaaatccgattgactccgttcaacttccaaaattcctcaaatctcgagatctatctaatggcacgcttagaggtcattaatagggctttattttcgccgtttgttgagttgtcccgtttcgcgtgtagtttcggagcccgaagacccgcagtgcgagaatttcgaggatcaagctccggatctcgagcaaggccagccacctttgaacatcttgagcctctatttagaatttaattatattgcttccgaaatattatgcattgataggatcacacttaatctgttgtcccgtctgcaaggcagattggcagacctacctaatttgttacatttgatccttcctttgttaactgttataccatgtccccttgtaaccacccagttgcgcctcgatattcgtgcactctgtgcgagtatcgacggtcgccttcaaacttaaaatctgagtaacaacttgggtaaaactggagttttacaacagacttggaaaacccgacacctgggtcggtgcttgcgaactaaatgaatttccaaaaccgcggaccggcgaacataccgggtgtacggtttcccgctctcgcacttaaggaccgattcccttggaatttcatccaaacataagacaagtacgaccacatgggtggaatgggacacccctggctgagtaactagcttatcaggggagccttgatgccgagagacatgtggattcgccggggtggtgtcggggaggacccctgggcttcctggcacagtatggtctgggacctaacctgttgttggtctgggacccctctcg

SEQ ID NO: 8540 - DNA, 1247 bp, Oryza sativa
aaatggtgcgcgtgacgaacggccggtcggaggcattgtaatcgaagagatcttggacgagctgtgaatccggctgatgttgccaggcacatttcatgtgtgataccggcttcaagggcaacaacatccttaaatataatgaacgggtgggttcgaaaggtagggtttttggatggccctaccactaggctggctgccttctttcggatgggaagcaggccgggcctgatgggcgagctgttggaaatttggtcataattcgacatattttaattcaaaataacaagataataaatatgatatttacaatgggatttgatccagtgatagtggtgaatgtaatcaacatgagcatgcttaatgtagaataagcatcaacaatcacataataacataatgttgacattgggatgaacattaacagtaaaacttctaattgaaatattgtaagaatgttataccccaagaattgtcctccgctggagtttgaggcagtattgcctccgttggtgttgacgggagcctccttctccttgtatccagtgttgccgttgtctccagtgttcgacatattggtgaaggtgaagtagatgttgacgaacagtgagtagtcgcgccttgcactccccaaaaacctgatcgcccgcccgtccgtgcaaacgtcgcagcagcgcgtggtttcggaggcctactctcccaaagcgtgtgcacacactcgtcgggatgggattaccgtagcaacaacaacattggaaaatggatgaaagtgtgtctgactgttctcgcgggagatcaaatccattctcattttataagaggaatggaagatgaagagtaagagtcatggaataggaagaggaatagagcaactaattgtcatcaactagccatgaaccatcctccactacacaaccatcaaccaacaatcaattaggagtaattgatgtaagttaccaatggaataggaagaggaatagagcaactaattgtcatcaactagccatgaaccatcctccactacacaaccatcaaccatccatcaattaggactaattgatataagttatcaattccctaatcaaatggattaattctcaaaactcttcatcccattgatatcccataaaagaatgaatacacatgaattcctagcataatgagccttggaatttatttgatttaattgatttaatggatcaattacccaattaaatctaacacgggcatctcttgctacgcaagctagc

SEQ ID NO: 8541 - DNA, 2580 bp, Oryza sativa
cacatctggtaacgcccatatacaaaatggatgtgtttcaagcaaacttaaattttcaggtaacagaaagaaagttcagtcaatgtctgagggtactgttcattactatgtttcttgttgagatcaatttaacggagtaaacgatttaaaatttacattttcttacaaatccaggactcatcattggaataggacttggtggcagtctaatcatcgtggtactaattcttactggaattgtcgtaaggcgaaagttcaagtctcgaagggccaaaaaactgaaggaattcttcttcaagcaaaaccgaggattgttgcttcatcaacttgtagacaaggatatcgctgaaaggatgatcttcagcttagaagagcttgagaaggcgacaaacaattttgacgagtctcgaaagcttggtggtggtggccatggaaccgtctataaagggattttgtctgaccaacgtgttgttgctatcaagaagtcaagatatgctattaagagagaaattgatggatttattaacgaggttgccatactttcccaagtaaatcacaggaatgtagtgaagctttttggatgttgtcttgagacagaagttccattgttagtctatgagttcattccaaatggaacacttcatgaatatcttcatgtcaactctgcacaatcagtcccatggaaggaacggctgaggatagcacttgaaatagctaggtctcttgcttatctacattcagctgcttcggtatcaatcatccacagagatatcaagaccaccaacattctacttgatgataggttcatagcaaaagtatccgacttcggagcttctcgaggtatcccaattgatcaaaatattgtaactactactatccagggaacttttggatacttagatccagagtactaccgtaaaagccgacttacggagaaaagtgatgtatacagctttggtgtcatacttgcggagctaataacacgaagaaggccaacttcctacatatcaccagaaggcttcaatctaaccgaacaatttatcttgctagttagtgaggacaggctcttggaaatagtagacagtcaaatcactaaggagcagggagaagaagaagccagagaagtggcagaaattgctgttatgtgcttaaacttaaagggtgaagacaggccgacaatgcggcaggttgaggtgaaacttgaagggttgcagggtgctgtaaacactatcagaggtcgacgtgcagttcagttgaattctccattgactgaagagagcgattccaacatcgttgctgttggtgacgctggttatcacaactcaagcaggcggctcagtatggaggaggaattctggtcatctatgagctttcctcgttgaccatcttgtttctcatccagctcataagattttttgttttgttggtctttttttaagtttctcttggaacatctgcaattgcaaggaacttccaagctgtatcagtaggatcctccacaactcgtgcgatttcaacaaaacttgagaacttggcacttccctgcagtcctgtactgttcgtgtaataacttatacttcctccgtcccaaaaaaataaatctaatacggaatgtggcacattctagcactacgaagaaaaagattactagctttttaggagtagttcaaacgaaacaacatgtttgcctccctttgatccttgcagttatcaccatagatctgccaaactgatatgttctatgccgaacagttaactgaacttacaatggatattcagttatacattgtcagtgcaccaacacaaggtgactgaatagtaattcattagtaactaagttcagatcgccttatgagtccgatgtgtttatcattcctacaaggacagattcagacgatgattctagtggcagtgaaacatgcaggatatgaagagtggaactggtgcagattgtagagagaactgatcaagctaggtacgctcctgttaatcatgatatattatgaaaagaaacagaagagatcagaagggaactttttcttgtagagtatgcaatcttgctgatcaatttacagggatcactgatgtatctactgttgtaaagaacatgtgcaacaatggaaattcagaactattgctttcttagcgaaaaaagataagaaagatatgtctgacatgcaagaattctgatttctggaggtgttgcactgctctgaaaagtgcagaataccagtatatgactataagaattttgtagctgtctttgcctcaacaatatcaagtgctttgttgaggtaaacagtttcagaatagctttgttccttctagaaaaaaaaaatcccatgaaatgtttttcatgtctgctcaaggaaatgacagggaaaggtggaaaagaaaatgaatcactcctgcattttctaaacctgaatctcagccagataatttccatccaacggatgagacgagcaaaccaggggttcggagaacaattcaccgaccccaaccaaagataccccctacccatcagcacagccgccggtgaagttgccggcacttgtgtccatcttgaaatccaaaatt

SEQ ID NO: 8542 - DNA, 711 bp, Oryza sativa
aaaatctgagtaacttcttgggtaaaacttgggttttacaaaagacttggaaaacccgacacctgggtcggtgcttgtgaactaaatgaatttccaaaaccgcggaccggggaacgtaccgggtgtacggtttcccgctcttgcacttaaggaccgtttccttggaatttcatccgaacataggacaagtacgaccacatgggtggaatgggacacccctggctgagtaactagcttatcaggggagccttgatgccgagagacatgtggattcgccggggtggtgtcggggaggacccccgggcttcctggcacagtatggtctgggacctaacctgttgttggtctgggacccctctcgtcggcatatggtaaacctgtgtcggctttcgaaatgccttgtcatgaaagcttggaggtctcccgacgtggctgatccccataagctaggtgatccgggttagtaatgtcgtgtgggtaaagtgtaccacctctgcagaggttaacaaactgttcgaacagccgtgcccacggtcatgggcggatgtgaggtgattcctagcgtagttttgtttgactactgccttgtgaaatttgctgttgtggaaaggggatcgatgtttggaaaatctgcagctgatgggatcagctaggcccgggtggccgtttgaaggttgttggcccgggtggccgtttaaaagttgttggccc

SEQ ID NO: 8543 - DNA, 2657 bp, Oryza sativa
gaagccagctgttgaagtaaaaaatgccagtccaaagaaaaggaaacactgtaactgtaaaaactcacgatgtttgaagctgtgagtatcttcttttttcttttgggtgtaaaactgtaaatgcagtgtcatgtttacagcaagggaaaatatagtgttttgaaatagagtactggataacttttacatgttatttgcaaaaggtaggcttccaagcaactattatcaatatgtattctcaggtaaatgtttagtaccatcttaagaatctcgaaacaggtcagttatgatggtcaataccggtaggagttacgtttgattttccttcatacaacatcattaacggtacctaaatagcttcctaaatggtatgccatgtacattagtgtgtgtagtcagtggaaagataagagtataactgttgcgttgtgttcatagtaggggattaatgtttcctttttctcttgtggtaatcttatttcctttgcagtttgagtttgatgcacttgtctgctattctaattataattgtcccgtctctgtgttttataatattcaattcttcctgattgctttttttaaggcacattctccctaggcagactgctagcaaacaataagtgcaacgtactgatgtttgttgtcagctgactttatgatgatgaaacaccatcatgcccattatgcttataacaagctcactagcttgatatttgtttgttaggtattgtgagtgttttgcagcacgtgtatattgtgatggatgccattgttcaccatgtggaaacaagattgagaatgaaaacataaggaaggaagctattgaaacaattctcctccgtaatccacttgcatttcagcccaaaattgaaaatagtccaaatactgtaactgttcgaaaggtactactattcgccaatataactctttaatatgacatactatctacatctataccatgttgtaaccttaaaccagtgctcgttttccccttcagtagttatcctgatcaaatccagaaatataattccaaaacatgcatgagctgaatgaattttatatagatgaaatgaaacaaattcaccaacagctctgctttatttttttggtacacacctttcattatcttgcttcggttgtgacaaggacttaaaaatggccatgatagtgtccctctattccatttttattttgataaatgagtttgcaatgtaagtttcaatgtggtttactggtatggttttatgcataatctcatacacctacccctgattgctcaatacagtcagcatccagagctttcatgtcatattgacattattccctgctttttatagtttttcatttttattttgaattcacgcactttattttgtccttgaattgaatgtacatttctacgcaggcacaatgtaattatgctcttcatttcatttacactgcaatactaaaatatttgtttacatggtttaagtaaaatataaaataccaaagtgatcttggatttgtgggtaatgttttataattcttaatgttccattagtactaattaatccattcattttttttaatgtcctcttgtcccatcttttagcaggattctggaaattaaacactaaaaatgattctaactccaatgtttaggaataatttgttatttccccattaaaatgccaagtccattttttttttaccttgagctacatgtgtttatacagtcttatgtgactttcaggataattctgaagcaatacctccgataccaaagcacaataagggctgtcactgcaggaagtcagagtgcttaaaaaagtactgtgaatgcttccaagcaaacatcctatgctctaagaactgtagatgtcaggactgtaagaattttgaaggaagcgaagagcgaaaagctttagttcaaatgaaaaatgcatctgatagaaatcacattcaagaagcagctaactttgctctgaatggtgccactggatctttaggatacaaaaattctccagtgcgtaggaagaaatatcaagaaaattcccttggagaacaaattttgtcagaagcacaatttcaaccggtatgttctaattggtatggccagctgcaagtttttgtggactagaatttgttgttactgttatgtgctagactgaccatgcagatgtttcacagcttgcatcctcttgcacaggatttggaggggatattgctatcaattaccaaagcaaatcatctgaaatgatctataggtaagcggaactatatttatattttctcaaagggaataactcaagaacagaaaaaaaaaggtctatgtactcagataagccattttgaggttcttaattctttagttaacataggttacaagtgtcccttctggccttttagatagttctactatgccaatgtgtaatctagtttcagtgtgtcatgagcttcctgtaactagtgccatttcagatggctcagcctagtactttaatatttttgaaagtcttcatgggtttatctcaaaggttatatggcagcatcatttagttatactaaaatatgttatataagaggtatactctaccgcttactgtctcttcttttgatgaaatataatattttctcaggtctccactagcaaacactatccctcttattgaagt

SEQ ID NO: 8544 - DNA, 4382 bp, Oryza sativa
ggagagggagggggaggcggccggctcgagggggaggggagagggagggttagggttagggatttcaaaatgatctgagccgtccatcaaaataaacggctgagatcgatcgaggatttgggccgcaccacttgggcggcacgcgggccaacagtgaacagtccagcaagtgagaggaagagtatagggatataaattagactttgtttgcttttaggctgaagaagaaagtgggctgaaaaaggcccatagagataaaagaatttttatttaaataaatactaaaatgatatttgtattatcaaaattagcaattaaactacgtaaattccaagaaaatttcaatgagtgtaattaatgatatagaaaatttaataaaaattaaatccaaccataacattttatttctcacacttactttacttataaattaatttaattatatacctacctacttaaaaaatacccaaatattgcagaaaatttatatttcatttaattagaatttaatatgttctaattcaattttatcacttactttacttataaattaatttaattatatacctacctacttaaaaaatacccaaatattgcagaaaatttatatttcatttaattagaatttaatatgttctaattcaattttatcacttcctgctgttcgtcaacgggccgtgggggaccagctggggccaccgccattaccggcgcttctccgacctcctcgtctgcgagccgctgacgcgtcggtttcagggcatcgcccgcatgccgccgcctctgtggagcttggtcttctgcggcgcctacctgatcgacggcggcggcggggagcgcggcgtcggcatgtcgaactaccgggtgctctgcatgttcggcgagctggcgtgcgtcttctcgccggggaacgacggcggctggcgcttcgtcgacacgggcttgaagtacggcgacggcgaggacgtcgagttccccgaggacacccagttcgtcggccgcgccgccgggaagatctactggtgggcaccgggtgggctagtgcaggtgttcgacgaggccacggacaccttcttcctcatggagttcccgaagcacatgcggtgggagtaccacaagtccaacctccgggtgatcggcggcgtggacggcggcgggatacgcgtcgtccgcatgaccggcgaggacctggagatctacggcgagagcggcggcggggagtgggcggtggagaggagcgtccggctggccgaagccacccgcgggctgccggggcgtcaggaggtgttcttcaccgcggaggcgccggctgcgaggatcgtgaccgccggcggcgacgggttcgtgacgctggcgccggcggaagatgagacgtggctcttctccgtcgacctggagaccatggaggcggagcgcgaccacgagaggaacaagcacgtcggcgaggcgcacccgtgctcggcgccgccgctcgccgccgtcttccgtgcttgcggcgtaggtgacgctacgaggacggaaaaaagcggaagccgcctttgaaactgacgacgaactttagagagtttattttgaggaactggtcgaactgacttgtgaagattcatgtaaaatccttgcgtttcaaagctattattagttttaggaaatattcttagttctaggaaatattcatagaactgatttttattggtgcacggtttattacacatataattatgagtggtttaagagcgctaatgaccgttcttagctctaggaaatattcttaaatatgtgattaattataacatgctacaaatctaactgcatcgttgattatgtagtaagagattattttggagcttttcaataattttgttgacaatgaaggactctcgcgtcgctctccccaggggcggccgggtcgtcgagccgcccctctccccccaccccaccccccttctccgcctcgccgtcgcccgagcggccgccggcaaagccgcgcggccgcaagggcggcggcggggcgctcctcgtctcctcgcgctcgggcggcctggggagccgcccggagtggtgacggcggtgaccgccagatccgcgccgtttcggccggatctggcgggatgggctggcggcagggacgggcgacggtggcggccgaggtaagtgcaccgggtggtgttgtgggtgatggcgacggcgttggggcggcggcgcggcggccggcggtggcgtgagcacgcaggcatcccgcggttgccgctggcgtcctccggcgccctctaggcgtcggccggcgttggtggtgaggggggcggccggatctggcttccttgctcagatccagcgcacactcgggtggggacggggtggtttggaatccagccgtcgtgcagatggtgtgaatattgcaggtaccctcggtgtgtaggtgacatttggtggctcccgtcatggatgctatggttgatgggtgctccaaggcaaaagccttgctccgctctcggtgctagcaacggcgacgcccttgggcgtcgttcaccttcttgaaggcgttgctactggagccctcgttcaactccacttcaagagtttcctccgggtgaaaactagattcgttataggatcggacgatgtcgccgttctgtcggcataacctttttgaaggcttcgttttaggagtttatctcttgttgaacgactctacttaggttcagtttgtcaatgtcggggtttttgtcggtttttctttaattaaaccgtgctgttgtaaggtttttgggtccggtttcccttataaaatggatcaactctcttcttctatagtgaattgtatgagctccctgcctgtcccctcgaaaaaaaataattttgttgacaataagattgattaacacaaaattaataaggacacattggcttactttgttcacgctttgctataagcataattgctacaatgataggttgctcatgagaacatctcgcccatttagttaaatggtcagtaagcattttttatccttttaatgacgaacttcacaagtttgaagctgcataaacataaataggacaaatgcaatatgagaattataaatgcatgttaacaacttagtaagttgaatatatacattacaaataattgcaaccacaaacagttaatgcaatagtgttatgcatgaaatcgttgataccggtcaagcatagttgatgatttatgagaggcttctaataccgagcctaaaaaagttcttcccagttaaaaagatgatggcagttcagaaatatagccttatagtctaattacatgtgtcaccaaaggaaaggaaaatttattactgtcatactaactatacaagctgatcaattactctatatcctaccactgtacaaacagagatagtatattaatatagatattttagccctctgataacaaatgtaaggggatttgaaaccaaaatatgtacacacctgccatcaatcataagaacattcctacatgggatcctccttttgtagcctctatagagcttacaaacatgaccattccaataacatctgccacatatgaaaagtgtgttaatagaacttctattttgtcacaaattaatattgtttaggtggtgaattgaactacttaccaacataaatgtcattatggtaagtaaagtcagggccggttcaacaatttcgagggccctaggcgaacttgatactatgggctcttaacaagttaaggctaattttattacttctaatcagtggcggatccaggaattttttttaagcctgggtaagcctaacaatgaacaaaagtacatatatattggggcaattgcttatttgacctcgttttgaattgtaattgccgatttgaccctactttttgaactttgcttatttgaccctcattttcgagtacgaagctctggtctgaccctattccgtttgtgtgaggtgacggtgttaattttggggtaaatagtccattttgcccttgcttatttggccctgttatatcttgtttgtttgcttgtttgacctaaagtttggataatataaaaaaaaatctctttccccggcggcggcggcggcggcgcacccgcggaggaagacggaggccggcgcgcgctgggggggagagagcggcgccctgtgctcttcgccacagcgtcgtcgtcgtcgttgccgaccggtggcggcgagcgcagaagaagattgaggccgacgcgcgcggggagggagggagcggctccctgtgatcttcgccatggcgtcgtcgtcgtcgttgttgctgacccggcggcggtgcgcgcgcggaggaagacagaagccggcacgcagacggagggaggaaggcgctggagcttgccggcgtgcggagggcggacggc

SEQ ID NO: 8545 - DNA, 30124 bp, Oryza sativa
cattatcaaatcatggcgcaattaggtttaaaagattcgtctcgcaatttatacgtaatctgtgtaattagtttttttttctatatttaatactccatacatgtatccaaaaattcgatatgatagggtgaaaagtttttacgtgaaaactaaacagagtctacgtaatgaaaacctgaaaactatcgttgaatcgaaaaaatagatgtatgagattcatcaaacatcattataagtaaaaaaaaaatattctccgtaaaacttttacttatgaataaacttatgagtaagatttttactcgtgaggatataaacgaatctcagatttatttttcaatccacttatagttccagatttatattacaccatatattttcctgcgctttcaccatatattaccatatattttcctgcgcttctactgttctatatgctgcttctgcttccttccgcccgggcttttgtcatctctgcggcccatgcagttgcagactgccacccgcgttatgccattgccttttggtttcacactacgcgagcgccgcgcactagctgcgtacaccgaaaaggcagctgcgtacaccaaatggctgccgagtttgtcgatcaatctagcccgtacaacttccaacgaacggccgcgggtcgattgttttactccatcaccatgcatgatgtttgcaaccatgacaacacagagatggctgatggcacgcatcggcgtacgaagatggtgtcaccgtagaagaaaagagattagtctgagggcggagacgacgaggctctgacacgtgtaggctacgtgccatgctcgcagtttaccggtccaactcaagctgaacagtacgattaatatgctagccgtgtgcctgtgtgaatccgatccgatatcctcattgcaagggagtctactgctttatctagacctgttgcctattgggtcacaatgtcacatgaagcaatcacgttcggcacgagctgcccactggcgcgcctcattgtcacttcgacgatttttagttctttctttatcgcagtttaacccagatcgattggacgacaaactgcgtaccgtcaaatactactgcctccagcttactgtatgaatcactcgactaatagaaaatacatacgtacggataaacaataggaaacacatgcatagatgatgtataaaaagtagcatacggcatttaagaaagcttcgtgatcaagcattcatttcccgttccgtgatgtttgaccaggcataccactcctgacaaatctttgggcatgcaggtgtgtctggatgagaagaaatgacaagactgatgactcccaaacaaaaaaatttctctgtcacattgaatacctagacacatgaaatattaaatatagataaaaaattaattacacggattatgtataaattgcgagacaaatcttttaatcctaattgcgctatgatttgataatatggtgctactgtaaacatttactaataatggattaattaggcttaataaattcgtctcgcggtttccatgtagaatcaattatttcaaatctaaaatatatatttaaagtgactttattatagaatttttttaaaacacacactatacattttgtagttcggaaagcatgcacgttaaaaaaaaaggactccctccccccccctcctcctccggcgttaggtctccttagaattggataaaatttctaaactagagaattaatcctttctaaactagagaattaatcctaaggataaaatagtatgaaccctttgggatggtgaaatattttaacacgtggtctcacctaatatatatttaaaaattcctttgagaaatttcaatgttacacccccttctctcaccgttcactctttaataaattaatataaaaatattatattttccaaacaagattctacgtaattcctatggttttaattgctgtagtgctcaattaataatgacatctcacttttacatttttcctattcctatatttcactgcgtttgtgttctaatagagcccttaagttcttttgctccttccggtcacaaatataaatataagcatttctaaagaaaatcaaataaatatatttttaaatatataataataaataatcaatttatcacactctaataacccacctcgtttcgcgtgccagaataagctgaccaatttcagccatctcgaacatagacttcaaatgagtacccgacgagtgaggtcatcaattacaggtgagtccattttgccttcctcaactgtagctccggtcttaatttcttcccttaactacaaaaccatatatgaggttcacttaactgacaaattggtttgtttttcctcgctaagtgattttatcctacgtggtgtctactgcctaggtggcacattaacatgttctccatctttccccgcaaaaaaaaaaacttgttctaaatattacgtggcgtcaatgtgttacgtggcattaaaaacaatgaactaaaatataaatattgcggccatatgtcatgatctcagcactcttcctcccctcttactattcttttctctaccctttctctatctatgctcatacaggccccgcattgttccctctccaacgtcgttaggtgactagggggcaagccacgccgcctttgatgcgcttgccatcccaccaccgaacccctgagccacttgctgtcaggtccttcccggcccccgagccaccaaccgaagaggagaaggagctccagaacgacatcgcaagatagacgttggccctgatatgctgtaccgcaacgacgaagatagagcgggtcgatcaaatcaacgccaaggaggcggctacgcacgtgtgtcgatgcaactcgagcagagattgtgttgggcccgaacccatcttggtcacacacgggtggaattgagggcgagctccatcttgagcttatcccagacgagaggcaactttagcggcgacattaggggctttgtatggcctaagagagccgtgtgcgcatgtttagtaccatcttgctagtttagcactggtggtgtgtgtatgtgggcccgcccgtcggttgggctgggctgcgcggttctggagggagggctataacactttgtctacagatgacggtggagcctaggaggcgtgtccttgtcccaccatcacgtgcgccatcgcctcccttaccgcccattgccacatcaattttgataatttggcccttttactaaactagaccttgacaaatactataactagaaatagacttttacctctgtgtcataggccttggtgatgaggcccaacatcttagcgccaagcccattagcgctggcacctctgacattttaaaatgatgctagacccacctagaaaagcaagtgagtgtgatgcagtggtaagtggtatttgttttgccttgaagatcataattcgaatccccactgcagcatgatattttttatgggaggctgggaattccctaatggtgaaaaacacacacacacatacagagagagagagagagagagagtcacaacggtgaaactgaagacctggtgaggaaaaaagaagaataaacaagaaatggcgagtaaaaaaaaagaaaaccaaagaggtcacgagagtatgggtttcaaacccaaaaccttccggtttacaagggagaaatttaccactaggccaattaataaaatttgttaagggacaacctaacatctttttaatatacagtgctcaacgccaagacccatggtgctaaggtagatattcaattttggttatagttttttttcaagatctattataaaataagtattatgaaagggtcaaagtgtgaagttctcggccattgctgtctagggagcactgtcatccacctagtcaagcgcgtaattcacccaaggtcatcgatgccttggtagttggcagaggagagcttacggcaacatgttggtcactataaacctctcaagactaggatcgtgacctgagcgggttggtcgaccgcctcccccgccctcacaaggatgggcagatgagctcgagctcgaagaggctagccagtcaccattgttgggcaagctttagcttgagctcgttgatgtgtgtggaaagggaatgggggagaaaaagagaggggcacggacctataaggtccatatattgacttagccatttggactaggatgaactagccatgtcagctgaaaccactcgagagagagtcgatgtgcactcattttataatttggaggagcctctatgcactagtctcatagttgaattggacctttcccattgttgatgcagctcaactttttcgtgcctatatgtgggctgagtggcaccaagcttttaacccgagtaggattttgcgatggacacgatacgaaagaggcctagcagcgatccaattacactctcaccgtctcacggcccaatatcagaaaataaaataccgtgccgatttataattaaaattaaaaatatactgttcatttaatttttttctcatgaatattcaggatgcaaaaatttttacgtaaatgtaccattgatctcgtacaaacattgcgcaagaataatgtcgtggacggtattgcgcggcgaaaatgtgagaccgcgcggtctcgcattatgggagagcgagactaatcattattagttaattaggataattagtctctaattactattagttaattgtcaattaagtaattaagcactaatcaaatgaagccgttggaagatgtcgctgtttgatttcgcgagaccatatagtctcgctcttccattgcgcgcgaccacgcggtttcgcactttaatttcaacgcgcgataccgcccacgacgtcacacccacctcattttcgcataacggttgtgcgagatcgacggtatatttatgtaaaaaattttacattccgaatatttatgagaaaaaattgaatgaacagtatattttcaaatttaattatgccgatttattgttttgtatgaacggttgtgaatgaacagtctttaattcacctacgcggaaaagaaaacacaatctatatattcaacactagcctgatcggagcacagactgcggtgcatatcagaagttagaaattcacaggattttaagttcgattttctagtttagcaaatcggaggtttattccatcaacaactacaagcaccgcttggacctatattcctccccaatctgtgagtttgtgttcccctctctgtgtagcgaaacaggacacgaactcgatctgtctacaaatctcgcggctcctcgccgagcaggagctcccggacgatcttgtcgcccaacccgtcggcgcacatgaagaggtggccgccctcggggtgctcgtggtaccgtacccacgggagcttctccgccacgtagcgctgcgcctccacccgcacgatcttgtcctcgcgcccttgccagatgctgacgacgccgtccccgttggggaacgggttctcgatcgccgtcgggtcgaactcccacgccccgaacaggatcgtcgcgtcgcggcacagcgagtggtaggctccctgcttcgtcgccctcccctgaaacagtttacacgcacggcgagcccgtgtcaaagcgactctctgtttcgttttcatttaaggtttattctgcacgagtgcgtctttttttactcctaagttttagtatagttggtggacatgggatccggtgcaggtgcttaccctgtccaattggccagttctctgaatctcagctaggatctcccagtccttttcagtgaaagcctcgggcttcccctccacgatcggtgagatcctgaaccacttttgattgaaccaggcgtagaacagccaaggcatgtggtgcgcgatccagaacgtcctccggtccccgacgtccagcttgcggtacgcactggccgacacactggcgggcatcggccaccagtagttcaccgccggcacgaccagcgccacgccggccagcctgcaatcgtccaacctctcatcagatactgaaaaagaaaagaccgatcagatgaactgatgctgtgatgcatatgttttgacctgtaagggatgtagttgaggcagctccacgcaacgtagccgcccatggaagtcccaaccacatagaacttctccccgagctgcagcttgtcggcgagctcctcgacgtccgtggcgtcgctcttcagcccccgcttcgggttggcgtcgctgtcgccatacccagccctgtcgaagtacagcaggtaaatccccagctcctctgccagctcctgcagttaaattaaacagaggggatcaaggtataattcacaaccaagaactacatcgacgatcgcgcatgcaagtttagcagcagcagttgttacttgggacaccgggaagtcggattccttggtggaggcgaagccatgggagaaaatgatcttgtacttggcgatctccctgccgaccccggcttccctgtaggccaggtgccggccgtccttgagctggactctcggagaggagaccggtggccctcccggaccgcccaagatcggcggcggcggcggccgcgcgaccttgtacgcccagcccagcagcgccactgcagtgatcagcactaacttggagagcgcaaccatcgcgaattcctggtcgatctacgaacctgcagagatcgaaggcagtgaaattaaagaaacttagtataacgcaggtgacgccccgatgattagccggagtccgagcatgcttaacacggtgcaggcaacatcaacatttataccaggaaatcgtagagacggagcggttcttctcacaatctcatttgtcagttttactcgtcagtgtgcagcgtgaagtggtcacctctcgtggagtcgtggtcaggtttacatgtgaagtgtctatgtcgaacaccggcagtggatcagacgatcagtgaatggtacgataatgattgtaccgtggtgttctgccggggtgtagagttggtcgaactcgcgggatcgatcttgcagatcgcggctatgagatccacatatctacatcatcacccatatccatgtcaattgtacctgatgtctccaagactccacttgtacacgcggggactggtacgattgctacgaatggtggtaccggctggcaggctgaattggccgtaactgcgtttttttgtgtaaggtgcaactgccgagtccgttctggctgctgagctgtgtgctaccggggggagcaacaagaacagcgtgatgttgattttgtttgcagtccgatcgatctcgctcgatctgttcgtttgagacgacaggaggcactggcgtcttctgagaggattgttttactgtgctcctaattaacacatgattgttactgttcgaaatgatatcgcacaatgcacatccttagtccataaaagtattaggttggtacttgtccatgatttattgctgacttctcttgatggaagttagagtatatggattgcagagaaagtgtggacaggctaggcttaacaggcaatacaatcatggagctgggcagctggacttggccatataaagataagtagataacgacagatcaagaactcttgcccgggtcatcatacgaaactagaggaataaagattccatgagaaaaatcgctgttcatccgttccgataataggaatggaacaatgaagagggaaaagatgttcgttcagaaatgaagtgagagaagataggaaaagtctcgcgcgcatacttacagttttgagggaaaaaaagagcagcaagatgaacatccggtgaaacactatttttgtatatggttgaggcaaagtggccaaccagttcgtctccctcctcgctgtgctccgcctccgcacttctgccggccggctcgcctccccgatccccgctgctgaacctcgccgcgcttccgccgccacgctcgagctcgccccaggcggctgtggatctcatccatccatatatctcaagcaggacattttgccagccactgattggtccacttgtgtattctcagaaaaaaaacaacccgtccacttgtcagttgtcactgttagaattgaagataaatcttgaaattacaaacggtaaaaaagaaaatgaaaaaaaaaactccctgcactgcgctacttgcctactctcctctttctcgctatacgcacatacatcagtcattgaaatgtggactaaaatcaggttcttggtccttccaacggaatcaaggaaatacaattactcaagaaaaagataaaaatctagagctttccaacatatacctgataaaaaatcacacaggaatgtttagcttatattcatatggttatctaaatcgcttattagcaaataaaaaattattcatgagtaatttttttatatatgtatccttagagactcaaaagcaaatgatataaaataaattatatcaaattcaaaattaaattctaaaattcaaaatttggcttataaggataagtataagccaaacaataaggccgtaaaagaaccggtgaaaaggatctatctcaatgtaaaaatagatagggaaaatagaaacagatctgaacaggaaaaaaatattcctagataagaaaaacagaaacaagcggtgtatcgtagccgccacaaaattggagacaacgaagacggtagccatgacattttccggatcctttggaagctgttcattcaggggagcaagggtatcaagtcgtcgacgactagccgtgatggtttattagttcgtaaatgcggatgctggacgcatcaaccagccgatgaacaccaaggtcgagcatatccatgccgtccatagcaacaatggccacaagctcaagctcgacaaaatcgacaaaaagggagggagcaaggaggtctccagtaggatacctcaatggggaggttcgaggggcaacgtcgttgttgccgccatcatcttcctattgctctcgctggcatcgtcttcctcattggttattgtatcccttttttatgagctcagacatgcattatcggtagccatggctccaagacgccagatctaacagccttcaactctcaatggccacaagctccaacgacagcgacaaacaacaaagcacgatggaactagtgagctgtgatggtgacaaggcatcgagatccttccgccttttcttttcctttatatttccttttcaccctattaagctggtgatcaaataacaaagttgtttactgtttcgtagttcttacagtggatttccaatcttttcttttgaaaactataaagtcccaatccacagttaaaatattttatctataataagttgtgagagtaacctcacattcatagtgtgttagttttattacgtgatggattttatttgtttagctgattaaattcaacaatgttaggttttagcacaatttaaagtattatagacttagtacaatgtctctatatattgagataatcgagagagggaggtgtcaaagaaaaacggtgtcgccatggagcccaggacccacctagatatctgatagaaaaaacgatttagaaaatgcttctcttcatatattaacgagaaatcacattgaccaaataaaaaaaatctatgacgcttcacgtaccattatgtaattttttgaaaaaaaaaaggtctacgaaagggtacagaagtaagttgtagactttatataattcaaaccaaaaaaatagatcaaaatcatgattctaagatgcattcctaataagacatgtgttttctccaatgtgtgaccactccgggtccacaccagtcatgcgcaccatgcctgcgcaactgcgacacacgtgcctatgaaaccgcgagagtcgactctgataccattttgtaacgtcccgcctctccgaggccaggcccgcttatatctggtagcttttataggtcatagactgccctcacagaccaacacaagttttttcccatcccaaattgctccaggccaagcacgcttaacctcatagttctttggagatcaacaacaggcgcgctcgatcgagcatgaaaacaaataaaatgagagtgagaactaagcaaaaaaaaaaggtatgtgtgcaacaaaggtttaatggaaaaaaaaacaattatcatgaaattcatgcaaaactcctcggtaggaaagaaaaggatagaaagtaagtaaagggaagatgggagaaaaaaaagtaatgagagaaaacaaggtgatttgaataaaattagatttgtgtcttgatcatttttaggtatttttttatttgtttagctgattaaattcaacattgttaatttgttaacacaaataaaagtattataggcaatttgttaacacaaataaaagtattataggcttagtacaatgttcctatatattaagataattaagaggggaggtgtcaaagaaaaacggtgtcgccatgtagcccagaacccacctaggtatctgatagaacaaaatggtttagaaatgcttctattcatatattaacaagaaatcacattgaccaaataaagaatctatgacgcttcacgtaccattatgtactttctggagaaaaaagatttacaataaacaataaaattaaagggtatagaagtaagtaggaaaaaaaccaatatcaaaatcgtgattctaagatgtgttcctaataaaacatgtgttttctccaaacgatcacaggtgtgctcgactgagcatgaaaacaaagaaaatgagagtgagaactaagtataaaaaaaggagtgtatgcaacaaaggattgatggaacaaaaatacaattatcatgaaatttatgaaaaactcctcggtagaaaagaaaagggatagaaagtaaggaaagggaagatgggagaaaacaaaataatgagagaaaactaggggtttgaataaaagtagatttgtgtcttgattttacaccctatttcttagcacttacatatcatttttaggtatatgttagattttagttttcattttttaaaatattcatctgatcgaaactatgtattgctaatactcgatgttacacaggctaaatacccagcgtgccaacgtgcgcgctgattttctagtctattctatcagcaggccagcaatgtttggtatctaatgggcccgtcggaccacttatcggaggacttgacattgggccatatcacttactgggcaagattgggccgatcagcgtattgtccatgaaggctggagagaacgacgaaacggggctccaaaagcccgcatgtgctcataggtcgttatggccttatgggccttgccggaattagccaattaggccttacaattccaacgtccgacgtcgtctattagagacgttcagctcatctcatcatcccccaaaggcctaagcccccacgatccccatgccgccgtgcagcgcactcgtatattccacgcgacgcgagagactcgaccgagtccaacacgggcgctgcttttgaatcacctcgccactaactttctacggtttggtccaggtttaatgatggcgccaccgtttcaaaaggcgaccgatcgatccaaatcgctagctcgtccatgtacgctgcacgcgtatgcctacctacgcgcgcgcgcgcagctcgtgcatgcacccgccttgagcccttgacacgtcccagctcaagctcaagagctttgaacggttgatggttggcgcgcggcgtggtgttgtaacgaaccatgattttttttttctcccttccttcggtgcggtctggtcacccagactggcgcccatcggtcggtcgatcgcctttttgacggagtctcgcgcgcgggccacctgatcaagggcgtcgctcgttctactgggagtaaggtaaagttgcactctgccatgtcggcataagtatttttccggctcccgccgatcttgccgatcacgagggcgatcactgaatagagagagagagagagtagatcattgatagagcaagtttatagtatagccaactactggttacaaattatctatagtcaacttaatagctaattcatataatagttacctataaatatatactacacaatcaatatctggtcccaccagtcatacacacatgcgtcttggagttcgtgttacagctggctacaagtctgtagtccgcactcttatctcttctcttttatcttcttaaaatattgtacctgcttttagagggagtcatcatgaaatgagttggttcaaataacatggatttttttgttccttgctctcctccctcgcgatcgggaaaaatccacaacgaccgcttgtttttggcttttcggcggcagcagcagcagcactgcgttgccccgcgtatggcagtgtatagcattctggcgtatagtgggaagtggatttttgttccaaagagacattctcttgttttgtgcatcttgtgtaaaaacttttgagctcttcttgcgtgtgtacactaaataacaaaaagaaaaattaatcagaaaataaatccaaaacagaacggcaaaaagaaataaaaaaactggacaccgctgccgccgtaggtgcaccggacaaagacacacgaacaattctatcgggtaaaaaaataacaaatttaattgtaaatatacatatattaatttaaattttgtttgtaatttttgttacaatctgtaaaagttgaattttaacttgtatatttgtggattgatacattacatattgatctatcttatttatattttttcataacatgtaaccaacggtggacatccactcgagttaaaatagtttccccaattctatcctctgtctccctgattccctacccggtgtactgcacttggccaaccgatcagccctgcagtcgcgacgacgctcctgcagccgcgcggcacgcgtgggccgccgatgcaaggtccgaaaccaggctagctaggtacgccgcacgcagcagccaccagcacgtacgccacaaatagcaccagcagccagcgatcctcagcgaagaagggccacgcagctagcaagcgcgaacatattcacactctcacgcgctatcccatgatcccaattcccaaccctggcggcggatttgcccaatttggctcgtgtgtgaaagcctccaaaagaacaaaaaaaccatcaagaagcggccttgcatatactacgtactaagagacatacacccaaaggcatataaatggcccccagctcccagccagccatttcagtttcttcaagaccgtgacacatgcactccttgacattaggctatatacacatttcttctagttcttcctccccctcctcatctcccatcttccccacgccaccaaaccccgagaacaagaaagctatataccatctctcatgcgagtaaataattaagtgagagctctctgtgtgcgtataagtagagatcgatcggtataatcgaggactacatgaggatggggctgcggacctgcagcgccatggaaggtgaggtcgtcgccgcctcgcctttcttcgagtggctcaagccaccgccgcggccggcgtcatcctcgtcgtggtcgtcgtctttctcctcgtcgtcctcgatggcttccagggatcaagaaacagtagtacctggtgaagatggcggaggtgaaattcaagaagatcataagagcggtatgacttgtttgccgctgctcagcatgctcgaggaggggaattcgaagaggcatgagcaccctgtgaaagaagagatcatgagcagtgcacacgcagccggggtagtggagcctggcgtggagttgaatatcggcttgccggttacaggatctagcgctcaggaggtcaccatggaggaggacgatgaggaggaggatgacgacgacgtaggggaggaggagatggacgagtggaagcctatgcatggcggttgcaaggtggagggggatgaagagcagtacggcgaggcggtggcgtcggtggaagggtcgagcagcatcaccgccgtgggggatatgttcggcggggtcggggcggagagcggcgtggcgatgagcagccggtattggatcccgacgccggcgcagatcctcgtcggcccggtgcagttcatctgccatgtctgtaacaaaaccttcaacagatacaacaacatgcaggtactacatgacgtccttgatctttgtcagctagcttccattttgatttttacctagtacatcccatgttttcataaattttgaaattcttatatgctcatctttggaaaaggaaatcccccgcagataaatctagttttagaaaatatattttcaactgtgagtctgtgaccgacacggacatcacaaactcacaaactgaatctacaggtggtgtgactgcctgaagtgttacgtatctgagaatgtacaaaacacacaattatttcgtatacaaatccccacaatgagatattctcgtgcttcggcgctaataagtgatcgaacactaacacacactatataaccacttcattcgtttcttcaattattcagaacacatactccaattatcgtatagctctctgatcgatcgtacgttgcaatattaattgatgatgtggggatgatgatgatgcagatgcacatgtgggggcacgggcgggagtaccgcaagggcccggagtcgctcaaggggacgcagacactggcgatgctgaagctgccgtgctactgctgcgcggcggggtgcaagaacaacgtcgcccacccgagggcgcggccgctcaaggacttccgcaccctgcagacgcactacaagcgcaagcacggcgccaagcccttccgctgccgccgctgcgccaagcccttcgccgtcaagggcgactggcgcacgcacgagaagaactgcggcaagcgctggttctgcgcctgcggctccgacttcaagcacaagcgctccctcaacgaccacgtccgctccttcggtgcccaccacctccccgtcgccgaatccgccgccgccgccgccaccacccccgccgacaaagaccgcatcataagcttccaacggtgagaaatatcgatcggtcgaggtcgacgatgatcgatcatgatgtgtaggctgcagttacctggttcgttactaagtctatgtatacgtgagcactgctgctcgcgtatatatctacttagtaagttaaccatgcaattgtccagcatatagacaacaagttaatcaaactatagctactagctagagagtaatgtatgctgatatgtgcatgcatccgtggggatttaggaggaaatttaagcagactattagcacacaataattaaggtggctttcagccggtgccgatcgaaagctgtgagcctgtgaagtagatgaattttcttctgccagagtgtgagctgtttagtgaggctatgtccccagctttgtatcggagaaaatttctcagcttcacaggctaattaaacaggtaatttggaacctattttaatttacatgcatttattaaacgattattgatcaatgagagagctgattaattcttaacttatatcgatcggatactgcttaatttaccatcatatatctgtgtagttcttgattaattacccttttcccccatgaagtaatcttttttttattaattatgcatgcatgcactacaattttttttatcatcagtatatatataattttgttttcttgaaatctgcctgtttcaaaatttatagaagagcaagtagaatcatggagttctgataagatgactgaaataatgctatatgttgaagtcatttctgtggttttccatgcatgatcgaaattcttgggtcgatcatacatctgcaggggaattctccttttgataggagaaatagtgaataattatgttcatatatccatgtgagaccgatatataatggttcaagttacataccagtactgattattagcaactttaaataagctcccacattaatcggagaattagcgaataaattggctataaatccaagtgggagcaagataatatatatataatggctaagattaaaataagagcaagttgttagttagatttttcataaattttaaatcatgacaatactatagtgaaggctccaaaccatgtataactttgtaatatcaactcctaatccccaaactgttaaatgaaaacctaaaattaagactccatgggaatcgcaaatttttatttattaattgaaaaactttaaattattaaattaaaaaactttaaattattaaattaagaaaatataaagaaactgaaatgttattaggtagattctacatgatctttttgtaagatctatgtttcaatttaacctatgaccattaattaagttagattattttatttttatgtaaatacaataaagttcacgtataacctataccggaatttcgatggagattattagaccgttttggaatgatacacatgttacgaaccagttgtaaataaaccatgcattaggcagaaaattttgccagttagcaatacccatgtataaaattgtccgagtacaattttttctttactgagaatagagtgtttatattaaccctgatggactaaaaaggttaatttagattgtcacccttagcaactgcttcatgccacctgcagctagcatatgacaaccccggggaatgatttttgcaggtaggagtaactgttcgtctgcaatctaaagaaaatcaattacgtagtactccctccgtcctatataatataaaggattctgaaataatgtgacatatatattctagtactataaatttggacagagagtattaggatgtgtcacattcttcatatataatatcttatattttgggatagaggaaatagtggatacgagtggttgctagctctgtttaatctctaaagcaactcctgctaattgccacaggcgatatatgtaggtttgcagttagacacctaactaatttcgactcctacgactctactagttgatcacttgagtcaggctagctataggatagcatgcgacgtggaggatgctatgcaaattttggcatgggttgtgtttagatttaaactttggatccaaacttttaactttttctattatatcaatctatcatacacataacttttcagtcaaatcgtaccaattttaacctaaacttttaattttgaaagaaattaaacatagccctggtatgtggtgcaccgtgcacgccttatatggcgtttgctagcgccatagccgtagctagcaaaaatttcaacattcttcgcggaggcatatgtggcgaagtcaaacttagaaaacgacggattcacgcgcagctagatactagctagccaccgatcgcgtcatcagacacggccaaaaatcaaaaggctaatctggactcaagtgcggcgcggtgcacctagattaagcgtaaacgcgcgcggagacacccaccaacccggactaattattatgagggctgctaccccacgggattccgttgcttctagcagtcacgggataactaaaaatcccgagagatttaataagcaccatcaatttcgtggggaagcccacactatcctgcgattccaccttatccaatcctccctggtaccttgggtaaggtaccgaggtggtacctagtacactgatatcagctggtaccccggtatcgactaatacctggtacctgggtatcgattgatacctggtaccatgggtattgagctgatacctaggtatcaggccttggtacctgggtatcgactgatacctggtaccctgggtatcgagctgatacctaggtatcaggccttggtacctgggtatcagtgtaatatccaaagagagaggaggaggaggagtcgcgggtcagggaggttgagcagcggggcggcgacggaggaagaggaagaggaggcaatatatctggtgcctaccttgtgccattccgtcgctcgtcgtcgtgcctcgctccaaaccgccgaacccgtggctccatcgacgccacctagagcagctcctcgtcgctcatgttgtgccaagcgctcgcccccggtggccgcgtcccccactccctgaccgtaggaggcgccagcgccgccgaggaggagcagggcggcagcggcgaggaagccaatgacaagaacgacaaagaggaggagcggcttgaggagcttgatggggaggcttctcggctgtcgtcgcccgtggtggtcgggagccccgctggctgtcgtccaggtcgtccgcgggggttggtggtgacgacaccgtcgtcgtcgtcgccatcgttgccaccgccgtcgtcgccgtcgccgtctccgtgctcatgggtggcagtcacagagagagagatcgagtggaggggaagagacagagacagagagagagagagcgagtggaggggaagcgacactgagagaggggaagaggagataaggcagtactactatcccgtctctacgggatgccgttaggtagtttttttgaattattatggcaagaatatatatattggctttatcgagctaagagcccaggtgctttccctcgtccacatttctaaaggcttctgcgtgggggtaattaacgacgacgtaataacgagctttttatttttggatcgaccagttagtccaactttgtggctcccctggaccgcaaccagctggtcacacacacgcagcgatgtggagcagcttgtatcgtctccagccttcacttggagtctttgtgtgagtgcgatggtaagcacggaaaaggaattttggatcgtgtaattaaatggtttctgtgtagtatctgtgttagtgcgctaccttgaccacgtgaaaacaatgtgatcgagtaaaactactagtccatgtgcatgcatgtttaccagagtctcatcatgtatacgcccgggcagtatgttagcaaaatgaaaaaggaaatggcttaatatatatacttacgccgtatgcataacactcacgcatgatcgatgtacagtaatcctccatgctgtatctactgcctcgtcatgggtctgaacatgtaccgacgacgacgatgggtcgggggaatgtcaaaaaggggaagcgcgcgttggcaaaggtatcgtgaactcgcgatcggtcgatcgagcaacaggcggccggggccgggggaaggtgaccggtggtccggtgcaacgcatatgcctcccctcgcgttaattctttcctgcctcgcgcatatataccgtacgtgctacatggggagaatataagggcctgtttagttgtggtgaaataaaacttttttgtgtcacatcgggtgtttgaccggatgtcaaaagaggttttcggatacaaatgaaaaaaaaactaatttcataactcgcctgaaaaccgcgagacgaatcttttgagcctaattaaatcgtcattagcatatgtgggttaatgtaacacttatggctaatcatagactaattagactcaaaagattcgtctcgtgattttaatgtagattgttcaattaatttttttatctatatttaatatgctccacacatatgtgaagagattcgatgtgatgtttttgtgaaaagtttttgggactaaacagagccttaagaagaacccgctgcgcaccaccaaagtggtacagtgatcaatcgatttaacccattaagcattattaacccaccacgagcgcttgtcggttaaataatcggccgcccatgaatgatccccatttcggccgcccggccgaccgcgcgccggccaatcggaccaaggaaatcacgcgtgcacgtggcaccagcagccacagcggcgcgagatgcgggtacgatatacgtacgcatgcgtgaccgcgcgacgactgatgggaacgcgtagtaacgtacagtgcggctggggctaattttagctagctagctctgacgtgcggttcacttgtttgtttgcgattgtgtcccgcaagcgatatgtatagtgctcgatcgagcgaattgattaaggccaggtgtacacgagatcctagctacaagtagtaatttggattttggattttaatcatgcgtagcaaattagggacgaaatctctctctcgacagcgcatgcagcagagcagcagcagttatacaaggatgcatgttcacatggacaaacgcggtttaccgtacgttgcatgtacacgtgttggatctgatcaacgtcatggtcacacgtaggaaacgaataaccgatcggtgctatatatacgtgcagcagcggggccatatatacgtgcacgatgtgcactgacatatgcatgtgtgaatatgtgatcagatttcgtgcgtactgctagttgcatatttcatctcgttcacggtcaccgagtctcaggggatcatgattatagacgccggatgagaacgactttaaccagaagactattgagacaagggccaaaagcgagtaggggtctcgttttgtttcacacattgtcaggagctctctgcagacatgttgtccaaaatctttcatgcaccttccaatctccttttcaacatcggcaagtttaaggccatagttcgattctcatgcattttcctgtctctacattctgctatttgcggcagcaaagccaaataatgcatcatgcatgcatatttctacccatgctgtacttgccctgttgcccaacgggacaatatattgctcgaaccaactaatcacgtacaaataccgattaattaaccataatattcatcataatcagcaatgttttatgcaaagcaaaacccctctaccttggggacgatataggtgcagatgctggtgcaatctcaagatgacaagttcatttttaaaaccgttctaatctgcatgctctcgtcacaatacgtactagtataaaattccagacaagataaacttagcaatccaatgaagattgcagctgccgaccggtagaaccaaattatcctttacagtaaaataatccacaaacataatcagtgttatcctggctgagtatggtttgggatatagacgtatgtgatttctgttgagattatgggcatataatgatttaatttattccataaataaatcatgacattacatatgaaaactagcatgaacgcatcattagatctacacatgtaaactacgcagaataacatgaacagatcaaatatgcgtaacatattgaacacgtaccgaggtgacgaaaagaccggctgcttggtcgaaacttttcgcaggtgtctacgaaggcacgaaacacgcgagcgaagaggaaggcgagccgtcgcgaacgaacagggagcagtcgcgcgaagcgcttcccaaaaaccttattgccgccttctcccggtgcaggacgtcaaaggcagaggttccggagacctgctctcccgatcgctggtgcacgccggcgagcgggatggagtagtctacgagcgacggcgcagtacagagtaggaggcaaaccctagattgattttcgcatatattgcgtgaagacggcgggtcggtttatatagagaagggtcgcttgatcagggcgcccgcacgatctctactgcgcgtaaccgaaccggataagtcgcgcgtaacttatcagcaaaacaaaactgcaaaaggaggctgcatctgcgcaagggtgaggagccaatttttcggaccattcgacgcgtacgtcgtgcacgcgcgccgcccgccctgccgccctgccaggcgaggcgagcgagtgcgcgcgtgtgtttcccctcttctctccaccacacatgcttcaagtggctaggagggcatcctcccttttaaggaggtccccatctcctagaataagcaaggtggtactaaactccacatgcatgtcatcccatgaggtgggcttttgtgattttccaaagaattaatcttcgagtgggctaaggcccattcattaattccaacaatttcatagcatgcccgcggcaggtatgcaaggaaatgttgagcaaaacaatattagacaatgtgcgacaatcacatcaggcagattactgaatttgacgacctgttaatttattttgagcctgcatgcgcccatagctcgaccactagatgcactcagaaaagcggtcctcaaaatctcaagaaaggaataaagctgtgtcggtttgacatctaatttggtcctcgtacagcttacctgacggaaataatctacgccgtccttctcaaaataatataagtatttttagacttcagcataatttttgagatactactttaaccaataatatttataaaattaagatattttaaataaaaaaagttgcatgttagaatagtttgtttaataataaatctagtgacatcaattttacatgattgatttttttttttgttattaatagccaacgtttaaagtatttgacttggcactattctaaaaatgcttatattttgggacaaggagtacttatctgttttaatatataagaaaatttgattgaatgcgatatattctaatactacgaatgtagacatgctccttgcattgtctaaattcatagtactgaagatgtgtcttatctaaccaaaatatcttatatttggggtggagggagtagaagaactgatgcctacttccatctatccacaataggtttatcttgcaccctcttatttatcctaaaataaattcatttagcaatcattcaatcaaagtttataaaattaaagaacagttatcttagaactaaataaagtgaataattatactagaatatgataaagcggtagtgtattttagttgttttatattttattagtatgtatgagataaataaagaataaatttattttatgatatatggagtatatatttcgttttcagtatcagttgagcttattacaacatcacttttacacagacttgctaggaccctaggggtatataactttgatataagacagatgatactgtcaatttatgctgcatgtgccctctgtcgacgagtgatactcgcggaccagaagaatagggtattggggtacgttagaacaggatctacgtagtacgacatcaaaacagacaaaagacaatgattacactggttcaagccccttatcagataatagtcctagtccagtttatatgggattgatgatgatgagaacagattacaaagagagtaaccgaacagacaataccgatgagatcgtagtcgagggactcgacaagatctcccggcgagttggctccgtggactccggcttcgtaaactttggtgggtgtgttggcgatgaggtgcgatgccttttgcccctccctaggggtcccttttataccgtgggataccttgacccttaagtaaaacttggagatatgtaaaccgacacgatatactatagattttaccctttccgagtaggacttttgcaattccttaacttcgtggagatattttccctaatttgaggtgaattcctaacggtgtatacagaaaccaaccgtatacgtgaaggtataccttatcggtatattccataagtcgtaggatagagggtatgccttatctgtaaccctgacaccctccatcccaaaacaaactaatcttatactagaatgtgatatatcttagtacaaagtataacaaattgaaacatattttatatcagatttattgtattaggatgttgatttattttgagatagagcgatggagtacttaactttctcctgtcaaccaccgtgttgaaggtagtactatacagtattctttcactgatcagtcaaagtctccattaaaaacgacaatacatagctgtctgaatgcattgggttatctgtactttatgtaattgactgcagaggaggtggttccgagttccgaccttccggcgtagtggcgacaaacaatggacttccagtgagcttgcatcagaacatagtcacgctggcgaagcacgcacaaactcgttcgatagctgcacgtacgtctcacactgtcagacacacacacacacacactttcaatctttcatggctctgattacattcaaacagtcaaactctgcctttggacaagtagagtcttcaggatggaccatattaaaaagttaatcaacgaagaaaaaatcgtatgcaactatgcattgaacaggaaaaatacaatagatgacagcaggtcaatggtagtaactgggtgaacatatgtgtaggagttcaacttggttgaaccctgtaattttttttctctttctgagaattttcggttgccgtctactcttctgagttatgggtggtaaatatcacaatcagccatttagctcccaagtcaaattaaccacctaccacaaaataaccactactggtatacactcgaaacagcaccttaactggttgacactgagtctgtgacatttgtctgtctctttcattctctgaataataaaataagctcggcgtccatggcatcatgacatgctcagctcagttgctacgagtcactagtcacactgctggctctaaggttgggttctagatttattgattttgtctctgtactcactgattctggtttagcccggttgttggagggaggctgtaattctacactcggacctttactgggctgtgttgtcatcgtttcaataggctgaatcttcaccggactctttttaggaactgaagcccatcttcatactactccaatagtccaatctgctcagctgcggagttcagacttcagactacagccataaactggcaatctgtacctgacatacgcactccaatgtcacagcagcactagcagcaacaaagcatgatgcaccacgaagccggcaaggactggtggaaggctgggagcatcagtgagctccaaaacatgactaggctgtcaaatcactttattaggatacaccgattagtggcagaagttgcaaaagttccttgtcaggcaagcgataagcagcttttaggtactgattcgagtattcttttaatgctaactgcagtagcacgggcgcgtcctttgaatcaatcctggtaatagtagtaggttcatggtgtaaaacacatatggctgtgttcgctatgggttgttcccagtagcacggaaaatagagcgatctattagcacgtgatcaattaagtattagctaattttttaaaaaaaaatggattaatttgatttttttaagcaactttcgtataaaaactttttaaaaaaactcaccgtttagcagtttgaaaagcgtgcgtgcagaaaacgaggaatataggttgggaaaatggacgcccgtacacagccatatgcgtggtcgtcgttccaagtttcaaccaaagtacatagtggtaaagaacaggtaataggaccatctatctactcagaccccagtacagtggtaatattactcatttactctattgattgtactgtagtaacagctaacaagtggtctcacatgtggactatacatgtactacttgcatctcaaatgctcaccatggagctggaagaaactcaatatgacatgaatcaaagtctcaaagggtgtctactgtggcgtgcctaatctaggtataggcatgtaacaagttgaggcatgcaatcaaacacatatttcatactgagatcaaaacacaagattcagattgtaatgtatataggcaaatcctcctactcctttcgaatggttatatgaaaaggaaactttcaagtgatatttgtcgaaaattaagcaatacaagcaaagagcatccggatcatcctgaccaagtgcaaccattaacaatttagcatatgattcatcgaaatggatagccatttcaaagtaggagtatactatatcaggatcattttgtgtatggatcccgagttcataaaagaacctccccatttcaagagagtagcccctcagtatcagtacacgctagcacttcgatcactataatagggacgattatttgagtcaatcactaggcgggatcggaaagatacaaacagaagagtccttaagacaaggataaatgtcaaaagtgatataaagttgttataatttgtagtacttagtacttttagtttaaaataagctccagcacactcaatatcatgccgggagtttccttaaacttaataaaccaccgcgtgatgtatagcggatcagcagatgtgtattccctccgttctataaaaaaaaaccaaactagtaccggatgtgacacattctaatacaacgaatctggatctagaatatgttacatcctgtactaaattcgaaaaccaatctagtaccggatgtgacacatcctagtacaacgaatctggatctagaatatattacatccaatactaaattcgtttttttcatgacggagggagtaacacggtggaccaaatcatcaatcgcttactccgtatttcacacattgatctggattaaataacaacggtgaagtggttactcccataatgtatcctcatcatgatgtgtgaaggtacatgaggtgcggaactggcgcatccacgaacatggtggattcacttcaaagaaacaaggagaatattgttgtcagatcaaatcatggccggccatgagatcgtttagttacagtgggaaaacatcgagtatactagggaggttttgggatttagggactaaactttagtccctctcacaaaagtataagtccctccctagagacttacggtatgtttttgagatctctcccaaacatcccctataaagtacacaaatacaaatcctctagattcactgttaagtttgtagtgttgctccctgaaatatcaaagcatctttttctcagcacaggtaatacattaaagtcatagtagtgcgttcaccgcaaagaatttataaaaatgaaatgaacatagtactacaaaacataggagtggcaactggcaacacatacatgcacaaaccaacctagtgcaaagcttcgagccttcggttagcaatcggattagagaggtagaagaagtgcattggcagggaaggacttgcacaagttattttccgaggtgaaatgagcagtcaaattggaatttggaaggtacacagatgacacaatgcaaagctaaagttgtatttgccatttgggaaacatggagagcaaagttgcagcaaggctgtatagaagatgtacaattgattcttcatgaaattacgaagaaagatcagtctaaattacagttacagtgccaaaagcggaagaaatcgtcctcgtatgctaatggagggatcctaatgcttagtacacacctccaatcccaccatcatatcaaaatttcgctactatttcaattcgtctatcaatctaatcacaaaaaataacccaccttacgaagcaacattttacactgagccactaatacaacacaatcctccaccggaaaaaagtggcataacgtcgagcaccttgcgcgcacgcgctctaatggtagaacacgacgggcgggacggcgataccggcgtcgttgaggaaggggactacctccggccggtcggcgaggtcgcggtagaaggcgtactccgccttgtagtcgtggaggtccagctccgccttctggttgctgtggtaatggtgcttcgcgtcggccgccttcccgaacccgaacacgctcaccctgtcgcacactcccacggcgaccatgatggcctgcatccccgacgagtagtggaacatggccgcgtcgcgcgtgctgctccactcctcggccgcgcgccccgtctcggcgacgaagcggcggagcgagtagtacttgacgatgcgcgcgcagaggacgtcgaggcgtggatcggtgacggagatggatgcggcgtggagggagcgggaggaggcgttgcaggaggcgacgtcgaggaagtgcgcggcctggcagatgtagagcaggatggggacgccgtcgccgtaggggtggcagaagcagttgggacggcgggcgcagagatggaggacgttgctgttgatgaaggagaggttggtcttggcgccgacgttggcggcgaagccggagatgcgggcgttgttgaggcggaagacggcggcgtgggagtcgatgagggcgccgtggctggcgccgaggaggatgccgctgttgcccacgacggcgcaggaggggatgcggccggggagggagaggagggaagggagattgcggaggacgccggggtcgtgccggcggaggcggtgccaggagcggagcgcgcggcggagggatgggtcgaggtggagctcctggcgcgggagcgggtggaggagggggtcgtggtcgtgatccgggtggtggccgcgccggtagacggggaactggtggtggcggaggtgaaggtggagcctgtcgccccggaggcgccacgcgcgggcgcgcgcggacgacgccgggaggcggccctcgaggaggtcgtccacgtcgcggcgcagcggcgcctccgatggatcggccgcggcaaggcggaggagcgtggcgttgaggcgcgcgggatcaagcggcggcagcggcgcgagcacgggagccgggcccaccgacctgcgcaacacggaggggaacgaggccgcggcgcacagcacgacgaagaggagcaccgcgaacgggcgccgcagcggccgcttcatcgccgccgccgccgccgcagcatccgccgccgcgggctaagtgggtcggggccgccgcatggggggcggcgcatcagggagagagacacagggagggttgtgttccgttccgtgccgtgcgagctgagctccgagtgccgcgcggtgtggggcgacgagttttttatcggacgcgatgcgttccggttcgcgaggtggtactaaaatagggagcgtgatatgtttgcagtttgcggttggttggaccttgggttcgggggaacgggggatccaatgtgctctggttgggttcgtgcattggagggagtatataatgattctctgcagggaacagggctgcgggcgtgggtcccacaacaagcctgtacgcatgacaggtggggccgtcggtatgagttgctaagcttggcgtggccacgtggtgtccagcgtagcgttcgatgtgtgtgattcatgcagaaacgcaatgaactctgtacctcgcgccacatgacgctttttatgattgttatacggcctcctcggagtattaacaacctgcatccagtgttttacgtgtgcaagctacacgttcaaaaaaactagtactactagtagtagcgtatgttttcggcgtgtaagctatgacaaaaacagagaaatttcgttgtgttttacgtgtctgtatagtagaatttaaactcgtcgcaatcgattcattgaattctttccaactcagccagcctaggccggtagacttggggtcaactttggccggaaccaatccgcctcggttaatccacgccctgatgttgccgcccccagccgtcctggtcttggtcttgtcttgtttatcaaacatcagaggttcagaagcgttcaaccctctcaggccgtacctttgttaatcttatattagcgataataaccaccgctgtaggttacagagatcggcgcaggtggatggatagatatgctcctattctattacaacaaactcaatctagccttatctaatcatatctatccatctaaccatgccgtgtgcatcacacaaatacatatcacatgtttaacaccctccctcaatcataactttcctaagttaagattgtacttaaaattctccaactgtcgaactgacaaagcctttgtaaaaccatctgcaacttgatctcctgtaggcacaaaatcaatttctaacaatttccttgaaactctttctcgaacaaaatgataatcaacctctatgtgtttagttctggcatgaaacacaggattagcagaaagatacttagctcctaaattatcacaccacaactttgccatagatggactctcaacttgcaattctgccaataaagtctgtacccacataatctctgctgtagcattagccaaagctttatattctgactctgtactagatctagaaacagtagcttgtttccgtgcactccatgacacaagattatctcctaagaatactgcaaaacctcctgtacatctcctgtcatctagggcaaccagcccaatctgcatctgaacaagcacttactaacatag

SEQ ID NO: 8546 - DNA, 2888 bp, Oryza sativa
cgggtgggccccacccgtcagcgagggtggcgggcgggcccgcccgtcagcggcgcgcgcgcgggaagaggccggatgggccgcggggagaggagagggagggggagggagatgggccgagccggcccaagagggagagggagggaaaggggactttttagagcttttctttttataaaatcattttaactttgtttatttcttaataattattatttgtgctctgaaaattccactaaaatttatttacgcattttaggcttttaggaaatatacaaaaatcctccaagccttatttgacttttaactttgcacattttaattgttggaggctttcacacggattttaattattctaggcataatttagaggatgtattttagagtcgttttgggacgtgacaatatgcaaaccaatttctgctgggatttgatagctgtatatggagcagcccaaaatgcacacaaggataggtttttgactgaactggctaacattattcagaaacaaatgaaacctttagtcatgggtggtgattttaatattattagaaaggaaagtgataaaaacaaagctggagggtataataggtggagtttcatttttaatgctgtcatagagcaagctaatttgagagaaatctttctaggtgggagaaagtttacttggtgtaacaatcaagagaatcccactttagaaaaattggacagaatttttgtgaacacagattgggaaaaggaatatcccctcacaatggcaaaaactttaactagaagcatttcagatcataatcctttgcgcatagatactggagtcttaaagattactcataagagcttcaaatttgaactcagttggtttcttagagaagatttaaaagaaattgtggagagtgtttggaaaattaattattatggatctagtattgagagatggcagaaaagatttagagctttgaggaaaaaacttaatggttggaataataattgggaggggagatataggagggaaaaagaaagcattcttgagaaaattgaaaatttggatgcgaaggttgaaagatgtgggatgagcaaggaagatagagaagaaaggaaggagttggaggataaactgaattttgtgattagagaagaaaagattaaatggtttcaaaggagtaaagaaaatgagttgttagagggagattgtaatacaaaatactaccatgccaaggccaatgggagaaaaaggaaaagctatattcattccttaactcaggaggaaggtgaaatagaagggcaagagaagttgttaacctatattactagcttttacaaagatttgtttggtcatcctaaacagaacacactttttctagatatgagaggggttacaacaataatggaagaacacaaggtgatgttgaccaaacctttcagtgaggaagaggtcagaatagttgttttcgagcttaagaaaaacaaagctccaggcccagacggttttattggtgagttttatactcagttttgggatctgatcaagggagatcttctaaaattggtgaatgactatcacaaagggttggttgacattgatagattaaattttggtgttattaccttgattccgaaaattaaggatgcagctcaaattcaaaaatataggcctatttgtctcctgaatgtcagttttaagattataaccaaagtgctcatgaataggattacagaaattatgacatatatcatctcaaaaaatcagacagcgtttctgaaaaatagattcataatggaaggtgtgctgatcctgcatgaaattcttaactccttacatcagaaaaaacaaagtggtgtcctttttaaggtggattttgaaaaagcatacgacaaagttgattgggtctttatttatagaatgttgaaagcaaaagagtttcctgatcaatggtgtgattgggtaatgaaagtgataatgggtggtaaggttgctgtccaagtaaatgatcaagtggggccttattttaagacacataaaggtttgaggcagggagatcctctatcccctcttctattcaatttggcagcagaagcactaactttactagtgcaaagagctgaagataatctgttgatagaaggattgggggaaaatgataacaacaaagtggtcattttacaatacgctgatgatactatatttcttcttcctgataatgagacatatgcaaaaaatctgaaatacatcttatgtttgtttgagcaattatctggtctcaaaatcaacttcaataaaagtgaggtgttctgcattggtgaggttgctgataaggcagaggttttcagtcagatttttgcttgtagtgtgggtgttttgcctatgaagtatttggggatcccaatagatcagaagcgcattacaaaaaaagattggagaaatgctgaaaacaaaatggaaagcaagctgggatgctggcaagggaaacttcagtcaatagggggaagattaattttgatcaattctagtttaagcagtgttcccatgtatatgatctcctttttcaagttacccaaaggagtgaaagaaaaaatggacttcttcaggaggaggtttttgtggcaggaggaccaaggcatcagaaaatatcatttagtgcaatggcccattatttgttcacctagagatcaaggaggtttaggtgttctggacctggacattatgaataaggccttgttggggaaatggatttggaatttggaaaacaaagaaggttggtggcaggagattcttagggggaaatatttgaaaaataaaactatgtctgaggtaaactttaaacagggtaactctcatttctggcatgggttgatggaagtaaatgatgattttttttaaattttgttca

SEQ ID NO: 8547 - DNA, 12739 bp, Oryza sativa
ccgggggttctccccggcaccaccccgttgaatccacatgtctcttgtcatcatggttcccccgattagctagttactcagccaggggtgtcccattctacccatgtggtcgcacttgccttatgttcggatgaaattccaaggaaacggtccttaagtgcaagagcgataaaccgtactcccggtacgtcccctggtctgcgattttggaaattcattttagttcgcaagcaccgacctaggtgtcgggttttccaagtcttttgtaaaaccccaagttttacccatcgttggatgttttaaatttgaggggaggtgctccgatgcgcgtgcctgtaggcccgtgcatcgaagcacaacagttgacaaaggtggtttaagtgttcaataattcaaggagggtaattgcagcaattaggattggggccggcaggctatctcgcaagcgcggccgaaatacttgtgttaaacttattcatgcaatatttgcggaaaagaagtacttagatttaaattataggtgcaagatgatcaaaggtgacttgccttgctcgagagcttgatccttgaaatcctcgcactgcgggtcttcgggctccgaaactacacgcgaaacgggacaactcaacaaatggcgaaaataaagccctattattgacctctaaacgtgccattaaatagatctcaagatttgagaaattttggaagttgaacggagtcaaacggacatacggttgagaagatattgaatttctaagattattggatttttggtctaaaggaaaaaggatttaattaaaccctttcgaaaaagaaaagaaagagggaggggaaacagacttccctcgggcggctagggcgcggcccgagagaaaggggcggctcggccgagcataatgggccggccggcctgagaaggcggcccaaggcacgcgcgggaggggaggagagagggagccggagggtcgggtccatctcgtgtggtcctgagtgggacctgcttgtcggcggctcggctcaccgtgaggaggagcacgtgacgcggcgctagggtttggagcggggcgcggtgcacgcgcgcggctcgcggtgggtgcggatgcggcgggcccacgcgcagcctcacggctcgcggtggaccgcgcgtgcgagcggggcagaggggagcggcggaccggggtcggcttgacccggtcttggccgagctggcgccgacgtggcacctatgtggctgccacacgggccggcggaaggttgaagaaggcgccggccggaacggacggcggacggcggctgcgaacggcggggcgaaccacggcgatacaggcgaaatcgagcacaccgggtggttgcacgagatgaggggagacgagccaacggctcggattcgccggagggagttcgacggcggcggattgcggcggcggcaaccggctgcgagaaaagaaggaaacggcaacgacgcgactagggttcaattcctccggactagagcatctacgcggccaccggtgtccgtttctaccgtcggattagacggagacactacgagagaggccggcgacgtgcgggcgctacgaagcacgggcggcgacggcggcgagcacacagcgagcggcggcagcagtcagggcggcgccagctagctacggggaggctttacaagcttctaccgaaagctaaggggaagaggaggaacgaggagggggaacggggaggaggcactaccgtgcggggtgaaggggcgcagtgacgatggccgacggcgcggggcgtgatcgctctggcctcgggccggggaagaggaaggagagggtgcgcccggagtccacgtcacgcgtcctcgctcgtgccggctcctccgacacgcgcgacgacgaacggcgacggcgaacagggcagggcgcggcaatggcgagggcgaaaatgggaaagattggtttggggaggggctcgggtttatagggcggcaatgtcggttcggaaaccgaccttgggcggcactagggggcgagggaacttcgaggggatgggataggcttcacgggcgcggtcaaacggcgtggaggacgggctggcgcggcgcggccgctcctctgccctggcgctagctccgagcggagggagagcagaggtcgggccgagagaggaaagcgggaaacggagggggagaaagaaggctcgcgctatgctggtttggggaggaagagggatgggagcgggaggcgctgcctccgatttttggacggatgcaggcggcgcggctcggggacgcgcgctggctcgcagggcagggcgcggcgcaggcggcgcagcgcggcagggcgcggggccagacggcgcaggcacgggcagcaagctgctgacgacggcgacgactgcgcgggcgagcgcgcgcgcgaggtaacggcacgcggggagcttgccggggatggagcgggcagagagagcgggagaacgagagagagagggagagctcggctcggcgtcggctcacgcgcatgcgcacatgcacgcggcgcacgggcaaagcgaggggagagctgggggagagagagagatgggccgaggaaatcggcccaccgaacctgagggaggcaaaatagacttttgcggaggaatttgatttgggaaggatttggattcgggatttgaatttgacgatagatcgggaattcgagattagggattggcacggagactgacaacaagaaaaaaaaacagatttcgcaattagggttcttagaatttaaatttttccgctaggcgccacgatggaacgggcgctacaagttaagagtccgtataaaaatacaatttacaaataactaaaatttgagattaagaaaaacatgggaagaagagtcaatataggaatacaatttagaagtaactgaaattcgaaattaaaaatgaaataatattgaaagatgagtttagagtccacgtagaaatacaattagaaataataaaaattcagaaataaaataaataatattgaaagaagagcctagagtctatatagaaatacaatttactgaaaattcggaatttaaaaaaagaaatattaaaagacgagtctagagtccatataggaatatatataatttacaaataactaaaatttaatattaaaaattattaataactaacacgtatataaaatacaatatgaatattacaagttattgcaaaatttaaaattatgttgttattttaatatatttgaataatatattgaaaaaacatatatgctattatatgagagaaaatataatgatgctagccgcacaatctgcgcgtgctaccatgctagttgaagagaaaattaagtgcaagccgcagttggtgcggaaaaaaagagcctcttattcgtctgcacaattacaggttgcaaattggattgctgctatgcacttgtattacagtattcactccactggtaaacacagcaaactctcatctctctccatgacgccgcaaagcatccgtgccaataggacgggtccctcgggcaaacgcaactggcaaacccgtagggccgcgagcagcgaactcgatcgatcacaccagctttagcgcggctcccgccgtttccggccaagtgccccgctcgccggatttccagaacgggaagcagcagcacgtacgccgcggatcaccccaatattactcaccggctcaccgcgagacgagcaaccacaagaagaaaaaatctgtactactagcgcgtagtagtgtagtgtagtgtagcggcgtggtcggccaagcacgtgcagggtggagaagtgcgtcttgttcttggagtgtggtaaaaaaatatcctttgcttctttttgtgtgtgttgagttttgttgggggagggaggtgttggatcgcggaggcatggctcatgcacgcgcatcagtcgagggggtagcatgtgtcatcgccgcccgtgttccagaggaagtgcgcgtaggctgccgcgtggtgcgagttgctgggttcggcggcgatggcctcctggtacgtctcctccgcggccgcgaggtcattgcgcgctttccacaggaaagtcgcgtaccgacccatcgcctccgcgtccgccggctccgcgcgcaccgcccgcttgaagtagtgctccgccctgcatccgcgcaaaaccaccacctcggtcagcgcccgtaaaaccccaagaggccccggcggccatttcgtcgaacggctggcgacgtggcgcgcagcaactcaccgatcgtggtcgcgctgcaccgtgtacaggaactgggcaaagttggacagcagcagcgagttgtctggctcctcggacacggctcgctcgtaccgctcctccgtcgccgcgaactccgccgtgtcctccgtgtccagcttggcctccaccggcgccacgagctgccccagtgtgtccgggtccatcagcgcctcggcgcgaacgctcgcctgcatcctggtagcctcatcggctatccttttccagatgaccagttcgtcctctgtctcctccacggccattgcttctgacacgggcacggcctcctccgcgccagctcccggcgtaccctgtgacgcatcctgcggcaacaccgcgccgctttgccgatttgaccactcgtccgagcgaccgtcgccggttgccccggcgaccggccgcaccttgccgccgccgccgctgttgccacccaccgaggccgttcggccgatggacaacgtcttgagcgaggcatggtcgaaccgctggtgggaatgagactgctccgcgtgctgggtgtcgaccatcgccacagtcgccgcggggggctggggaggcgggagcgtggcggcggccgcgacgctgtcgcccatggagtagacggtgaagttggcgagcagaagcatcacggagaccatgagggcgggggtgccggagaagatgtgctggaagagccacacgaaggaggcgtgcatctcggcgtggacgcgcgcgagcacgcgctgcaggtcctcgtagaagagcgcctgccgcatctgcagcgtgaagctctgcagctcccggatgatgagcaccatcgacgagaacgcgcgccccaccgcgccgcgcgcggactcgccggcgcagtcgatcagccgctcgtcccaccggccctgctgctgctgctgctgcttcttccgcttgagcatccgcagcgacagcggcaaccccacgctgctcgcgctccgctccacgctcgccggccacccgcagccagcggcgccagggtgcagccccaccgccagctcctgaatcctccgcaagaactcctcgtcgtccccgccgtcgctcccgatgctgtcaatgctagcgctgagagcgcgccttgccatctggtgcccgccggcgcgccggcgggtcataccgacgctccagctagccagcgacgactgccctctcgacagcctgacacctccaagaacgccatgccgccgcgacgtcgtcgcggcggcagacgacgaaggcgacagcgacgacgacgacgacgtcgtgacggcgcatggcgacgacgtcacggccgcgacctggatgcccatgggtcgcagcgaccaccctcccggccacccaccggagcgacggttgggaaatggcccacacagctccacaaccgtgggaggctggctaaatgcgagggggtggcaaaggaagaggaagaggaagagggggagggggaaacgagcggtggccttatttcaggatccgggaggcgtgtcctggtcaaccacccccacgcagctcgtgaaggatctagcactcctgctactgccgctaccggtgacaccagtttcacgaaacaaaatagaaacgatacggtacgcccctccttaatataggcttgagccaaaattaggcgctcacacactcgagatacgaatggcaagcagtatatactttggaggggggggggagagaaaaaaaaatcaagaacaaaaatatgagatggtgttcagtagcgagtgaagagggaagaagagtgatgggagaagacgaagagcgtgtagggaggccttgcctatttatttcgtgcgtgccacccggatgcattgcatgagtgtgcggccgaagaatccgtagaccgcctcactctcctgtacggctcccctctctcatcatcaacgtgtgtgctgggtatggccaccccgaatttctgtgacttttttcttattgtctcctacttattattcataagtgtgcaaaaaagccaaatatactttccagaaagacatctcagaattattttaggaaaaaacttgtttatttgggccattccttttatattagaaaattcaagaaacctttaaccgctatacattgccattgtacaataaaatttatttcccttcagaagaaaatgcaatacttacttttgacatttaggctttctacagtctttaatatacgactttaaccatagttttttattataataaatctataatagtctaataagtttatgaaattatgaatgtatcgtgctttagcattcaagttcgttttcaaaggaggatggcgtatcataatatctttggttttgtcaaattatagcttaggctttggtttaatagttatgcatgttgaaaatccggtatattctgtactttcaagtactatttttattttttggaaccaaagcatagaattccatttcaaggaaggatgatgcaccgtagtgcctctggttttctcaagccttgctttttggcctatgctttgatggttgtgcatgctaaaaggctagcacgtttcatatttttcaagaaaaatctgtacgtgctattttaaaaatatttttaaactaagcatttaaaaatttatttatggataactaaaagaactgctactgcatattgtatccaaaacatcaatatagccatttaagttgctgatcgtttgacacgaagtacataatcggctaaagcttgaccagagcagctagtacagtgtacagtatgtagtaaagaacgacatttcagctcatttcacgtggtttaacttgaaagaacaagaaaaaaaaaagagaccagaagcaactctcaaacgtgtccacctctgttcacgtgccaacagctgcggcggtggcgctgcaactgtgaagcctcgaggcttttgttgctccctccgcggctcccgtcccacacgtgtccgccattaagccgcggtgtcaatcggtcaccacactgcgctaggcaagtcatgcccgcccccatggtcgcccatggactcatctgtacagtgaagtcgcgcatgggcttcactccactctggcctcacgcttgcacatctcctccccaccggtgctgctctcgtgcaacacggtggtggtgctgatgcggctcactactcgacgcctgagctgacattttttggagatacctccagttagcgtctcttattccgtgtcctagtagttcaccggttgtagaaatgattgagttaaaattctacctctaccaatactgtctttctccttgcaaatcgcgacactgacgctgaactgatgatagcgcctagcaagcggacctcgtacgttcatcacggcaccaaccaccagcacggttcggaacgcacgcgcgtttcggcaattttttttcccgaaaggcacccatccgattcggacctttccgctcgctggcgagtggcgacacggcgcgcctagctagacgccgagacggtaacggaaaatatctcgggcctggggggtggggggtgtttacgagcggacggacggttgggagggcgtcgagaggggggccccgatgggcgccacgttcccatcgagccggtgttgggatcgacccggccaaacgggccggaggagatttcgatcgccccggtggaatcggttggtggtttgcccccgaattggacggtcgagacgggggcggcgttgtggcgagcggccgcgaggaccagtcctaggtcgcgcctgggccacccccgcggcccggccccgcctcgcctcggcgtcgcgcgagcgacagcggaaacgtgagccacggctagccgccaagcgagggtgtgcaagttgcatcgccatcactgtacgagtataacttggatttcctctccttgttgatgacggagacgcctggtggttgtttttcttctcccctcctcccaattatactcttcagttttttttttcatatttacagtggtatgtcgggaacatggtgcctattaatgacaccagaatgcatatattcatattactcttcttttttctggagagaggcagagacgaattaaggatcgaagtgctacttgtaatggaatgaaagggagagaaagaaacagaaagtagatgtgcacacccttgcagcaagttgattttgattgtttctgtacaagtaactttccttcctcagtgattttgattgtttcgctctcttcctcctgatgggccctggagcaacgatttgatgttggctcgattgcgttgttctgattcacgacagtatcagttggatggcccagattttgaactcgaaggtagatacgcatggttggattcatgcgtctttcaatctagatcagtgagtgcttccgattaaccaggtttaaaacgccgagcttaccatgtatctgttctgaactttcagcaagggtgtcttctcgtctagatgcgctgtcctactcttctaccaacatttttggtagtactgctcaagccctccaatcattttgggatggagtgaatctacttggggaaagtttacggacaaacagtagatatcaaagagagatccagcattttgtgtggttgcagagaaattccgtctcccttcctgatcgatcaacctatggccagtagaaggttttgttttgatccttgcctgcatgtcatgttcttttccgcggcctggtagatatgaacaatattttagatggaactatcatcagaatggccaattctcagttagatcaatgtacttagccttaattaataatggttacattgacagaaataagttaatttggaaactcaagatgccgcttaagatcaagatctttatgtggtatttgcttaagggagttatgttaaccaaggataatttagcaagacggaattggactggtaatttaagatgttgcttttgtacgaaaaatgagactatccaacatctgttcattgattgtcattttacaaagtttatttggagggcagttcagttttcttttggtttatatattcctattagcatatctcatatttttgatgattggcttcaaggagtcataaacaaaaagagcaaactgatacttgttggagcttctgccttgtgttgggcactgtggctgagtaggaatgatagggtttttgacaaatcacctactattacttatatgcaggtcattttcaaggcaacatattggcttcgtctgtgggcacagttacaaaagtgtgatgaagatgcagatttcttaattgttgcatgtcgtaaggttgaaacgatggttatgcaactgtttgccaatcatggatggagatttaccaataaactggaataatgttattttgtctagtttggttggtgtgtttgcttctatttgaacttcactcttacagagtgctagtttgtaataattggctgtaactctttcgaataaaggtcgggatgctatttcattccattatctaaaaagatatgaacgatatctccaacgaagcatatatatgcccacagaaccaaaattgggtgattggtgcaactcccgtagcctttgctagtttgaatactccccacttctcaatccactttctaccgcatgaacactgaaatgcagaaccagaaatgcttgattacctcaacttgatctgagcctgtcataaattagtatagttctacaagagtttgttacctgcaagaactacctcaacttgatctgaacttgtcataaattagtatagttctgcaagagttgttacctgcaagattttatttcttgcaaagagaaaaaaaaaacacacaaagaataagacgtatgatggcacttcaaaatgattgcttttgattagtagctgcgtattagccgcacactgacatagatcaggcgacctttaacagttggcgacatgagtaggctttgtcatcttcagattacatgtatccctcgcgatgtggacggcagtcgttccgtatttgtgctccttgctcagaattcttctttctggctatcatgacgttaaaagcgtgataggtgccgattgaaaatgacgattgaaatttgcaggaagtggcgattgaaaggaaggaagcgcaaaatgcattcatcaacaaaggtcaggacttgattccttcttttgttcaagattctaatgtggcccttatggatatggctagtattttaggagttaacttaggctgtgctattgataatattgattcaaacttgtctttgattaaagacttagaatgtgctagaattagtttatttttaaaagaacaagaggttatgaagaataagaattgtgaatctaaaactgagatagaattccctgtggaaaatttgcttgatgaattgtgctcttctgagggatatgactctgatttggagcacattgactctttacttaaaggctctcatttttctggtagtaagcataaaaacaaaagaggaaaccttgagattttcaaggtcactccaaagatgagtaggaaaaaatataataaaaaaaccaggaaaaaaatgaaaggacttttttggaatattagaggaatgggtcaggttgaaaaaactagtcatttacaagatttgattaaggaaaaaaacattgattttgttgggattatggagtccataaagcaggatttctctgctggtctattgagaggtctaagtggtaacaaaaatatgaaatgggagtggttgccggctatgggtcactcaagaggatttttggtaggaattaacattgacaaactgagtatgttggctgtttcaaaaggagattttcatgttaaaattgaattgcaagatatgtgtcacgaccggaattaacccaacgggcgttccttacgtgcgtgtattattccttgtcccaggaggcaaggtacaccaaaagttgatacatttcagagtttatcaagcggaagcgtaaatagttaatttattacatgggcggcgaaggcccagcatacacaaagacaaacgagaaacagtggaagactagggcgacgaccacaggcgcttgacggcaggcacgagctagacaccaaagccttcttcttccaggggctcctcttcttggtttgggaaaaaattgagcaagactgagtacaaccaccgtactcaacaagacacacccacaagtgcaggataaatgcaagggagtacaagggggttataatataaagggttagggtttgtagtaaacagcattaaaagacacttagttgctcaaagctattttgtaaacatgattccagagctatacaatattattaatcaaggccgtgaacccacacgaacatgccttaatccaaggcctacgatgattcagaccgaactggcaacccgaccctgggtcccagctcgtcccaagccaacccaggccaaccattccacattttagttgttaagcaggttttaagaattaaaacactaacttgggtacattgctcggcttgcccataaccgagggcgcggctattcgaatagattatactctgatcagaggtgtacatctttacccacaagacacatcttcctcacgtgtaaccacgtgccacataccaccacggtatacggacggaagatgtgacatagtttccaacccatcctagccatagacaagagtaccgacccaaccccacctacggccggaacccccgggacaggtatgcaggactgcgcccctagcagcaggacaccggccctgtgccatgacatctcgactaccgggccgcagcttgtgtagccttcatttgtcctagagatgtccatcgacccccgacttcgtccatctccatccgtgtacttttgttataaccagactgagccacaaactaagccgcaccgtgggtcccacgcgtcagccgcacccgagggcgcgggcggctgacggccgggcgccacgcggcagccactcggcgcgcccgagggcggccaagccggcgcagccggcggaaggcggcgcccgcgccctatggtcgccggcggcgcccataggcacggcggagcgccggccgagagaggggaagggaagggggaaaaagaagcggcggtccacggctcaccttaggtcgacggcgacaacgaaaaaggtggccggacgaagaaaggcggcggcgcggctcaggtcgacggggtcgacggcgttccggcggccggcgagcgaaacggaggggtgaacgaggtcggcgaggatgcggcaaagccgaagaaggcggcgccgaggtggaaggtggtccggggcgacgacgccggcggaccggagctcgacggcgacggcggagagagagagcgatggcgtgagctcgattctggcgaggaggaaggccggcgagaggcggaaacggatggaggaggtgcggggagggtttaaatagggttggaaggggaagaggccgcccggaggggaaggaaaccggcgcggcgctctcgggctccatcaatggcgccggcaggattaggggagggtttccaaacaaatccaagggagagagggagggaaaattggggggaaaggcggagggaatcacgggtaataatttccccctatt

SEQ ID NO: 8548 - DNA, 1190 bp, Oryza sativa
ctttgacttacttccttcaccttcactctttgctcgtttgtatcttgatgccccacagataggacagacatccaagtcagcgtattccttgtaatacaaaatgcagtcgttcggacatgcatgaattcttctgacctccaggcccaacggacataatacttgcttcgcttcatatgtcgtttgcggtaaattgttcccctctggcaacagatcctttaacagttcaagaagttctgtaaaactcttgtctgaccagccattactagccttaagcttcatgaattccaacacgcatgacaacttgctgtgcttcgacttgcatccatcatacaacggcatctgacaatcttccaccaacttactaaacttctcaaaatctttgtcgttgtcctctgcgtcttcaatgtcatgcaacattgtagatagacattgagtatccaaatctatggtctctccacctaaaggagaaggtacgaacatgccttctcgagctgcggcggtgttctctacatcctgatccaacacttcttcagctgcgacatcaggtgcctcttgctctccatgcttggtccagcaggtatatttcttcatgaatccattcattatcaaatgagcatgcacttcatccttgtcttcgatcatctgttcattcttacagtccctacatgggaacaacatgtgcatgctcatcctactttttctgtcattatccgcaaatgtgacaaattcagtgaccccctctctatactcggtagacgaacgatgcgcatagtacatccatctacgatccatctgaaatcaacaacatacgaagaaaaatatatgatgatcgatatattgagaataaatggagaataatgtgttttttcccttgaattttagcaaaaaatcgccccccttgccctcccaaccgatttgtgaatagtaaaatggtcgggatggaaagcagttggcggtttggaaggtatttatagacccaacacacctcaaacgggttagataaaaaaagcccgtcaaaggtattggtcatacctttgacgggcttcaattcagtggcccgtcactggtatacctgtgacggggactgctttcagcccatcgcaggagaggggatacgtcctcagtgtgagggctggaaatgccttggcccgccacaggtgaggggataccagcgacgggggggaagcaaa

SEQ ID NO: 8549 - DNA, 2456 bp, Oryza sativa
cagcttcacacgaatgcataataatataaaacttgaagttgtttggtattagacaatgatgtaacagaacttagcaataaacactcatttggaataccttatggtggaattccaagtgctaaagttaaacaccacgttataaagcaacataaatttattttgatatatacgccatgcagccctaccctacataaggattaaataaggttcatgtttagatatcagaagtgttctgataaaattttaagtccatatgttatatttgtgcacaaaccaaacatgcatctcaatccaagtatctaaatattgatacaactaaggcatacttcaagtgcatgctaattattagcatttagttacataagacgattatgcaagtgaacgtaaattgtcacctgctaataacataccacacaacttaagcttaagcaacagttgtttacctgaacttgggaaaacccatcccaaggatagaagcaatatcaagatcagaagctcggatcacaacattttcatccatgaccctgcatgcctcattaacaactgggaagaaaatcatctccaatatatcttgatcagataaagtaacaggctgcaagcaagataatgtctccatgtcagaaattttttccatcaccagctgggatagcatgggaatttttaaatgaaaaatccatgactcaggcagggaaggagggaaacctttccaccaggcattgtctttgcacatcttctgtactcgtcaatcacaacctgaacacttgggtcaggcttcggcttcccacccttctcataaaggtaataacctttaccattgctctttcctataaaatacagggaaatttcacatcaattttttgtttgactactgtttcttgtccaatccatcctatctgctacaaccaacagcatcgcaggagcaaaagcaggctaggaagcataccctgccgtccattctgtaccatcaaatccaccagattagagtccagattccttgttccaaaggcagccgcatagatatcctttactgccaatgccactccatatccagccagatcttgcagtctgcaggagtgcagagggaagagggggatttattagatataaaaacccttgggaatgatgattacagaaaaacaggtcaatcaacaacggaccagcactgcactgttcatttaaataatctaggtaaggcacacaacaatatctcactgttaattgttcatgcacagaaggtatgcaatttgaggtgattagatatttatgcacaaaggtataagtgacatgttgcattacaacaattaaaggaaatgtgacctccattgagttattgaggaggcatccaatcacatttcaaaagatgtagcttactaaagcccacaaaaataaattgaattggactaaaaaatgttcactataagctatatacaaataaataaggcataaaacgcaaaccatgaatttattcaaactacatatttcctatcttattttgtctatttaaacaaatttcaatacaaatactaatatttgtgatgataatctagtgcgacataaagatgtataaaaatagagttgaacacttactgaaaaggtcccattggcatgccaaagctgcttattactcgatcaattctgaaaacgtcgatcccaatactaactagaagatgagaaccctgtgtgtaagggaaaaatgtacgattgactgcgaagcctgtgcagttcccaaccacaacagggactttctttatcattttcccaactgtgatgagatcaagaatagcttgcggtgatgtcttctccgtccggacaatttcaagcaaaggcataatatgggcagggctggaaataacataacatgagcaattgaacatggtgtctcacagtaaacaagtacagtgtgattgtttgatataatgtccaaaccagaaaggctaaagagaacttattgttatttataaatgcctatatcctgcttctccgtacattctatgtgatgctcatacataagttactactgtacatatcccaaataaaaagttattgcaagtttgcaaaagctactagcttatgaagtcataggcatctgacttagaattaacttaagccatactgatctgccgcttgcctttcggggatacaatgatcagtttgacatggttaaaatgaaccaattattcatgcatttcaaggattgacttacctatattctgttatatctactgggtttcgcatgatatcatgattagccatgcttttgcagataaaagtgccataaacaacaatcaacaactcaacactgaattttcagtgaccttagataaactatcgtggggaaaattaaaagtgaacattcatctccctatatcctgcaccccccccccaccccccaccccgctccaaaaacaagagtacgatagagaactttcacgcagggtttgtaactttgtatgtca

SEQ ID NO: 8550 - DNA, 4645 bp, Oryza sativa
acgccccgcgccccgccccaggcggccgtccccggaggaggggccggtgccaccgccggtggggtcaccatgcggatgttccacggcgacgtgttcctcggcgaggcggaggtgttcccgatgaagcagggggccgaggggagcctgccgttcccgagcaacgagatccgcatcagccacctctcgccgacgagcgagcggtgcccgccgctcgccatcctgcagaccatcgcgcccttctccgtgcgatgcaagctccaggccaagctgatgcctccccacccgagcctacaccgcctctacctcacttgcttcaacgagtacaaggtttgcccccacgcaatttctcaacaatcgctcatgtccatcgctttgtattagtatagctggtactcccattcgaaatcgaagcgaaataagttgtttacagcgactacttgggaaatggtattagcgccacttctaaattttggggcaatcaccagtaatcaaagcgttttacacattctattatggatcttcgatgggttgtgtgtttgatgtggtttgattcgttcggatgatgtttcccattgatgatatttccatcaggggcacgaaataataggatttataaaattttttgtctccttgggtttgtgtagagcgcagtggtagtagttggagatgaggagctacacctagtggcaatgccgagcaaggtggagaaggtgccatgcttttggtgctgttcagtacgctctgggatctatgcagcatctgttgggatgctgaacttgcggtgccttgctatcgtatttgatctcgatgaaacccttattgtcgctaacacaatgaagtcctttgaggaccggatcgagatgctttcccgtaggatggatattgaagacgaccccgtcaggatagcagggatgtctgcagaaatcaagcggtatattgaggacagggagctgctcaaggagttcattgacacagatacagttacagataatggcagaatcgttgggacccaaaaggaggaagttctgcctatctctggtgggcaggagcgtgttctccggcctgttatcaggctgccagaaaggaatgcgattctaactcgcataaatccagaggtacaattcagatagatcatgtataaatatatttcatttaaatgaaatgttgttatcgtttgcctgtgtgcatgtttttggcctggggttatctagaattacactttgaaatcagttggacctattcctgggttggaaaaatagaactgggctccaatttgctgcccacaaaaggcatgctgtatgtctatttggttattagcgatggtacaaaaataagttctataaatgacttgtaattgctgcagttttgatcctcggataagacatatttgttcaggctcattgtttctacctacaggtctgtatgatctgcatagttacataatttgctttgtacatgtgatgtttatgaataaaacagatgcagaaatgaacttgtagcctgatggtttgggaaatgatgaaataacaattaacacaaagtttgacaacctacacacaatgtgttattatcagctcatatgtttgctgccaatagaaaaaagagattctattttagtaattatttttgtaatgcttatctgagacgattaatcaagctgattaagtcattctggactgaaaatgggctcagtataattctcatatgtctagttattcaaaattttgagataactagagtttttaattattgtagaattctgtaattagttcccttttttgaggtgattaccttatcccctgtctgattttaatactctgctcaggttcgcgatactagtgtttttgtaaagctaaggcctgcttgggaggatttgagaagtcctgactgtaagggacgcaaacgatttgaggtctatgtatgtacaatggctgagagagattatgctcttgagatgtggaggcttcttgatccagaagccaacttgataagctctcataaccttgcagagcgtgtagtatgtgtaaagtcaggtaaattttcaagaaattggaggttcttttttttctgctatctttcattgctttcttgtctcaacatgttttgttatattgacatcgttactaaacacagagtagctactttaaaacactgaacacgaatattctgtgttatctatcttttcatgtacaatgaaattatgttgtgtttccaagttattgagaaggaatgggttcggtattgcagattagtgtcccagagagaaaacccatagtttttctagcatgtatcgttcattcccttagtattgtatttcattcttatccttacaacttcaaatatagtgcataagtagtactaaatattgtttaaatttgtataaaacttattcttagtttaaacaatataatatttgtgtagaatgcttaagtgaatgagaaattgcgctttgccattgcccattatatggataatacataacatagatcttcgctttactatctctattgtctcagctctggactatgttcctgccataatttcatggacataaccaccaatattattcattattctatttcatggcaggttcgaaaaagtgtctgcagaatgtttttaaagacaaaggatgccatccgaagatggccatggtaattgatgaccgactgcaggtttgggatgagaaggatcaacctcgagttcatgttgtcccagcatatactccatattatgccccacaagctgaggtatttatttgtattttattgcttacactttttttggtcaacaatatctcattctggaccctgtttgcatattttagatggcaaatgctgtgcctgtgctttgtgttgcaagaaatgttgcttgcaatgttcgtggtggtttcttcaggttggtaaaaaatataagataccgtatgtgcattctgatgatatcatgcttactgttgtaatgttattctttgcgttcatcaatgcattgcagagagttcgatgaaaatctattgagaaaagtgtttgaactaatgtatgaaaatgagttgctagatcttccatatgctcctgatgttggtgactacttagtctgtgaggtaacattattgaatcgttgttattttgtgtgtgtttattttctaaatggttatccaactgctaattttgttccaggacactaattttgcaccaaacaataaggatgttgcccctatacctgagggtatgagtggagctgaagtagggaagaggttgaatgggctggtgagtgctgatcttcgtttctgctttgctttgatttttagggacttgattttttttttcacctagatcaaatcagctaatgatgcctatttctatggtaagcgctgttatacagcataatataaatgctgtcatgtagcttgatttcaattatttataaccatctactttgtgttatttcattttagaagaaatgtaggtgtatcaaattgatccttctttggcttacaattggatttgtccttgtatcaaaattaagtccacagttctatcacttagctagcaaaatcatcactagtttctttatcagtttgtaatagactagtatataatgatcatgctagtgtgttccttatttcaggcatatcctagagaccagaaacaaataccatcatcaacccgtttgtcaggtacttacctcatgtccattatctttattggctttcttttggttcttcttcctgggctttcttgaacccttgcatttataaatcactttagtcattttttattattaccttgcggacattaaaagagggaatggttttctctgtaccattttttccctgtaaaggaaagagtactctactatgaaatgcagcagcatcaacattatgcttgaaaatcctaattgtacctcactattattaaagaagtacaattcatatattgttttggatctgtaatttgatgcttcgagtaacataaaccaatctttgtagatgacgacggagtggcactccgtggcattccaggtggtacaaatatccaatctaacgggggatcattggcaacaaccccctcattatttgtcacggtgttgcaagaaattggacggctgtgcgaatccagggtatttggatctttaagattatatttgttttctgccattgcccttatgagctgagagtaatctcctgttctttcttcattaggtggagttcaggtctactgtaagcagtggaaaaaacatgcaattttctgttgaggttggcattttgaatttttacatattatacttcgtttccatgtggtcttggcaacagcttgggctgaaattctaattgagaaaaatatatatttagaatgttgagacacatttcctttggcgtctcaactctcaacttcagcatcagtccagtgcttttgctctgaagctgtttgcttgcgggtgcattaccagatttgtatagcaatgctgtgatatctctacttaatcatgtgatcctcatgttacctatacatatgatgttccaggttctatttagtaatgaaaaaatcgggatcggcattggaaaaacaagagatgaagcccaagtactagctgctgaaaaagctctccagaatttggaaagtgagtataatcctttacatcttgattattg

SEQ ID NO: 8551 - DNA, 5595 bp, Oryza sativa
tgtggtttttctaccattgaaacatgctatgaaatagtaaagtgtgttgccaaaatttagagaaatttgataatttgacactttttcgttgcccatttgtattaattgacacttgtgaggatgacatataggatcatctgagtgaatgaaagtgggtcaagatgtcaaataatcgaaacacattttaagaagtgttaaattatcaaatctctcccaaaatttattggtgatttctgtgttttgttcccattttttaaaattggttggttatttcggtcatgaccaaagaacgaaccaaaatgaccaaaaccgaaaagcctgctctgaccgtatgccctactgccagtatttggatcttagtttaaccgtgtttttaaaatatatttttaaaaaaattcaatttaaaacaagtcttataaaagtacagtaggtacacgaattgaagttgtttgaaggtccggatcctaactgtcgtaggtacacgaaggtagtactaattccttgggtagctgtagctcgagtggtacacgtaggactaatcatcacacaattattatttgctatatatctatctattatattattagaacaactttgaaaggaggcaccacgttcgctgtggggactaaaaattcccacactaatcagagaaaaagaaaaaaaaaagaaaaggagagtccaagtagaaatacaatctaaaaatagctgaaatttagaattaaaaataagcaatattaaaaaaagtttccatataagaacccaatacgagattaatcaaaattcgaaataaaaataaaataaaatccaaaattaggaaaaaaaaagagagtccaagtagaaatacaatttaaaaatagatgaaattcggaattaaaaataatcaatattgaaagaagtttccatgtaagaacccaatacgagattaatcaaaattggaaataaaaataaaataaaatccaaaattagaaaaggaaataagagtccaagtaggaatacaatttaaaaataactgaaattcagtattaaaaataagaaacattaaaagaagagttcatataagaacccaatacgagattaattaaaatttggaataaaaataaattaagtaacaggcctataaaagagtagagtggtggcggttgatacgacatataaaaattgttaataaaacatcaaatagaatcctactgacgattaaaaaggagggacgtcaggcaggccgtgaagcaaacgagtaaggcggttgccggaacttcttagacagtaaaaaaacaaatcgtattgataatcgtattcgatttttaaaatctcaatgataataaaaaggagaagcagcgagcggggtgtataagagtatagttgcagagccaccgacggttgacgggacttctagaaaataaaaaatgaattccaacgatagttatgttcgatttttagaatcacaatgacaataaagaagtaggtggcgaacatgctgtagaggggcatagtggcatcgtttgataggacttctaaaaattataaaaaatgaaactataagttatgttcgattttaaaatctcaatgacaataaagaatgaattccaacgatagttatgttcgattttaaaatctcaatgacaataaagaaggtaggcagcaggcgagccgtagaggaggacaatggcaaagctactgacggtttggcaggacttctagaaagtaaaaatgaacccaaacgataattatgttcgatttttaaaatctcaataacaataaagggtagagacaatggatggcccgtagaggagtataatggcaacgtttgacgggacatctagaaattataaaaataaaacccaacatgacaataaactctaaaaactacaaaatccaatttttaaaggttccaagaagaatgaataaaaatagtggtagatcaagcaagcaaataaagaaggagatgatataaggggtagcaactggtgtgacttttaaaaaatatataattagaaacacaaggatgataaggtttagtctttcaaagtcttaagacaatgagatagctattaataaattttaagtaaaatcatactaaaaaaatatatgattttgtttgggtgctagccacccagctagttcttattatttcctcgaaaaaaatattgttagttatttagcgcaggaggatttgacttctgaaatcccggaagattctatggtttgcacccatgcattcgttttggtttccccctgaaaataaactcgagataaacacacacacagattttaaaataccggtaagctgggcgcatacgcacacgggggctctaaagaagacgcacaaacgcgacaaatcccgtatgggcaggggcccgtgcgtggcgttacggagcatggcttcacatatcggggacctgcatgccgtccggcggccacttctcccatgccggcaacgaccacacaagcaaagcaaagccattatccgtcatcgcccaattaaagcgttttttggatgtggttttgtcttagattcctacaatctgtccgccagattaggcttcaggttttgtgcttatctatcgatcccttattaatataccctgattaattaagtgcagtactttgacgaccaaggaatgatatgtatgcaattttgtggtgatatacatgtatgctgagatcggtgcccatgtcaccgggtgatcccggcagctagctgcgtactgtggatgcgcgtatagtatatagtatcaccaacgtttgcatggtggatgcgcgtcgttttccgcttggaagtgagggcgaaagtgcgatctaggagggatcgatcgaaccggttcggaggaaagactgcgatcgatcgagccgtaggatggaaaactagggaggatctgatcgaaccaaatctcgaatctgggaagagaaaggttaaatcttgttcatcacatattgaagggagaggcccctaagttaatactccctccgttccataatagaagagattttgagtttttgtttgcactatttgaccactcgttttattaaaaaaaattagaattatttttttacttactttattatccaaagtactttaaacataacttttcgtattttatatttgcacaaattttttaaataagatgagtggtcaaacagtacaagcaagaactaaaaatcccttatattatgagacggatagagtatatgtgggagacaagtgggattgataatgcgaaggatgatatgagatcgatcacctgcgaattctctagattgggaatgttgggaatattaccccaacttaaatataaagatcagatggtgatggaaatctctgatgggatataaaagctgaatgggtaggggggagctatgatgttagtgtgagtggtcaatttagggtctacagtctccccttgttggccatagaaaatggaaagttgtgtctcaaaaatgaataacacaagagaatctactacacattctaaatgtcagagcacttacatattgcggtgggaaagaatgaataatctataacctcatcagtattttttggaggtgtataaccttattgttcaaaacataccatgtgatttttacatcaaacacgtaattcactttttatttacacgagcaattgataaatgtttacacatattaactaattatgaattttaactcatataaaataatgatttttagaaagctaactaaaaagagaacaatgcatggaaaacattaacatttcaaaattcagtgagcaagacaaaaaaaagtagaatgacacaggtggtgtgatagcatatttgtcaccacgaccattatattccttttaaagtagcatatagttttttcttcgaagaagtctgctccatcatttgcttattattttatcagccgcaactgaaatttaaattttaaaacataactttaaagttaatttttttcatcgtagtttttttaacattttcttttaaacatctatgaacatggatatgaaagttctttactcacaaatcacttttggttagttgtttcatttttttcatggtttatgagccacacaagtatacaacaaatgatgagaagcactagtatttctattgaaaacacacattgtatatgttatatttatgggcaccagtatttgaatcggataggtaaagccaagaagaatctacaactccaccaccggactacctgattggctcaataatatataatttatttataaatgtagtttttcccctatggagaatttcttaataaaaatatcaaacatatcttggaagcaaataatatctggtgatacttttcttgtgaaattatgcttttcagtcactgtccttattttattttttttattccttcatctatttggataagtacggagtacctaacatagttttagggagacattatttaccaaaactaaagttgccaaactcgaaatatactcaaatggcattgggtccagccagcccttaactaaaaattactaggcctactttcttaaaaaagggaaggatagctagccggcctaaacgagccaagcatttcctttattccacaaaggaggaggaaagaacatcttcgatcgatcgagcactcgatgataccttgaataaacctagccaaggagtgaatgattagcgtgctaatcctctcatttccgcctatccttcattcctcaacctcttgctcgtctcgctggcacccatatattaaataaggacgggtctttaagcctcctatctaatcatgattattatagtgtcgccggtatcaatctaccaccttactccatccgtcaaaaaaaaaaaaaaagacaaaccctgattttcgtgtccaacgttggaccatccatcttatttaaaaaaatatgaaaaaaaaataaaaagacaagtcacgtataaaatattaatcatgttttatcatctaacaacaataaaaatacgaattataaaaaaatatcatataagacggacagtcaaagttggacatgaaaacctagggtttgtcttttttttggacggagggagtatatatatccgtctaatcaattacctaaatccacactcccttttggaaattcgaatggaatcaagagccttttttgcattggcatggcgacctttgctccggagcaagcgctgctgctccaattctttttgctgggaattacgcgcgccaccaacctcagcttctacctccatcattctctgctttagttgtgaaagggcaaattaccttaaatataagtgcgagagtccctcacctcaatggttagtttttgggggtaggaaaggcccttttacgatcctacaattcgtatcagagtctggctagtttaacatctctgacccgatagacagtgtgtgaaggactgatggaccgtgggtgcctgcgggacccgtatacctgagggaccgtgatgaaatgatgaagtactgagggacaccaatgtatgaagggggagattgttgaatagtcccatatttggtgattgtggaccgtggtgaaacggtgaagtaaggactgagggacaccaatatatgaagaggaagattgtaaatagttatatattgattgtgaaagggtaaatgacctaag

SEQ ID NO: 8552 - DNA, 20956 bp, Oryza sativa
  unsure (1)..(20956): unsure at all n locations
cttttcacccatggaacaaagggtgtgtttagatccagggtgtaaagttttggcgtgtcacatcaggtatacggacacacatttatagtattaaacgtagtctaataacaaaataaattacagaatccgcctgtaaaccgtgagacgaatttattaagcctaattaatccgtcattagcaaatgtttattgtagcaccacattatcaaatcatggcgtaattaggattaaaagattcgtctcataatttacacgcaatctatgtaattagttatttatttaatactctatatatgtatcaaatatttaatgtgatagggtgtaaaattttatgagggatctaaacatggccctatatggtttttactgtatatttcttccgaaagtgcagtgcagagagcgggtggggggctcagcctcgggttagcttggctacacgcctacgccaccacccctcggaactcggagcccattgcttcctcggccccctccctcggaaggaaggcaggacaccgaggcctctgcaaaagccaacgtgccgagtgccgacgagcccgacacgtccaaacgacaggaggcggcgtgccgcaacacaatgccaccaccgcgccccgcctacttaaccaactgcgggcagcggcgcacatgcccaacaganacagccaccccgncccccagcnncccncaagnccacaaanggngngcccccccccccccccccacccccgcgcgcgcgtgttgccccgcttgctggcgcctggcgactgtttggtttgctccgttgcctcggctcagctaccctgagacagagagcgcgcgcgagctagttggcggagatcgaccccggtgcccgcgcgccgccgtgtctcggtgagacggtggctggccccgtcgctgccggaaacggctggagaatttaaggtacgcccgccccgcggcccgccgcgaatgcagtgcactctttgctctcgtttttcttgtcatctcgcgtatagctaccagttatacttgtagtcattcagaaagtattcaacgccggttacaattaaatgggagcaaatcgtagtggagttgatgaaatttatataatgcaatttatgtgtttttttagatgatgagaaatatatgtgcttgaatggttgaatgttccatgtaagttgtttagttgcggtcattatcctttttcctcgttttggtttagctgagctagcagggcgtaaatctatcctagcttttgcttctaaaggtgtgatcagtgctgtagctctctcttttaacttcaaaaaaaaaaaaatccgtctggcattgagtcgtcaaattcttttatttttgctgaaaaaaagaggtccggttgtttataatctgcatttggcccttagataggctggccgtacatgggtttgaagtgggactacatgagatgtatgggacaaagcacattgttatgggcctataacacaggttccaaatgttggttgattttatcggctaatgccggttagttaggataaggttaaaatcccaccggttttcctatcctaacaagaaacaagaaacaaactaagagataaatctgttttgtgtgatcggtacaaaatagattcgaattttagattgagataaacccccgagccccaccagtgtcgctatataaagaaagaggagggaggctgggtgacgacttaactctctccaaccctaaaccctaaatcaatcgcccgatcgattagacactggaaggggttcgtgaggtatctcacaaaagaagaagaaagaagagaagcaatggcttcatctcaggtcagtgataaattaatttccgcataagcagaaggtgatcatgtttaggctaagactcaattaattagttggattaaattccaacattgtggtatcagagcctaatcttagctacttgatccacttgatcccatcatccctgattgaagccactgtgccaatgaagtgatgaaccctaatctgttaagcccggcatgatgccatgattaatctgttaagccccttattctgtttattagttcttaaagttgctttgtgttgagcattatgtcatatttaagttaattagatcgaattagggttcatgcttaagtaaatcatagcttcggctagaaatcagtaagggaaggagaaattcaatcagagagagtttttttttctctcaaattttactaagcggagaacgagtgagataaaccagattgaaactctcattgttcccaactcataaaccctaggttcttatcatataagaacagtggattaagaagtaaattggggaaaacagggtataaactagattgaaattccccactgttaagcaaaagggaataaacaagattgaaatttcccagaatccccaataagccggatccaatcggcctaaaatccccaaatgaggaaccctaatttttgggggaagaaccctaagtcacaaatacccgaattaaatccaaattcaagtcaaaattaggttttgagttcgggttaattaccggatttagaccccctaagcttgccggagctctccggcctcctcagggccgcgccggttgaccgccgtgcgcgcgccgccttggagctcgtctctccaccgtccctcaccggggatgggaagcgtcggcttggcggctgccttcgtgctccgcccccccccccccggcgccgacgaggtccggccgcatagacgcttcccgtcgctagcgcgccgcctcgccggaccgccgacgctgtagcacgcggcttggcgtcgccctcgggcgcgccccccagccagctgaggtggagccgctgcggcgctcgccgccgcacgcgcgtgccgtctcgccggaccgcagtcgcaacatcgccgccgattcgctcactcgctcgccggacgccgaatcgggaagagaaggggacaagaatgagctagggttagggttacacccattcccccctggcacgcgatttcttcggcgcgggcgaaatcttggccgtccgtttgatccgacggccgtcctcgctcccgcgtcgggccgtcgccgttaatgggccgagccgatctgggctgcggccacctcagcgccgcgcaacaataagtggaccggtccgttttgggacggcctcaccaataagagtgggctcttattaattttaatcttaagcccgtgaatttaatgttttatttatttccataaattcatttatgagctttcttagccatttaaaattgctagaaaattatgatcaattatttggtcactcagaaagaaattaatgatatgatattatatttgaccaacattaatatgatttcatgtcaatatttattaagattattatttccttaagccaattaatttatttctagttgaatggaaatttaactagaaagtatttatgatttcatgtcaacatcattatgatagtcatttccttaataacttaattatttatagtcgaatggaaccaacgagaaattcgactagaaagcattaagatctgaagatatatttaacccacgttattataattgcatgtcaattataatttttttccttagttattttctaccaaatggtgatataattaaggaattaattttaagattactcataattatttatgaccaatggtgttttgactatgaaattctaagtttattttgcatatgattgattaagccatagtaaactaattatatgcaattatcaatgcttattatttaagattagttggaataccgagtaaattatttctagataaatggaaccaacgggaagtttatctagaaagaaagatgatttcattaagattgttatttccttaattatttctgcccaacggtgatgtaattaagggaagaaatctaagtattgtcaatcattattttaattttctctgtcattttagccttaatggtgatatgacttagaattttatttatgccattagtgcattaattccttttatcacttctaccttgcggtgatgtgatcgaggatctaatctattagtaagcttaattcctttaccatttctgcccaacggttatatggctaaggattttaattttaattctatggcatcactaatggcgtcatttcctaatcatttctaccgtatggtgatttgatttgggattttaaattatttactttatcacttctaccttttggtgatgtgacttaagacattaatgtttattccctaatcatttctgcccaacggtgacttgattttggattataagtaatttcatttattgattccttcgttttgtctctgcccaatggtgatacaaagcgaaataaagattaagttattgttgtgtaagttagtgtactattgtacgtaatttgcacaagcaaccacaaataatagtgccacttaattttatttatcagttaaagtctatggaattattattattattcctcattgacttaactgagcctaaggcctatttgagtatgacttagcattaacaaaggattccttgtgactcccgcagctaatgtcactaatttttcctaaactcaagaggcatctttagcctgggagaaggccaatataatgctatgtttcgcatgtcactcataaatattgagattatcatccctgttagtgttaaggggagaattttgagcatgacattgcgtctagcaaatgttgagatgaaatttagaagtttgtcaagactaatgcttagtacaaatttagtgcctatgcacatttgccgccataatttaaaggtagcacaagaaataaatcacatggcgtgcaaacttagtgggatggacattgcacatttcaaatgcgccacttgtccatttcatatgattcttctcccattagactacggtcattttcagagttgtaatactaagacaaagtggaccataattgacttggttcatcattctgcaaatcaataagaaatatagaagactaagaggcaaactaagtaagatcctgttaatcttgcatttgatggcaaagatggagcttcactaaggggaagtgttgcaacttccaaatttaatgataataaagctcatattcctcgcaaggggaattcaaattgcctcgatgtcctatgtatgctactcttgaaatattcttgtgtaagctctttgcaagaaatagggacatgcttaatgtcctgatttaatggcattattttgggttgaattattatgagacgttgtcgaaattatggccttattattcggccacatttctaggggagaatggacgtctcattgagatcgagacacttcacccttagaaatttctgacatctattattacttaaatgctaattcactaagtaaaattaagtgattcaagtttatgaaaaataagatagtatgcttccattaaataaataatacaatcagtgggagctcatcaagagctctaataagagaagattattctacctcattaatgactcatagctccattatgtggacgctagaattttgcatctcttaatttgtgacttgcacaattaaatatacataacatgacttgggggttttgttatggaaagacaagtcacatatagggtgcagacttaagaaatccatttgtggacttaatcaaacattgatgatgttttaatttccgctgtgtcattagtgaactaagcttaaataacaatgaggagaatatttattctataatgatggaagtaagacatcattgaaattgtgtcattgtcgcttatgtcacatacctaggggagtttggaacgtctcatgagatagagatattctttctcttagattttaatggcgttgtttagctttaagtgaaaattttatgaagttaagatattagccaacaaatgatttttatggctatgtttacctataagcgacctccgatttcctttaagaaatttaagacactaatgctaaaatcaaatgaagttatgagatcggattatggtggtaaacactaaataaagcttgttcaccttataagacattaaaaataagcgttcatccaaatggttttcgaaccatgtaagagtaaattgagatggatgaacaaaataagacattaaagtgttcatctaaatggttttcgaaccatataagaataattgagattgatgaacaaaataaagaatggttttcgaaccatataagaataattgagattgatgaacaaaataaagaatttagtagaagtttctgaatgagtcaaaatattgggccatttaagtgggttaataaaattaagcctgactctgatggaaatttcgaacaatccaagtgaggtggacagctgcatgaaaattaaaggtgggaatttcattcactggtactctatactaatgaaattttattgtcaagcaatgcatattgctgttagaaactgagaaaatttttccatgaattattttggtctgaaggagtactgggcttatatcagttagtcatacattgacaagaagaaataatttgagagaattcaattaaagttaatcaagctgaaattaagttataaagataatcatttatgattcagctgacagaagcttgagattggctcaaatctggatgcatatagatttggcatatatttttactgggaatcttggcagtatttaattaaatccagactagaccactggtattaagaatgttttgcattattgcaagacaatctgaagtaacatgctcatatttctaaagtccaatgatctcagaagtttagagacatttggacacttattttgtgagatgtttggatatttataaagattattcagattaagctatatccacacataggggagtaataaccatggaaaagctccaaaataatctcttactgcatagtcgacgatgcagttagattttaaagcatgttatgattaatcatatttcccagaactaagagtggtaaatagcgctcataaaccactcaaaaggtgtaaaccactcaattatactgtgtgcaacacaggtttctattctagtagcaacatgttatgtgttttctgcctaacacattgacatagttgtgaaagatatgtcccaggatcgaattattattaagctaagcttttgctcatggatccatactctaaaggctcataaagttaagattaattaagatatgttctggccagtacgtgcataaataagagcctcactaagatcctggatgagggggacttaatttttcaatcaacacccactaagttaagcttgagtttatttgggtactatagttcactataggtcttgttgtctcggtgacgcataatgttgttgaagacacattgccttggggaggtattttatttgataaactcgtcagttagtctcaaaatcaaggggagaatgttggttgattttattggctaatgccggttagttaggataaggttaaaatcccaccggttttcctatcctaacaagaaacaaactaaaagataaatctgttttgtgtgatcggtacaaaatatattcaaattttagattgagataaacccccgagccccaccagtgtcgctatataaagaaagagaaggagggaggctgggtgacgacttaactctctccaaccctaaaccctaaatcaatcgcccgatcgattagacactggaaggggttcgtgaggtatctcacaaaagaagaagaaagaagagaagcaatggcttcatctcaggtcagtgataaattaattccgtataaacagaaggtgatcatgtttaggcttagactcatttaattagtggatttaattccaacacaaaggcttttaaaaggaaaaaaaatcagccttggcccgcctgaatttcacatgatcacatcgtgacttcttgttcaaccaaagaaaaatgcaagaactaacaacagtccagggttctgttgttggtaaattacaattgcagtcgaaggaaaattatggtgtgttgcacaacctatagtaatatcgatgcaagtgggttggtccatggacactcatattggcctacgctagataatttggcttgcagtttcgcatccaatatgaacaggtcgggtacccatgacgtcatggatacatatccaatatttgcatccctaataacacacgtataatttctgcttaccttttgatagtagtttaatcttctaggtaaattggttggttgtgcatgcaactcaatgaagccaagagaaacttgtgttagcacaaaaaaaaaccccttatgtatagacgttttgtaatttgcctctaaaatcatgagttttatagtgtagagaaatttttagaggcactttaaaaattgtctaaaaacttttactctaaagacactttagaaacattttcaacacattttgttaaattttatctcgtagatgcattatttttgtcactttaaaatgtgtgtgcctgatatgtaaagatattttcttgagacattttaaactctgtagagacacttcttagaatacaaatatatactaatggaataaatataagtacataaggcacaaacacaacaacaatgataggaggttgagttggttagtgcattgaagataacattagtatacctaagagatcttgagttcaatgattggctatagcaaggggaaaaatactctatttttttgcattggttcgatatggttatggtacaatttaataactctggaaaatgtctccaccctcttacatgcataaaaagtgcctttttcacatttgttcttatagccataaaaaagtgcctctttcgcattggttcttatagacataaaaaaagtgtctttcacattggttcttatagacataaaaaagtgtctctttcacattggtgtgcagtttaatatcttaaaaaaatgcctctactctcttaaagacataaaaaaagtgcctctattaaaatgccacaagacatagatacattttataaaatgtggtttgacataaaaaagtgtctctttcacattggtttgatatggttgtggtacaattttgatatctctaaaaaatacctctaccctcttataaacaaaaaaaaaatgcctctattaaaatgccatagtccagattcgtagggtttgttaacgcactcaagctaagtcggcagaatgaggtatctttcgtggcggccaccgtcggctattgaaaggaacaaaccgcacgccaattaagtcagcacgagtttgtcctttcacaaggcccttatctcatggatgtattggcgatatatcccacacaagctaagctgcaagcaaatactccgaaatggacacgcctcctcgcatcctgtctatccatagtgaccggtccttttgaaaactgagctatagtggatatcacttgatttttcttcttttttaaaattatgactttcctttggacactgacacactagagggtgcattcatgttctcatgaaactctatagaaaaaattggcaattactaatatcggcttgaaataacaatgttctaaagttagctggcacatcacctattatctgattgggagtgattaagatgccatttaacctctcctacccgtcatggttcagccaaagcttatgtccaatatttttcttaagaaagaaagactcacagaaacgaagatatgttcaatcgagatataaagctttggccgagtttagttccaaactttttcttcaaattttcaacttttccatcacatcaaaactttcctacacacacaaacttccaacttttccatcacatcattccaatttcaaccaaacttctaattttggcgtgaactaaacacaaccaaactagtgcttttaccatgccttaggtactaccatgccagaatgacaaactagtgcttattgtcgtttgcaaggtgggtgacggtagtgaagcccctcgccgatcacatgtgcatgccaagtcgcctacggaaaccaccacaatcaggggcgaagctacatgcagctatgagggttcctaggcacctgggtaagagaaaagttttagctatggttaccccatctccaccatatatgcacccccctcatcccaacaatgtgtacccccaagcagaccatcaggccgagcaaaggtaacaaggccaacagagaagcgcacagccatgaggattttcttgtggtgcagcatgtttagttgacaaatttgccctgcataacagcgttgttaactacttcaaggtgaaacagaatgcactcggtggccagccacagcctatggtcttatcacctattaatcgtagcaggcaaggggtgacgtcaaaagaaagttttgcaatttgctttcatagtttcattccattttttcgataatttcaaacgaaaaattaagttgttttgtctttttttttccttgagatgctgatgttggacgagtagttctccaattttggccacctattggttgtgattttaatcttaacttcttcaggacactgcgctgataagtatcgtcattgggaattcccattttggcaagtagttttataatttaccgctaagttttcgttcttatatcactcgttcatgttaatgtagatactgaaatcaatggttttactattgtttaccataatgttctttgataaaacatgataggtcgtacgtatatcattttcgaacatggtagtatattgctactatagtggtgcaccaccctctgttttgctctagcttcgccactgaccacaatctgcgaacatggtgacgcttctggtgtagcagcatccaccctccatgagactgctctagtcacgcatgtgctggtgccgcccgtcatctcctatggcttggttcaaccaaaacttcgtccttgcagccaaagatgacgaaatctctatcttcatctttaaaagtagtgctctggtgttatgccactccgtacaacaaaatataaaaatatcattttttttctacaatgatgattgttaattacttctgttataaatattgtttgaaagaccagcaatattgtcaatatccaactttcaagctagcaaaatgtatgcatatatttttttatgaattacctggcaaacctatctctagttgtgtcatatacctatagtcccatagtgtgacttttggatgtacatcgttaatctttagaaaaatataatgcgacatctcagtactatttcggttggtcacaagaaaatcatattattatatgtactagatttttcaattatacaaagaaaataagtagtcaaagttgatttttgtaaattgtgccaattttaaaaaatgatacattttcatgactggagggagtatacttgcgacagtttagcaataccaaacaagaccaacaattcaatgcacttgaccaagtatttgaacccaatacactttgtatgaagcaagcactttaaactaatacccacttcagctatttcagatgtctagtcaaatggccagcaaacgttaaatgatagtgtaattatatttatattagtacctcatcagtgtcttgaagtccagaaaaaaagagggtgagtccaaggtatacctccatccgaatgatgctatgcctgaaaaccttcaacaccgtgtgaattatggtgagagtaatttcgccctacgcaaattatgccagtaacgttctctatgcattcaaggcatccatatatgtagcattcatgtgagcaacacattttttccatatcatctatgttaaaataaagcagtatgaaagattcatcaagaaaataaggcataagccaacttccaaacttgggagtgcttatctggttatctaccatccatacgtaatcgcctagaacttcaagccaagcacatcatcagttgcacactcttttaataaagtacatatgacaaacaacacacctaccttaagttttttggatgcagtcatgttacacctttcaaccctcttctatgttctaacagccaacttcgtttttgcatcacaggctataaaaaggggtggcatccatagctgaagggacacacctagaaaatttaatagaactttacaaattgagtgttatagtgagatggcatcggagatgagcaagaacgtgaaggtcaccgatgatcaagaggttacatcacaggagcgtgaccaaagtggtggtacaaaagtaggtggggaggaggaaattgctccactggcgcggcagtcgtcaatcctctccctcaccttggaagagctacaaaactccttgtgtgagccaggacgcaactttggttccatgaacatggacgagtttgtggctaacatatggaatgctgaagaattccaggctaccaccggaggttgcaagggtgccatggaggaagccaaggtggtagacagtggaagcggaagcggtgatgcaggaggaagcggtttatgtcggcagggatcattttccttgccgctaccgctgtgccagaagacggtggaggaggtgtggactgagatcaaccaagcccctgcacacacctccgctccggcctccgcgctccagccacatgccgggagcggtggtgttgcagctaacgaccgacaggtaacactaggtgagatgacacttgaggatttcttggtaaaggccggggtggtccgagggtcctttaccgggcaagcggccatgggatctggcatggtcaacgggccggtgaaccccatgcagcagggccaaggcggtcctatgatgttcccagtaggaccggtaaacgccatgtatccggtgatgggtgatggcatggggtaccccggtgggtacaacgggatggcgattgtgccaccgccacctcccgcccaaggtgccatggttgtcgtgagtcctggatcatcagatgggatgagtgccatgacacatgctgatatgatgaattgtattgggaatgggatgatgattgagaatggaacaagaaagcgtccccacagagaggatggctgcgccgagaagacggtggagcgccgccaacggcgcatgatcaagaaccgtgagtcagctgcacggtcccgtgctagaaagcaggtacacatgttgctccgaaccttttagtttctatgtatcgttaagacattttgcatggagattgaaatttttatgaataatgctacaggcttatacggtggagctcgaagctgaactgaactatctcaagcaggagaacgctcgtctcaaagaggcagaggtattaaagcaagaaacattatccactcagctttcattgtcattcctaaacagtctcgttccttccttttctgtaacattgaactgataaatatacaatgtctatattatcttccttttacagaagacggttctactgacaaagaagcaaatggtattgtcctctcccatgtggcaatccccattccgcatagtgctcatcgttttgtgaaattattaaatacatatttgttattcatttatttgtgtgtgtatatatgctcatggaaatatgtcgtgttcctgtgatttttcagctggttgagaaaatgatggagcagtccaaggagaagatgaatgcaaataggggtggcagccagctgcgccgcagcggcagctgcatgtggtgaaacgggcatagcggtgaccggcgagtggcacactcatcctgcttctggtgtggcactagcctctgaggctctgaagaggatttgcacattaagtcttctttcagactaagtgatgtgaaggtattatggtagtagttgatatacatatatgctgtgatgcttgtaaacctgcctggacccacatgtcttgccatcgtgttcaccggtccttgctgcttatatggttacatgtcgctgtttgtacaaaacaacgatgaataaaattatacaatagtatactagtttgtatctgtaagtttgttctcatgtcatatgcgctggaaaaagaaaagctacagtataggcaaaccttggtagtatcgattacggcccaaatttctggccgaataaactggaaaccgaaacaagctgatgatgatttgggctttgcgatggcgaaaagttcggcttctatgatccgatggaaaagttgacgcgaggttacacggtttgctagtttgtgggaattccccgatcctcggttaatctcgccgtgttgccgtcgcttgagcaggagcagggatgcaagcgggacaggcaagcgggtttttttcccgcttatcccacttctagtctatcttttttttaaattttgtactactataaaaaaaataaactagcaagcaggtttttatgcaggtagcgggattacctacttacatccctaagcacgaggttgccagcatcgggcttagcgtctccactcgtgttcgtgttggttcctacctctccaagtctctacaagtctaatactctcaatctcaatgaccaccataacaatagcgtgcatgacgacgggagaataaaaaaatatattgataactagagggtgtggctggacatgcaaagacgaagcggagggacggtggtggtctcattgagaaagagcggtggtggcggtccgtggagcggcaggtagtgattactggtggtccgaagagtttgctatcgacacaatctctaatcaagtttattgtatttttttctctaagtagtgctaatatgtgagccaccaattattataaaaaaatatttcctcagtgtttcttttcccatggcctctgactatgacattatttaaacaagttttatactgagacactttctagtagattttggacagatgtgacacttttatattttggacggatgagacactttctaatagattttagacggataggacatttcagtaggagaaagtgtcatatttgtttaaaattagaacagtggaattactaagccaggtttaaagtaagaaaaaaagataaaggcggagatactcgagtatcttccctttccttgcgtgtaaaagaaagtctcccgtctcttctctcccgctccttgcgccatctcgcggctgaaccggggaggggcgccgatctctatccgacgagcagaccaagggaggggaggggatcctggtgagcatctgcatcctctttctgattcatctctctcaccgggagtacttttgtgtaatttgcttgcgttaaccctagcttatcttctagatctggaagaagctctcctcttaatttcagagccttaaccttaatacaaataacagtttgttgtttgttccaccaaaagtttgggggttcaactgaacccccatgtcccaagttggatccgcccctgggtgtaggtgtaatattgcgatagagatctcatgattgattgctatctcgttctcgtacttactgcttcttagtttcttgatgtgatcaaatagctgccagtcctttccatgtaaataactgcagatttcttgtttattacacgttttgaactaattgtgggcttcacattgtcgaattttaaggagttaatttgaccttgggtggaactgagtttaatatacaaaattattctttccgattcaagttttgcttatattgtactccatccctcgatgatgctagggttcacccaaatatttgaagacccaagcgtttggtgattggcaaagatgggttgggggatatcccggttgattggactgaaagcagctgtgttcctctctgtggcttatttcttccatagattggacatgacactgctttcttttcccctcatatatgcctctgtgattgcgatgcttgtttctattgcttcacatccatcaattgaccttcctttgctccttggcaaggggtcgaatggaagctttcctgtgtggtcatggatcatgttctcaccatttcttcttttcatccatctgtttgttctgttacgaagatttgtgaaaaatgagcccttgtacactgagattgctgatggagtgtatgttggagggtggccctcttcagttgagcgcctgccccctggtgaacctgcagtcatagactgtacgtgcgagctcccaagaagctctactatatccgagaattcatatttgtgtgttgccacctgggatacaagggctcctcaaccatcgcagattgagtctgccgtgagatgggcactgagaaagcgttcgcagaacaaagctgtatatgtccactgtgcctatggtgagcttgctattctctgagattttgcttagctcttatgtggtaacaatagtgtgtttccatacatgtctttttttcttcaaaatagtaatattaacgatcatgtttatgcatttctagaaccacttttaccgtctcaacttgatgaagatttttgtattttcacacaataactacatcgtatcattttgattgtttagtcacaaacataagtgctttgatgttttgattatgcatgcttttcaattatcacgtcatgcagttattttagcatttctgatttatatcacatacaaatcgacatgaagttaagttccctcgcatagactaaggcaaaatttatggcataaaacaatatccattatgattgccatgatattcatgtatgctcatatgtgcaattcagatttcaacgttaacatataaatgacgggaaatgtaatgatggtatcatactttatataacaccaagtttcatgtaacaacaggtgttgtaagtgtaggccacagaatcacaccattcatcactgaccttttgttattttgtaacaggccatggaagaagcgtctgcgtgatgtgtgcacttcttgttgcattgggattagctgaggattggaaagctgctgagcaaatgattcgtgagaagcgaccttctattagcatgaattctcttcatcgtaaaagtttagaggaatgggcaaaacacttgctcactccctcaaaaagaagtggggaatcagatgtgagttatgcgattctttcggatcatacccgaaaaaggcattgatctcgcaagaaaactaacttgctcagtggctgtgataattgagatgaagtttaaatgctctggcattatctactgttatcctagtcatgtccaaggcatttcattctctaagttaattgtttgggagtatgttgtaaaacttctactactgtggcttacaacgccagctcttttaggcgctctgttggctgcgtttgttgccctgacttgggattagggttcacagatggaatttcgcgaaaaccaatcggatttcttgaaactgctaggtctcggtttatgaaaaccggaccagttttgtaccgcattgaccgaaagtcatcggtttttaccggtttttggtcggatttcggtaaaccggtgaggagcggtttttacttcgaaattgaaaagtaaaacccttgttgggaacctttccttccccttcggcacaaaaaatagagcaactcattagcgcttgagcaattaagtattagctcaaactaacttaaaaaatggatttaatatgatttttaaaacaactttgctatagaagagttttgcaaacaccatttagcaatttgaaaaacgtgtgtgtggaaaattgagaggtataagttgggaaagctcgttgccgaacgcagcctaagaacaagttttataatagagccaactttaagtttatagcttatattagaattaacatgtatagtgatgagctataaggttatctctctatttttctcctctctctatctctctcatgcatatgcatttaatgtatttatcttgaagtatgtgaatagctatctcttgcataataagagccaatctttttcattttctaaattctctttcctccacataagtttatttgccttatagtgtactattaaacttgctctaatgatcttccctgtcattgaatgcttgccagagacgtggtattgtcggatctctctttctgaaaaagaggggcctctgctagcctgctagattctcatttatagcgaaatgtggtatgtttttcatttttggtagtttgcatctatctctctgttaggttcttttcatctggcctgaaataaatgctcaactattcaccactttgctgtacccctgtattctgtggacatttcatacttgactcatgaaaattttcatgtttgtatctcatgttttgtgtgtaatgatcgtggctaagctgtagtgtactcatcccatcatgctatcttgtgtggagtatgctcttctggccttttcataatttttgccatttttctgcccttgtctcaagcaccagtttgccagttgatggatcaaaatcaagagctgcactattggaacaatctacatcctacggaaagtcgcatgcctggcaagaaatatctcaaatggtcttggtagatgtcacatgacaaaagggttgcttttcacctttctagttctttgatcttcttatcagttgaattcactgatctgccctttcttccatttatttggtctttgaaaaaagggacttccatctatttgtttcttgttttactaataagcattgtgacattccttgtgacttgcgttgtttttctgtgtcctgttttttacatgtatttcagatgtacctcttagtgacaactattttgtctgtcaattgatggtattagatttgtcctccgtgatttcagagttcagacagttatcatctctcttccatcagtgccattagtgccaggttgggaaagccttatttgctggcacgttttcttttttctttttttttttttggtagtgttgatctgcgtcatgttctgttgttatctgtagatgtctattttcaaagtaagcttgggaacatcctacctttaaaaaaaatggcttgttcagcagaaatattagaggttgttttatgcatcggcttttgggaggattttgtctgctcaagtcatgagcagccacgcatctcctgcctttgcattgctctggtctgcaacaattatttctgtgctaactcttcagcctgttcaagagccattggaagtttggaacaagtgagccagtgaccagcattgcattgcacctcaacaaatttttgcctcttccttttcctagtgatgttgctttctcaatactttaataatagaacattacaacccctctccctctcccaccctctctttctaacatcacttttggccggagtttacatcctccaggagaagctctcaaaatcctgagtactgattctgctgaggctgattatgcatcggttgcagctcggttcctgtgggactgacgctctcggtgccaatgaagttcctgttgcaagagaaaaaagagtcaatgccagccatgttcatctgtttctccgactagaagagatattgcacgaatatctgtcctcgatataacacatcaaatgatcaaatcaaccatccaccctatgaacactagtataattcatcgcttatctaatgactcgctggaggtatttcactcaaattttctttcttccttccagtacaataatgtggctgaaaaatgatttggaaatttagaacagtttatttgatcttttttttcttttcagataagcagttctgagtcttactcgcgaggacgtgaagaccagaggttgctgagagcacggaggcggcggtaatactccccaatggagaggaaacaccgagccgcctgccgggttgttagaatccgccgcagctgatgcaacgtttgttgcctcagattgtcagcctgcacatttgccaggttagtcacctaaaagctggaattgaatagcattcctgaaagaaaacgacatgtcgaattgtatagtaattctgtatcttgtctgtcttagctagaaattttacacggtatggttctgccattatcttttgaacaatgaggcatcttcagataatctaactgtatattctaatgtcatgttgttttctctcctatattctactttggacacattgaaatctagcttcctgtaggttctttctagaataacactaggatggtcttttctgataaccttttggacttttcgatagtgtaactgtatataccaatcaattgtatgatacttattattttctttctttgcacacttaaagggtggtaacaaaaataaaagagcagcaaatcgatgataaaaacaatattcggtggtcatgtttatttcgagtcatttttatatcatgcaaaagtatgattagcaaatcattatgcataccttttttctcatgcaagtatatctaacacaacctgatctattcaccatgcatcgtagaggacttgtttttgcagaatgatcactacaatcctgaacctgcaattaataatttgctgcctactttgccaatatctaatacaaccaataaaccgcaatcaacatatctgaaaaggggccaggaggaataagaagggtcatgaacaaaccaaaatggaggtctcagtctccttttatcccttgaggccttgagaaagagacagagaagggataacccatgagaaaggcaaagaccattttcttccagacttctgatggaacagcaagctcctatccatggagctgaagtttaggtggctgtgtccttttcctgaacactattcatggattggaacccttgcaacttttgcaaggcatggaacatcataaatgggactcccaattattttttgctatgcttgtgggcctctgttgaggtaccagcaaacaaaagagaataaacaagagatatagccggcacagggggtagaggcacaaagaacaaccgtatgtattcgtccattgactttataaagaaagagacaggtttgtacatgtagagtactgtatgtaatgccagtacaagtgtacaacaacctttgcctcctatggcttggcccctaccaacaactcctttttgaaaagcatccaataattggtagtaccagtaatccggtatcgttagcttgttctcagttaataacaaggtaattatgcatgctggaaagtgctaatgatgcttatctgaaagtgttaagctggagtagtagtatagtacttctttctgacaaaagttggcctgtcagggagaaggttggac

SEQ ID NO: 8553 - DNA, 30425 bp, Oryza sativa
aggatagggatgacaggtgggccccacccgtcagcgagggttgcgggcggacccgcccgtcagcggcgcgcgcgcggggagaggccgagtgggccgcggggaggaggagagagagggagggagatgggccgagccggcccaagaggggaagggggaaaaaaggactttttagggtttttcttttcataaaacctttttaactttgtttatttcttaataattattatttgtgctctgaaaattcaagtaaaatttgagggctccttttagaccaaggagaatttaacaaaaattctccgggccgcatttgaatttttcttgtacgtattttagtgtttgccaatttcttttcaaattttaattaattctattattccttttagcgaatgatttttaattcgggatgaatttatcaggacgtgacactggctcaactctaccatcctcaaaaccaaagcgggctggtgcacgagctgcacggcggggacggctagccatctaaactcccagaagagggcggggtaagagtcagataagcacttaggagggcaaggagcaaagcaaatagcaactcagatagcacacactaggcataaactggatttttcaaatcataaaaacacctgatacaacgggtgtggacaagtcacagagctacgccgagcttgactgtgcgcacaccacctaggagaaccagactaccaaacaacacccacaacaaacacacgcacgcactacctcgccacgactccaaaagagttggcggcggaacaaaagggcctatcacacggacggctgctgaagactgcctcctctactcctcgtcggcctggctgcctcctgtagtcggctcctcagtcgaagaaacgtcgatcgactgacgcgaagggaccggcggaacctgtcgagggccggcagcagcacgggccgctggcggtgggggagctgggtagtggaaacggaacacggtggaagaaccaacaacacgcttccgcgcggtgcggataaagcgtaggccacggcgggaggaagcaactgggtgtgtccgggggtgtaggaagggctaactgggtgtgggtagggggagtacactggtgagtacggcgcacgcgagctgggggagcgcgggccactgggagtgcgggcagagccgcgggagctgtgggaggacaggtggctggcgtggcagaggcggcctgagtcccaagagatagtgtcaactaaggtgacaccctcctcggccagacgggcctccaaagcggcgtagcggcgggcaagggagcggtaagcctcaaggagtaggtcgtgctgagtggcctgagcctccgaaagctcgaccatgcgagtcagcactggctgagactcgctgtacggacaagggtacctggcgtctgagtggccagagggaaggcgtggaagctgccggaaggcggaacctccgagacggtggctgtagtcgtgggccaggcgacaaagcgcagtccaggagaggtcctggtacgcgatctggagagtgggcctggccacagtgaagtggtgggggcgaaggccagctccgtgtatacctccacgggggtaaaggtacaccgagagctcacagtgagggggaacacggtccacggagtaccccgtgtactcgggacacgagaagccaaggaaacgggagaggtctcgaagctgagcgacgtggtgaccctcaccaaaaccgtgggaactgaagctggcgttccctgccatctacaattttgaaagagggagaaagatcagtaaccgttttagaaacaaactattgaaaataaagaaaacaaaagaaaccttagcttttcgcaagtagttttgaacttagtatccttagggtcgtcctaagcgtcgggtttcgccctagggccaagcctgtgctctaataccatctcttgtcacgccccgaactagtcccgaccggaactagcccgtgacgctccaaattaacctcttaatcgataccagtcccaggaaacagtgctggtatcacagggagacagagtatcacagcaacagaggtctctttattatagagtagaagtacagtcatgttgggctgcgggcagatcccgagctcacaactgcattacaaaaggaaagcggaagccaggacttggaccaatcatcacaggcgcgacttgggaactaggccgaaaccctaaaactcatcgtagccgacttgctcctggaagaactcctcgtcagcaggatccacttcatcttcttcagcaactggggggggattatttatatggagcaagggtgagtacgggagtactcagcaagccaggggaaataagtgtttaatgcaggcttcaaggaaaggctgttattttcgtaattgattttgtttgaactcttttctaaaaagtctaagtgagtgcttctcaaacgacacggatgagacagtgcgtctcgtccagtcggagtatgtgcaatgtgtcagtctttaggattgcaacaaggttggcacccggccaacagcttttcaaacggccacccgggccaacaacttttcaaacggccacctgggcctagctgatcccatcagctgcagatttttcaaacatcgaaccccttttcacaacagcaatttcacaagcagtaatcaaacaaaactacgctaggaatcacctcacatccgcccatgaccgtgggcacggctgttcgagcagtttgttaacctctgcagagggggtacactttacccacacgacattactaacccagatcacccagcccgtggggatcagccacgtcgggagacccccaagctttcatgacaaggcatttcgaaagccgatacaggtttaccatatgccgacgagaggggtcccagaccaacaacaggttaggtcccagaccatactgtgccaggaagcccaggggtcctccccgacaccaccccggcgaatccacatgtctctcggcatcaaggctcccctgataagctagttactcagccaggggtgtcccattccacccatgtggtcgtacttgtcttatgtttggatgaaattccaagggaatcggtccttaagtgcgagagcgggaaaccgtacacccggtacgttcccctgtccgcggttttggaaattcatttagttcgcaagcaccgacccaggtgtcgggttttccaagtcttttgtaaaactccagttttacccaagttgttactcagattttaagtttgaaggcgaccgtcgatactcgcacagagtgcacgaatatcgaggcgcaactgggtggttacaaggggacatggtataacagttaacaaaggaaggatcaaatgtaacaaattaggtaggtctgccaatctgccttgcagacgggacaacagattaagtgtgatcctatcaatgcataatatttcgcaagcaatataattaaattccaaatataggctcaagatgttcaaaggtggcttgccttgctcgagatccggagcttgatcctcgaaatcctcgcactgcgggtctttgggctccgaaactacacgcgaaatgggacaactcaacaaacggcgaaaataaagccctattaatgacctctaagcgtgccattagatagatctcgagatttgaggaattttggaagttgaacggagtcaatcggatttacggttgggaagatattgaatttctaagattattggatttttggtctaaaggaaaaaggatttatttaaatccttttttggaaaagaaaaagaaaagaagggagggagggaatatagacttttctcggacggctagggcgcggcctaagagaaatggagcggtctggccgagctaaatgggccggccggcccaaggcggcccaaactcgcgcgcgcgcgggagggaggagagagagagccggtggaccgggctcaccacgcgcggtcccgggtgggacccgcttgtcagcggctcggctcaccgtgcggagggagcacgcgacgcacgcgcgcgggtggggaagggacgcggtgcatgcgcgcggtccgcggtggacgcagctgcggcgggcccacgcgcagcctcacggctcgcggtggaacgcgcgcacggggagggactgaccggggtcggctcgatccggtctaggctgagctggcgccgacgtggcgcctacgtggctgccacgcggtccggcgggaggtagacgacgacccggccgcgaatggacggcggacggcggtggcgagcggcggagcgaaccacggtgatacgggcaaaagcgtgcacaccgggcggttgcacgtgacaaggggagacgagccaacggctcggattcgccggaggttgctcgacggcggcgggagaagagggaaacggcgacgaggtcacgagagaccgattcccggcggtgagagcatccacgcgaccacgggaatctgatgctagcgtcggattggacggagctacgccgagcgaggctggcgacgtgcgggtgctacggagctcgagcggcgatggcggcgagcacgcggcgagcgacggcaacggtcggggcggcgccggctagctacggggagtctactcgagctactaccgtaagctagggggaggagatggggcgaggaggaagaacggagggaggcatcaccgagatgaggaggggcgctgtgacgagaggccgacggcgcgggagtaatctctccggcctcgggccggggaagaggaaggagagggcgcggccgaagtccccttccgcgtccttgctcgtgccgactccttcgacacgcgcaacaacgaacggcgacggcgaacagagcacgggggcggcagctatggcgaggaggcgaaaacgagggagattggaggggaaggagctggggtttaaagggggcggcaatgtcggtttgggaaccgacttagggcggtcaaggcgtgagctggcgctcggcggtcgcggccaaagcggcgacagggaggatgacgccggcgggggaaaaaggggaaaaaggagggggagaaaggggcttgcccttttgccgattcgggaaaaaggaggaggggagcgggggcgacgcggcagagggaggaggggcgctgcctccgtcccttggcggcttgcgcgcgtaggggcgggggccgggcaatgacgacggcgatgacggcggtgcggtttggagcggagcggcgacactggcgacaggcgcgtgcagaggctgacggcggcggcgaccgggcggtcggccaccacggcacgcgcgtgcgggaagcaacgagtggcgtccgcgcgggcgcgcacacgctggctcgcgaggacgagcggctgcgcggctgcaggcgcggcagagcgagaggaaagggagggggcgctcggcgcgcgcggcgtgcgggcgaggccgagcggggggggggagagatgggagagcgcgagagagagagagagagagagagagagagagagcgcccggggagagagggggccggggaagaggggaagatgggccgagcgagattcggcccatcgacctcgggggaggcaaaatagacttttgcggaggaatttgattggaaggatttggattcggaattgaactcgacgatagatcggggattgagatcttgagatggcacggacaatagacaacaagcaaagaaacaaatttcgcaattagggtttttaagagataattttcccgctaggcgccaagacggaacgggcgctacatgaagcaaacgagtaaggcggttgctgggacttcttagacagtaaaaaaacaaactgcattgataatcgtattcgatttttaaaatctcaatgataataaaaaggagaagcagcgggcggggtgtataagagtatagttgcagagccaccgacggttcacgggacttctagaaaataaaaaatgaattccaacgatagttatgttcgatttttagaatcacaatgacaataaagaagtaggcggcgaacatgctgtagaggggtatagtggcattgtttgataggacttctaaaaattataaaaaatgaaactataagttatgttcgattttaaaatctcaatgacaataaagaatgaattccaacgatagttatgtctcaatgacaataaagaaggtaggcagcgggtgagccgtagaggagtacaatggcaaagctactgacggtttggcaggacttctagaaaataaaaatgaacccaaacgataattatgttcgatttttaaaatctcaataacaataaagagtagagacaatggatggcccgtagaggagtataatggcaacgtttgacgggacatctagaaattataaaaataaaacccaacatgacaataaactctaaaaactataaaatccaatttttaaaggttccaagaagaatgaataaaaatagtggtagatcgagcaagcaaataaagaagaagatgatataaggggtagcaactggtgtgacttttaaaaaatatataattagaaacacgaggatgataaggtttggtctttcaaagtcttaagacaatgagatagctattaataaattttaagtaaaatcatacttaaaaaaaatatatgattttgtttgggtgctagccgcgcaattacgcgggccacccagctagttatattgaatggagactggagtaatggacattacaatggaacttgcgctttgcaaccgcatgcatccgtaatccgtttgaggcagtcttgcacgagcatattcccttgcacatcccactcaaaattttcacagacagtttcaagaaattagaagaataatacaacactgatacaaaagtgcatatcatatatcagaaatttcaagtccaaacaccttctacacataaaaagaaacagattcagctgaatctgataatgaggttaaccggccatgtacaatagcagggatgcaaaaggagaagattcagatggatagtgatcatatatgccatatttttaaagtgggttctgagtggatgcagattatttccgatgtcggaaatgatgcggagtcgatgcaagctcggttcggaaatggattaaaattgtcaaatattacatgtatatgcattcaatacaacatcaagttagtaatgcaatgcacaataatgcaataactgtttcgttgtttcatttgttatacatttttttctgtacgtacaaagtttgtacatataaatttaaaatgaatttaaaaattaattcggaaaaaatgaaaggtattgactatgaggcccttgtgcttgtattacagctctattaatattcagcctgctcaaaaacagaggaagacaaaccagaaaaaaagaaaaatagaccacccgcaaacaagtccaatgacgaaaatccacgcgtccgaaaattagcaacgggccaaaaaggaaggaaaaaagctaatcgtgctattagcattttcgcaatcctttctaatccctccccctagcttggggattgtctgaacaagtcctaaagactaggtcaatgtaccacataggtgctacataggataaaaacatcgcccacaccgctaagaaaggaaaaatgagccggtttcgatagtggagggagtctttgggtctatttggcagggctccaactcttaaatttgtcgagatctcaagttgcacgtacctgtgcccctttacgctaatcacgtgtaatcacaattagcataaacagtgacatttctactaaattagtaggcaatacatagtcgacttgaaagttttaactttagagttgaaagttaagttttgaattgaaagttttgaattttggagttgaaagtttcaaaacttatgttgaaagttttgaacttttgaattgaatttttcaaattttggagttgaaagttttaaattttgagttgaaagttttaaatcttacttgaaatattcaaaaagtttacttgaaagatttaaattttaagttgaattttttaaattttggagttgaaagctttggattttgaggcaaaagtttcaaattttgagttgtttaaaatttgaattgacagttttgaaatttttatttgaaagttttgacatttgagttaaatattttaaagttttaagttgagtgtttcaaaagtcgggttaaaagtttcaaattcaagttgaaaattcaaattatgctttttttcctctaaattttgagtttaaagttataaatttagcacataactaatccatggttataaaaaactatccacgtggagacattaattacttgatgctaatcataatattggttatggactctgaatctgacagcggcccacaaggctcagcaagagcaagcgcgcttgtgcgcgagcaatgcttatggcacacgagcgcgaaataggaaaatcggttgtggatatgtctaaacactacttcatctttctagtttattttgtgagaacacttcagctactccactctctttttaagtagcgctgaaactgtttggctgaacttgtattccaggagacgttgagctagagctatgccaaacaaactttagaagaggttgagatagagttctgtcaaacatgcctttatattatttttacggttatatctgattccggcaatagttgagagcatcataatggactttttccctgcacaaaaggccatatcctgtttgttactactctaatattggcttactttcttcggcctatcaaactgttcggcccatacgaggggagaaattaaaacgagaaatcgcatactgatttgcacaaaagagcctgttgcaaatattgtattagcaattaagttctatctggttcgatacttggatactttctccgtttcacaatgtaagtcattctagcatttcccacattcatattgatgttaatgaatttagatagatatatgtctaaattcattaacatcaagtctaaattcattaacatcaatatgaatatgagaaatgatagaatgacttacattgtgaaatggagggagtaacattttaaaatggaagtacttttcttcaatatagagatacctcctgacgttaaacatgtgtatgagtatctctatctattaaagctagaagatacctattaaagaagtgcaaaagaattctttccaaggagatccttctcggaaacaatatgtaatttaccaacttcttgaaaaacaacaataaatcgtaaacaatagatagaagccatgagtgacactagtcggctgggcgaatacggagtactccgatcgataggaggctgtgactcgctagttcttttccttctccttgttcttggaagggacgcggccgtcggtcccggcgagtatgctgtacttctccttgcgcgttatggcggtgcactcgaagccgagctggccgctgagcgtcttctggatgtagttggccacctcgatgggcgacttgccgccgctgcaagtgagctccttgggcagctggttcaggaaggtgatctcgtacgtcggccgcgggttcatgaagaagaagtaggggtccatgagcttgaagccccgcacggtggagccgtggaacatgctctccttggtgttgatcgccaccggcacgatgcggtcggtgagctcggcgaagagcgcgctgaaccgcagcaggaacggctcgcggcaggtggtgccctcggggcagatcaccaggtcgccctcctccagcagccgccggatgttctcggcgtccttctcgcgctcccgcgacagcgcgacggccttgatcggcgagatgagctccgagaacttggagatgctgtacgtgacgcagctgaccttgcggcgcagcgccacggcgacctcaaccgggtcgagcacggtgcggtggttgcagacgaagaggacgccaggatgtcccttcttggggggaggcggcgggttgcccttcacgatgaggcggatgcccatgagcttgtaggtgtagaagacgatccgctccgggagtggcaggttgacgtacacgcggaggagcgcgagcgcgaagccgaacggcatccacaggaaggtgacgagcgccaccagcggcgtcggacgctgcacgaggcggccgtcgtggaggatgagtgggctcagcagctggttcttgggcaccgcgctgtacttccttgatgtcacgaggtaggcctcctgcacagacacgcagcatgcatgttacaaacacttcactgatgcaaaaatcacagcatcaccatcacttcttattttatcgaatatataaatgcttgttcatctcgccatgtacgccaaacctacatcctaccacgattacaattcagtacagtccactactgatggttccacagatgacagatcttcacatgcttaatcaaaattatgttttttcggagttaaactgttggatttaagttgacgtgtatcagccaatcaataggcgagagtagaccagagcagtggtaaagaagtacagcgattactgtaccgcaacaactgcaagactggcgcccataaatgggtgatttcccctccacgagagaaattcgttatacccccggggcagtgacagaaagacgggtcccatggagaagggaaagaaggggcaagaccatgaatggcagtatttatttcagtggttctctgcattaccggctggaagaaaggaagaaagaaagggaaagcaagggcagccgtggatctggcaggcacagccagcaccagctctgatgtctcacgcgccagccggccgatctccttcaatgcggccgggacaaggcttgaattctcaccaaacaaccgtaaataatggagccagccagccggccggacggactgactcgaccgtggcatactggcatgagtgaatccacgcattcaatccggcgggccacgggcgagtaaaaaccatcggcttccttccatgctctggctctgcccgcctccagattccttttctgatcatttgctcgagctttcgagttgttaagcttcaggtgaggatctagtatgtgcgacgtagacgttttgtgagttctgataatgaccttgatccttattattagtttactgattaaggatgttggtggaacagagcgaccggtcagtgcaggaagcttaaactgggtttcgcataatgggctgagcaacatctacagatcagtgtcataaatggcctgacaatgactatacacccctgctgttcgcgtgctcgaccactgtggcatactctactctgatctgaaaccactctactctgatctgaaacctctgcatgtttgtacagattgcagaatttatagtaggcggtgttcatagcttcgtcatagcaaaaatcaattgtaactgatgtgctaattccacgttatgaaagtaatatgtgtgatggagactatacttaattccaattttcatgtttcttgtttggaatgcagtaattccgaaataaacagagcattctatacggaatttatgtacaagatggtctaaccagttcgtagttgccagtaattggcagtgctactactaattcgtcgcaggacttgatcactgcaattaacaatcaacacgacagtactattactatgagcaaaaaatgagtttgagggggcgtcaaatttaccttgcatatggacatgaagtcgaaatccgtctccctgtcgcccaagccgacgtcgggcaccgcgtcgcgtagctccttgacgacggcctgcctcttgtggtcgcccacgagcactccgggcttcaccatgaaccccgtggccttgccgttcttgccgacctccagctccgtcccgaccaccttgtcggcgccgaggaacgtcttggcgaagtgctccaccatgatcctggggctcgccgtgatgatgtaccgcttgccgaaggagttgaacaccctccagctctccgggtgcacgtcctccgcgtagaacttgggcagcaccgaccgcgccaccatctcgatgttcctcaccttgagccccgccacggagatgtacaccagcgtgctgatggccagcgactcggagaagaaaatgtaggtcacgtagacgaacggcacggacagcagcagcacgacggcgcggagcacgctgccggcctcgagcgcgacgaggaggtagtacgggaaggcgctccgcgacctgaccagcgtgccgtcgaagtcggcggccaccgtctgctccgacctcccatccgagctgcactcctccacgggcttgaacctccgcgacaccatcgtcgtcgtgccgggcgtctcgatggatctcaccaggagatggcagctagcgatgcgaccgctaggtgctcgctgatggtgtgggagtggagtggagcagcgggagagggagttaatatatccaaggttggttgtgacatgggaaggggaggcggagacggtgtataattgcaggcttagctcgcagctaacttaagaggctattacttccagagagcgacactagtgcgatcgatgctgctagcttcacgtaacgtagtgggttttcttgactggtgcagtctaacacgcaggaggtaatccctgcggtaagctacgtaaacaacagcaaaaacatgttttctcacccaaaatgttgaattcatacatgggacggacaagttgcagcatcacattttcacgtgatagataccggcaatgtctctgcctttctggcgtgtctgcaattcccttttccccgtgcatcgcatcccaactgttctatccaccaaaggaaaacgctcacagttttacaagggtaaagtgcagcatgcagcgttgggcgattaccattggctttaataaccgagttggaatagttggttgggagttagcttcttcacagagctcgcccattgattagcacggccacggcgtacgtagccactcgttaccttcgtcatggagcaggtgcaagagtcaaccaagtaccagacagctgaaacagcaggctcatcacaaccacaatagaatcacatgctcaatactcctcacggtatgatttcaagatctcctataggccggacgccagagtggacaggaaaagaagatggtattcttttttcgtttctgctgcatccagtgtgtataagtagtgtagcagtgaatgctgaatttttactgaatgctggggatgtaaccggatggtgatagaaatggatatcaggggtatactaccttattagttgcatatagtaggtactcccccgatcctaaaatataagggattttagggattttcatgtagcctaaccatctaattattagggatcgaaactaaattagttaccaatggcgacaacattttaggaacagaggcagtataaagtctacacaagtcatgatgttttatgatacatttgtaaaaccaacagagtaaagacgtggtcggttagacaaacactagtatttgcattgtttactccaaaattgtaatagtaatagtagtacagtaaaacgcaaaccaccatcaattttcctcaaaattaatcttcagtgtaaaaaaacattattgcatcccgaatttgaaacaattgagagaagcatgacagttagataacatgtttccttaaccataacaatggaacaagttataatgaatacaagttttagttttccaagcaacttaaaatcaagcgcagcgcattacagcaactgtatctgtactaggccatttctatatagatgatggatgaaactgagtttatgacaattatttggggcacaaacaaatgaatttaatattagaaagtggaaattttgttgcaaaaatttctcaaagaaattatgatgaagaaagtcttttgcaaaaaacataccatttaggatcttgggaatccgtcaacgattagctcaaaagaataggcctccataagctgaaataagtaaaacatacctgcagaaaataatagggaataattgaaaaataaaattcaaggaacactactacaatgctcaaaagagttcttttctctcataataccgtgatacttacaggtctcgcggctgaacagatcctttgcggcagaatgtgcacaaaggcaaacttcaacgtctcattcaacaaccgtcgttgtttctgatgttctggtggtgttttggcaactttcaactgtactgaaatctgaagaaccgcatgatagaaaatatggtatagttgaacctctgcaaaagtttactctccaccagaaagggaaactcttacaacttacctgcttgagttgcgtatttgtgtttattctgcaagatagagtattttttaacatacggcagaatgaagatagaaattttacagcagtacttggttcgatgtggcaaatttgcaatactgctcctattatcttcttagtaatatccaacatgtctgatacacgatggtgcgcctctatggatcccatcttcgaacattatcgaagccatgtagtcagttgagaagctgggagatgaatcgacgtctccattcaaacatgatcaaggccatctgttctgaacattgccccaattctcaatcaccgcagcaacagtattgtgaattctttgaaaagaaactaatagatatttttgtagttcttctaatggcatcgtttgctttagttccacatcagcacccattcaacaaccataataaatattgctgtttggatttatgctctgaattctgatatgtcactgtcaatttccaagtctacctttaactctgctccttggcagtgaagaaactggaaaaagagtgacgcccccaactttttgttgggaagaaaacaaaatttcgttatcatgctgacaaattaagcagttcataatggacactctttacatgtcacagttatgacatgattgttgggcaacatatataccaggtctaggttgcaccagcataacaattaaaacaagtcttagtaatcgtgcaaactgattactgaaaacttgcaggttcagggtgaatctgcaacacaaaaggatgcataattaaatgactcaaccctgagcaaggattaaattctgagtacatacaggagttacgcactcactgtaatttttcccatcatttctgctttgcttatcccttttgtatgttcatttgtccttaggagtaatgagtctatttggcgttatattggaggtcctaataatagtactttttgacccctccatagtgcctacgcatatctattagtattactccacccgacgcagagtcgcagatgaaaacgaactactgagcccttgttaatccatctaactttgctactcatttttccacattaatgagaggatctctaaatcttcagtcactctctagcaactttaaagaaaaacaacgcgacgatctattttcttttagtacagaatcacttatacattaccctccaaacagaaacttctcgtagccaaatgctttaccctttccttgagttgttagacagtttgttagatgttgatattgtgaaacaagtattcttcaatgccacgagaatgttgaaaggcacatgtcttctagtctaagaattgtagcatacttacaaatatgagcaggccagtaccatagaggaaaggaatagtggttctgcatcccccaatagaaatctacacgaactgtagtacattacaaatttctagtcagtcaactccttaggataactttagcattgtctcaatgagctggtagtttctgtagtataggagaatgaaattatagagaaacagtgatggaaaaactgcattgcaaaagcttatcaaaattaatgcttggtggtccaatgaaggaaatgtactcataaacatatgttatgaagattttaagatcagtggtcctaaatacaactatacaagcctgaagcctccacagaacacagaaaacaaaaggtcgttttaacgattttagctaaagattagaagtgatagtttgcttaagatgatgcatacagattagaggcgacagattggaggcaacctggatgttcatcgatacaatgttcatagaagaatcaacgtcaagacagatcagtatttcctacttgccatgctaacttcaggaaacatcttggtacaaaaagaaaattgaaggaacaacaaacgtgtgttcatgctgagccaacatttttttttcgtttacttacaagtagcggctttattatccacaaaagttgcaataatccaaaacaagcacacgactggaaaaaatcttgtctatcgtcacaaggaaatgaaaggcaaaagcagggaggaaaaggactttcactttttcgcaagcaaattctcacatggaaactaagcaagttgtgggccggtgtaactaacagggaaacgaggcgcaggcgccctgactaaaccttgcagttcatacgggcaattgcataagagttaggttgagaaaatcagaatgatcaacaaatttcaacatgtatttttttttccaaacacggaaaagcttcacaatcaagcggaagggcaaccacacattcaaatacgcatttcaaggactagagaggactaggggatgctaatacttggtgaaaaatgactgcttcacatatactaggcgtccccatcttaatgaaatttggtcgccgttcctttcggccgacccggcagaaaacatatactaggcgacaagtggagtacttgcaaacgaaacgggcgaccgtacaaaactttgccgtattggtgagagtatccggtgaagttactagtactccatcaaattgcctagactatttcagcagggaatcgagaattcgagatctgtaaataactttctctctgcttaaaacatcagcaaagtctggctcggtttcaaaaaaaataaaaatcgagatctggaaaacgcggctcgaacttgccgtgttagattgtaccgagagagggaagagcaactaggggttttagttacctcgccggactccgagtgtagattggtcggccgccgtcgtgttggcgtcatcatggcgtgttgccggccgaggaggagagaggcggaggcggactcgcggaggaagcctcttggcccttggggcggccggcggcgtgccgccctagttgggtccgcaggtcgcgggttcggggtccctcgctggctaacttttactccagtgggctttggcgtgcggctcttcccttcatggcccgtatggcgatatggaattatcgggccttagttgatgggccagcaaggcaaaacggaaagtaataagttcatttgaggtcccttaactttacaccgaatccgattttcgtccttcaacccaaaaccagatacaaccggtccctcaactgtccggtgcaaataagatccctcggcggtttggaaggcagttttggctaacgtggcacccacgtggctggtttgactatgtcttcgtccctgtaggatcaaggaggccgactagaggggggtgaataggcggttttaaaacttaatggcacttaaacaaaactaacctaagttgctaggcaaggtgaggtgcaaggttaactaagcaactaagttaagttttgtaaacctaggtgatatgggctcaaatatgtctctatgaaaataaattgcacaaatgtaaatgcaataaataaatgagacaagagacaacgaatttttcaccgaggttcggaaactcgccggtttcctaatccccgttgaggcgagcccaactccaccgctcaaccacgaagctatcgcacgcccccttcgtcaaggggtgggcaaggtgggagccggcccacggagaggactacccaagcctcgatcactagggtagttcttccttcactccgaaggtggtgaactccaaaccactcacaaacggcgccagacctcctccacaatctcctcggagaggtcaccggacaacacctccacaagccgtctaggaggcagcaacctccaagggtaacaagtctaggatgcttgccgagaatgatcaagtgccacactagcaatgaagcaatgcacttggattggcttaactcactctctaacacctcactagataaactaagtgcacaagggtgtgatagctcttgaaaggattcaagataatgcaatggagtgccaaaaccttacccttactgctggggagtgggtatatatgcccccaaccaccaaaactagccgttggaaccgaaatccccaactttatgctctgccggtcagaccaccgttgtgaggccggtcagactggactactttgtaacggctataaaagtagccgttacagggcaatcattgagcccactcaacctggccggtccgaccgcagtgtagtggccggtcagaccatccacggctcggtcagaccgccgtcggctcggtctgaccggttgcggctctggcggctctgtatcgccaccaaaaaccagatcagtgcaatagaccagtggggccggtcagaccggccttaccatgccggtcagaccggctaacagacctggtcagaccggcctaaggcccacggtcagaccgcatgtcacttttcagctcaaccgaccgttagtaaaacggcgatatctcttgactcgggtatcggaattcggcgttcttggactctatggaaagcttattcaaagggccatccaaaccatgaaaaatccatccaagaaacacaacttaagtcaaggataaagggctcacactccaaaggatatccaccggacatacccacaagatgtcactcactcctattggacatgcccacttatctcttggtttaggacttgagaaaactcatcacacttggttagacaagcccacaaaatacacctacatgcatataaactaatatggcacaagttcatccacaagctcgcttcatagacccctcttgatagtacggcgcctatctagcaaatccggtctacaccaaacaccaagaccgggaaaagactaagaaaatattcttagctacattatacctttgccttgcgccatccatcttggggtcaagcttgagccgagatcaacacttgtgaccatccggttgaaccatgtttatgccgaggtcttatccatcctttgtcaagactttattctcatcacaagtttgacttcattcttaccaacatgacgatgtccttggcttggtgaccactaacccatggtgtcattcattagcctcatcgtagtgggacctattccttttcacacctcaaaggagaacattagtctcaacaaatcggttgtcatccttcacttgatgaccaaccggttgcatatgaaagatatgtatatgcttgttgagtattcattaacattacaagtgtcatatactcgtatgcaagctcaagtgtaaagatccgatataaataataggtgaacaacatggatctggaacatgcacaataaatgtataggatttgctccccctaaatatatgcatacaaataaatatacaagagattcaagtgtatgcataattagagaatgaccaatgggggtttatcctatacatatagagaaggcatatgtactaatgatgtagaccaacataaaacatataccttcatgatctccatgttctcaatgtaaatgagactaaataatataacattcgagtaaacattagtctcacacttatatatcaataacatagaaatcatatatatgaacctatcaaaaagtaggagataagaagtggtacatatcgttttatctccatgcatttcattcttgtcatgattaagttccatcacaaaagaatgcatgtcttccacatctcattatcgggaaataacctagtagacaacttatgcaaaagagaggttaatcccataaacatcggtttatcatctatcaccaaagtaacaattacacaaattgtttaatcgaagatctttcaatattttctctctttggtgatggataataacccgatataaacaatatagagagatgagatgaaaaatgatttcaaatcaagatagaaatcttataataaacaaaatatagaataagctccccctcaagatgtgcatacatatggatatgaaggaacgcatatgcacataatcaataaagatcaaataggaagctcacactatattttggatctacaagagagaccaagttagaatatgtgaagtttaatacatacctctcatcatttttactttcatatccaaatgagactagtcaaagaaaggctcataaaaatgattagtctcatatagttagatttgtcattaatcaccaaaaccaaatttaaggcacttgaacttacagtcccatgtggcattgacgtggcgctgacgtgacaattctatccttgaaaataataaaaatcgttggccccaaatgtcagctacatagaaaaaatcatttacaaatagcaggggccacgcgggtcccacatgtcagctagagaaatggtggggcccacgcggcccccacatgtcattccttcttccatccctcttcttcctcatcacgctgtgtccgactgcttctcctcgctagcgccgtggcgccgcctcacggccatcgccgccgccgttgtcgtcattgcagtccccgtcgctgccgacggggcgttgtcgtcgttttagtctccgtcgccgccgacgggggatgagggagagggattggacccacggcgacgagaggagaggggagaagggagaatgaggtgtcgccgtctgtgggctagccactggttgcgcgcggaaatccacggcggtgaaaacatgcaacgtcaaacatagcttaacggcaaatcctgcgttgttccctcggttcagaataaattccgtccacttattctgtatctggacgcgttcccgttcacatgcattgcttgagccttgtgcgcgtgttcttggattcgagtcgctgcttcgacttaggtgtgtagacatttttaggcgacatacctcacatgttaatagttcaagttggttggattgtctgttatggtgctacgaacttcgtgtctttggcatattcttttgagtatgggtgaaaatggtgacgaaaatttccatggaagcaataatagaaagtgacaaaataagagaaggaaacgaatacgattttattgttctaccgactgtttccctcattttaccgtacttacatggaaaatggtgttgtcataatacgataattaacatattcctaaggagaccgtttcccttaattattgcgacggtacgaattacaatatcaattcaaaaatagacatcatttacactcaacttttaaaaccggatgagcccccatgactcactcgagaacggttttggtcatatatggcttatgcgtggtagtccaatcagcataaaaaaatcaaaacaatttgtgggagtccacatgtcaattatgcttcttcctctcttggtctcctcttccctgactcatctcggtcgctatcgatctctgcctgcctctcgcccaccatccgcagtccatcacctaaatcttgcccgcctctgaagaactacaatccgccaccgacatgtcaccctacccgcagcatcaaccttggcctggttccgtcgagctcatgcagcgccaaatggaagaggcagaggcgaacaaagaggcggagggagagaagaggtgatgaagatggcgacaaatggacccgagctctagttggatctgtcaccgccccaagctccacgtggatccggcgtcacctcaagctctgtttccaaccgtctccatgttgcagcaggtctcttccccgcaaggccatctgacttcgccatctcgttgaccccaacctcaaagccaagcccttgccgcttgttgtcatcatcatcgccgccattgagacccgtcacacccaaggttgaggacgacacatccgcccctccctgggtcagggccactgtatctttctaccgcatgagcatgttgccgtcactgagacctactgcacctgaggctaggggcatgctacctccccgacaattgggctagcgattttttttagaaaatactagactattgtcacgccccgaactagtcccgaccaggactagcccgtgacgctccaaattaacctgttaatcgataccagtcccaggaaacagtgctggtatcacaggaaaacagaatatcacagcaacagaggtctctttattatagagtaggagtacagtcatgttgggctgcggacagatcccgagctcacaactgcattacaaaagggaagcggaagccaagacttggaccaaacatcacaggcgcgacttggggactaggccgaaaccctaaaactcatcgtagccggcttgctcctggaagaactcctcgtcagcgggatccgcttcatcttcttcagcaactgggggggttatttatatagagcaagggtgagtacaggagtactcagcaagccatgggaaataagtgtttaatgcaggcttcaaagaaaggctgttgtttttgcaattgattttatttgaactcttttctgaaacaactaggtgagtgtttctcaaacgacacggatgagacagtgcgtctcgtccggtcggagtatgtgcaatgtatcagtcttttgaattgattaagattggcacccggccaacagctttcaaacggccacccgggcctggctgatctcatcagccgcagattttccaaacatcaaacccattccacaacagcaaatttcacaaggcagtagtcaaacaaaactacgctaggaatcacctcacatccgcccatgaccgtgggcacggctgttcgaacagttttaataacctctgcagaggaggtacactttacccacacgacattactaacccggatcatccagtccgtgcagaacggccacgactagagaccttaaggctttcatgacaaggcatttcgaaagccgacacaggttcaccatatgccaacgagaggggtcccagaccaacaccagattaggtccagaccatattgtgccaggaagcccaggggtcctccccgacacaccccggcgaatccacatgtctcttagcatcatggctcccccaataagctagttactcagccaggggtgtcccattccacccatgtggtcgtacttgtcttatgttcggatgaaattctaaggaaatggtccttaagtgcaagagcgggaaaccgtacacccggtacgttccccggtccacggttttggaaaatcatttagttcgcaagcaccgacccaggtgtcgggttttccaagtcttttgtaaaacccaagttttacccaagatgttttttagattttaagtttgaaggcgaccgtcgatactcgtgcagagtgcacgattaccgaggcgcaactgggtggttacaagggaacatggtataacaattaacaaaggaaggatcaaatgcaacaaattaggtaggtccgccgatctgccttgcagacgggacaagcagattaagtgcgatcctatcaatgcataatatttttcaagcaacataattaagttcaaatataggctcaagatgttcaaaggtggcttgccttgctcgagatcttgaccttgatcctcgaaatcctcgcactgcgggtcttcgggctccgaaactacatgcaaaacgggacaactcaacaaacggcgaaaataaagccctattattgacctctaagcgtgccattagatagatctcgagatttgaggaattttggaagtttggacggagtcaaacggatttacggttgggaagatattgaatttctaagattattggatttttggtctaaaggaaaaggatttatttaaatcctttttgaaaaataaaagaaaagaaaagaaggagggagggaaattagacttccctcgggcggctagggcgcggcccgagagaatggggcggctcggccgagcttaatgggccggccggcccaagaaggcggcccaaggcgcgcgcgcgggcggggaggggagagagagccggggggctgggtccaccccgcgtggtcccgggtgggacccgcttgtcggcgactcggctcaccgtgagcgaggtgcacgcggggcgtgctagggttcagggagagagacgcggtgcacgcgcgcggttcgcggaggacgcggatgcggcgggcccacgcgcagcctcacggctagcggtggaccgcgcccgcgagcggggccggagggagcggctgaccggggtcggctcgacccggtcttggccgagctggcaccgacgtggcgcctacatggctgccacgcgggccggcgggaggtagacgacgacgtcggccggaacggacggcggacggcggctgcgaaaggcggggcgaaccacggcgatacaggcgaaagcgagcacaccggatggttgcatgagacgaggggagacgagccaacggctcggattcgccggagggagctcgacggcggcggattgcggcggtggcaaccggcggcgagggaagggggaaacggcgatgaggtcacaaggggccgattcccggcggtgagagcatctacgcggctacgggaatccgttgctagcgtcagattaggcggagctacgccgagcgaggccggcgacggtcgggcgctacggagcacgggcggtgacggcggcgagcacacagcgagcggcggcaacggtcggggtggcgccggctagctacggggaggctacacatgctactaccgaaaactaaggggaggagatggattgaggagggagaacggggagatgcgctaccgtgcggacggggcgcagtgacgatgggccgacggcacgggagtgatctctccggcctcaggccggggaagaggaagaaggcgagcgcccggagttcccttccgcgtccacgaacgcaccggctctcccggtgcttggcgatgaacggcggaggcgagtcagaggggcggcaatggcgcggtggcggcaagcgaacgggaggaggaatcgatgggagggcgccttggtttataggacgacgatgtcggtttggaaaccgaccttgggcggtcaaggcacgagctggcgctcggcgctcgcggccaaaacggcaacagagacggatgacgccggcggggaggggaaaaggaaaaaggaagggagaaagggagcttgccccttgcctctttggggaaaaggaggagggagcgggggcgacgcagcagagggaggaggagctctgcctccgtcccttggaggctagcgcgtggagtggcgggggccgggtcgtgacgacggcgatgacggccgggcggtttggagcggagcgacgacacgagcggcaggcgcgggcaggcgctgacggcggcggcgactggccggtcggccaccatggcgcgcgcgcgggaagcaacgggcggcgcggcgatttgggcgacgtcggcaggaaacagcagcgagggcgggggggcgctcggctcggcgcggctcacgagcacgcgtgcgcagcgtacgggcagtgcgggggagagggagagagagagagagagagagagccggggagggagggggagatgggccgagagggattcggcccatcgaacccgagggaggcgaaatagacttttgcggagggatttgatttaggaaggatttggattcgggatgaactcgacgatagatcggggatttgagatctgagatggcacggacactagacaacaagcaaagaaacagatttcgcaattaggatttttaagagatagtttttccgctaggtgccacgacggaacgggcgctacaactatcagttatgataaatgtcgacgagtgatactcgtagaccggatgattagggtattggggtacgttggaacgaggatctacgtaatacgacatcaagcgaacagaagacaaggattttactggttcagaccccttatcaggtaatagccctagtcaagttttacatgggattaatatggaaaagccacaaaatacaataggagtagatggatccgatgataccgacgagatcgtaatcgatagactcgacgaaatcccccggtgacttggctccgtatgctctggctttgtaggctgtggtggtgtgttggcgatgagattcgatgccttgcacccctcccaggggtcccttttataccgttgatcatcttgatctctaagtaagactcggagacattggatctcatatgatacaatgaaagctctatccataccgagtaggactttgtaaatcactcgacccgtagagatattttccataatccgtgacggattcctacgacgcatacggaaacaacccgtgttataccatactcgtatattccataagtcgtaaaataggaggtatgccttattcgtaacattgaccaaaatcactgtggacttacttagggttgtcatttgttccgtttgaatagtcgatggtgtgaaatgactggtatttgagtttagggggtaattcgatcaaccccgctaattcaggggtgtcattcggactttttttttctatatataaatactgtaatatctatgatccatatatataaataccgtaatatgtgcttttatagctatatatatctatatataaatactcttcaaccaaatatcacaagcccgaatataattgatgatattatatagtaatgttaagctaaatatgtgcttctatagctcaatgttttcgatatttattaatggtattcatttgatattgaattgtttctgttcatacaatttcatttccgactttctgatattttggacactgttttcgttttgggtcttttcattttcgattttgtcttcgaagaaatatggttatattaccaatatagtgaaggttgtttgcatccctacttccaaacgagaggaaatgaaaacgcatatgtgcagatattattgtcgtgagggtgtgtggacactggaagccattcaaatgaaacatgatatgcagattgaacagccatcgatcgaggataggtgccgctgggcgagatgtaacaggtacggtgactggatcgtttggagactagtcagatagggtgtttaacagcatggaagataagaagggcaggagtgcaggacgtgagacaagaggaggacggccgggaaggcgatagcgaagagggccagtgagaaggtccggcagacttggagataagaggggtggcgttggaatgttggatcgctggcacgattacacacctacggcgtccctgtcagctgtcaagaaaaaaaaaatggccagtgatgttcataagatctccacctttttttttttgggaaaactataagatctccacttattcggtgtaagtgtagattgtaggacatgtttcatcgtctcatgggtaagttttctgatgattttgtctacttcaggctcgtatactaaacagatcttaaacctttccgtgcaatgtttggtaagctagctacagcaagcagacagtgcttctacagttctactgcacatcaggacaactgtagcggtactgcgcgtggaaacttgcaacgtggaagacaagggatgtgttgttggctagtgtgaccattgcctgctgtttagaaaatatctgacgtgctaaccttcgtatgctgactgctgactaccgaataaaatttctatgtgaatttcagctgtgagaaagcgaaaaatctagacttgagagtaaaagcttgaaggtgaacatgtcatatatttcttctgtaatctgtgtctatgagcataaacttggtttctcatctgtatattccgaactctagttatatcctgctcttaaacttattgcctgtaaactttggcgcatgcgtgaaacttgcctgaattttattcagggtagctatgaggaacaatatgatgcagcagtggcggagccatacattatttaaaaactataactaattggttgttgcttttgtccaaaatttacataataatttaagagatttaaaattgatttttcaagtcctagctgttctaggtctgcctccaccactgtgatgcagagatagtagtttgaagacaaatatcagtagtcaacagcatcatcggtgacaccatgctttaccatcgcaagattgaacgtcgcaagtcgcaactaaggtttgttccttgggcgaattgcctttaaatccacgccgatctggaactcattggcaccatctcactgtcatttcttcctctagctggtcgcgttgaacatatgctggatagccgaccgactgtggagtcggggattgccgcatcccgaccgctacattctctgtgatcagcaggatgagagcattaatcatatcctagtcggctgcccagattcaaggcagctttggtggtggactttgagagcaatcggccaccccaactgcctgccggtgaatgaagcttcttttcaccaatggatgtgcgataacagaatggtgctaagtgagtcacatcgtcgaggcttcgacacggtggtgacattggtagcatggacaatatggaaggaacggaacggttggatcttcaatcagcagtgtagatcttgggtggatgtggccagagggatggtggacgaagcctctctttggcgtaaagcaaacccggcgatccctgcactgcaattcaggagggagtttggtcgccaaaatcagcgcgagagatagacctaggattgtctgttattgtcctgtatcagtcccgtgctgtttttctctttcaaatgtaaataacttttatttctcttaatggaaacaaatgtgctccttgcgtattcccgaaaaaagtcgcaaccaaggtagaagaaggggttgacaatgtgggtgcctgcgggttgtgacactgcaggatacctagtcagctagccaaccgctaaacccacattatcctcatccaatgcgtcacagttatctagttaattatagagataaattaatttcctctgtccataactataagtatttataggttgtttatagtacaaattaagattgagaagaaaagcactttgacacctcatataaaataagtgtacctgcactatagtgtgattgtattataactatatttataattataatagatgtacgcgaaatcgggattgttcacttggctaggagcagatgcccgaaaaaccgaggttgagatatctgcccccggcctcggcacacttttgaaaattttcaaaccttgctcgcacgtatcttgatgtacatccgatggtccacaaattggcacttctaaagattttccaaacttgctcacacgtagatacaaatctgatgatctgcaaatacctcatggtaaattttggatcggtactattggtagaaaactagaaatctggatcaaatagtactcccggtgtttggaacgaactactacagctacggagtaatactttttgcggtcctagttattttcaaactaatccctctgttcccgctgtaatttcgtcgattggttagcctttgttatgttgatgaaagctttcgcgccctcttcagggctcggtcgtttaatccccaagataaaggaattggagtagattgaagggaaataaataccctctaaatccttctcaatcctcttgtgggagggataaccgaacatggcctcaggaggatagcgagggaatccatgtcttcatcgctcgtcatcacgttcaggcggatgtacaagatcatcagcgacctcttcgcagagaccagcttgagcggttcgcccagagccggtgcaccaccgcagctgctagatctgctattcatgttgttctgtgtaacgctgccaagctcaggcgagccggtcatgcacctatcacgcttttttttagaattagggccagagagcccccatttctcttactagaaatgaacatatccttacaaagtcagggaagcaaaaaacaaatacgaggaaagaaagctaaagagcttatccagatgcctcatagggctggatggctgaacacgaatacatcattcggtcatcaaaaggataaaacagatcacaaaaaactaataacatcttcatccttctatcctcctgattccaggtctccatccatgtctcgagcagaagatgtcacttgccacctgtcttataagtctggctcccaactgcagtcttcttcgatttgcttccaacttctgcaaagatgcccatgaatccacccaggaacaagccataaagaccaaatcagtaggatctcttggaaatttattttcaaaacaagctttattcctggacttccaaattgtccaaatgattgcagctaaaccaatcacaatcaagtgtttcatgtttttatcatgtctatccagccaatgtccaaaaatatcctgacgattcaaagtaggcagtatatccaaagcacaacacatgatattccagagaagtttagccaaaggacattcaaaaaacaagtgttgtatatcctcttttctatcacaaaattgacacttttcattccccttcctccaaccttttttatacaagttttccatagtgagaattttgtttttaacaaacagccaaataaagactctaattttcagaggaatcttaaatttccatattttcttttgagggaaagacacctgatgcattttaagggctttgtaaaacgatttcacagaaaagattccatcctttgtcaaa

SEQ ID NO: 8554 - DNA, 3097 bp, Oryza sativa
  unsure (1)..(3097): unsure at all n locations
cctagcgaaaaaaaagagtaacttcgtctatctgcacaggagaacctccagtctctaggagccaatgggccatggcaaaactaccaaacggcaatgaaatacttggcgacggatcgatggaagtttgtaccggtttcggcgtttcgacagcagggtgacaggacagagtattcatttcatccatcgaagtagaagcacgttttttcccttttattccaagaaagaacaagaacgaaattattgtcctttgcgggtgtgattgaagatctgtacaatgaacgcctacaaagccgatgggctctgcagcagctagccgaataaaccaaagaatatgaaaacacaaacgacatttgcaatttcagtccattagagcaaactgatcgaatcacatgcttaatcaacatgaactaaatcacaagtaaagagttctgacacgacgatttttttattttgtgtaattattgttttattatagcaaaagaactttagcatcatttagaacagacatgatcgatttattagctaagttaccggttttcttgcaagtcgttctccttcagaacatagaatgattatctagaaaaccttgacgacaatagtatttcctcttccgtgctactttctgtaattgttttgtatatcattggtaactccttcaattgacatgtaaagagctgaaatttgattttcatcgcatctgctacttgatcgaatattctctttattggaggggcctttctttgaaactatgttttcgagtaccatctctacttccctcatcgtaggccgctcttctcctttaaatttagtacatgttgcggctagtgttgctacttcctggacttctccatcttcctcttccctaacttgagaatctattatgtcataaaggttaccttttgagacaagtgagacgaaatgtgaaacaagaccatcgccattatcaaatgtaccaccaattggtttcttccgagtaagtaactccataagaagaacaccaaagctaaaaacatcactcttactcgtaagtcatccagtataatagtacatgagatccaagtagctaattgttccttgaacggcagtagttattcccatttcatttatcgagatataccttgaagctacaaagtcagatacctttgctgttaggctgtcatcaagaagtatattcgaatatttaatatctctgtgaaatattggcattgatgcagctgaatgtagatatgaaagagctctaacaacttcaaaagctatccttaatcgatcatcccaaggtaatgatgatgacaccgtgccttcaatatggagatgatgttaaagggttacatttgaaatgaactcataaactaacaatggaacttctgtctcaaggcaacatccgaggagttttaccacatttctgtggttcacttgggaaagaattgcaacctcatttatgaattcatctatttctctttggtgtggcttgtaggttgtggaggagcggagcatgcgaggggtaatgggataccggtggttgtgttccctaattcgaagtctactccagaggggatttctactgatgagctgttgaatgctctgaggttggttgctttgatctcaccttcaggctttggcattcgatttctagtagctttgtagctcatctgttaggtaggtgttaaaataagtggatttgcagaaacaatggtagacacaaggcacacaacatctgagatttttcacacttgccttaagtcttgtttgaaaaatgcatacatgatacattgttgtgttgtttgctgataaaagttttctaatccattcacctgtcttatgtgtgcgggtactgttgttcgaagccgtcaaatgaagatgaattgataactattttaaagattttagtgtctacttattgaatgtgtgtcactaccttgttttgccagatgaactttgatatcagttttatgctctgggttgacgtttagtcaggaacctattggagtgtgttcttcatcagttgtacggtgtgcccactcagtcagtcagattagtttccattttgttattgcctagctgatatactgtaatgtaccactgttgatttttttcacgaatagccactgcatgttttatggtgtttgtagatttacttatatcctcttctacaagactggctcgcctactgcggagatttgttttggttacttgcaataggtctcaatattcggatcaatctatccttatttcttatgtgaaatagggaactcagggtagacttcattatacttgctggttacgtgaaacttataccggttgagctagttcaggaatatccaaaatccattttgaatattcacccttcactactcccagcatttggaggcaaaggttattatggtttgaaggtgcataaagcagccatctcatcaggggccaggtacttcgcaatttctctatcacccatcacaagcaactgctgtgcagtttgcatatctactcaatgctatttccatggaaagcaatatcttggcaatcaatttgagctgatacctcacattgtagaagaaaattaaatcttgattattaacttaattggagaatgatctttgtttgtactctaactgttaagtgtcaactatacacaggtattctgggtgccaactgtcgccactttagtggtatgacgcactatagacaccagagaaggcactctacgcccaaaaagaggttagtatcctggtgcgtacgccatatgtatatctcccagacgcaanntntggctgccaanngagctctcttctatagagagtacacatatcnntntatagctccgcnntaagatnnttctttagaantgataccatgnngnctatgcacatanntttcacttaangcatgccaactgacanattgatgnnantacacgcttctttatggcttcatttatnntaccccttatttttcaggaacatcaggtttatgttgaggcagttgctgccctatgtgatgaccgaattgtgtggagagaagatggtgttccacttattagaagtcatacaaaccctgacgagtacacttaactcatagtactacctcaaggattgctgcgcag

SEQ ID NO: 8555 - DNA, 12100 bp, Oryza sativa
gagcaagtcaacaaacacagatgaatttaagaagtaatgaggtattacatattctcaatccgtggaatttttttaactgtcacgatgcaaagagaagagggccaaagacacttaacaacgagtaagggagagacaaacattgtgaaatcatgaaacaatgttgaggacagcaattcatgaattactctataaagcaaacaaatataaatgttaaagccaattatttacctccaaatctcctggttgatgcatgagtggttacagcccctggcagtgagcacgtgacaagtgttgacatggaggacacttttaagatctacaatcaagcaacataacattgtcacatatgaaaagaaatgaaatgccatgccaaatgattgcaaaatgaaataactatttactacagagtgcataaatacatggcatctcaaacctgatttgactgcttgagaaacaacacagtatgctcagggataatgttatcatgcatataaaaataatacttcctccgtttcatattataagactttctagcattacccacattcatatagatgttaatgaatctagacacatcattaacatctatatgaacgtgggtaatgctggaaagtcttataatatggaacggagggattaagtcacaacacaggtttgaaaagtatgatacttgtcatacaactccgatatcaccatagtgcttttaaaagtgtagtcgagatcccaccccatatgctcaacacctcaatcgtcccgacacccattagttttaaacaattgggcagctaacaatcatcaagatgatggattttatccaacagatagtgttacccccataagtaaaaaacaaaaaaaaatctataacagtaaccatgatccccaatttttaacaatgctaaccactgccgtcaacacgatcctgtttttgcagggttctacagggagcacggttcaggaaaatttcccaataaccaaaaaaaaatgatcatgaaggggattagcatgatctttgtacaggttacctcccaaaaacaaagaaccgctgcggcagattaaaccctattctccaaactaaaatcacaaattattccccccccccccaactaagtatcgaaaccacgtctttatcaaactctccaacaggcaggatgacatgcccacgggatgaaatcatgaaatctctaataacccttgaccccctcactcacctaggaaccaaccaaccacgcgacgattcggcggccacctttccgcgcctcgccccccacaagatcgcgttggggatcggatcggccggcctggggtggcgcgagggtggatcctgctgctgagggcgccgccgccgcctgggaggaaagggaggagaggaggaaggcgatgggagagaggaggaaagcctcgtcgtaggcggcggcgaaggaggaggcgtgccgtgcgtctcgcggggaagaagaagaaggggaaaaattatgcagtccttcaccgatctgtgggacccctctcctctggcggacacgtggcggaactagagagaattcaatattcaatcctactgtaatggtgaaacaaaatggtgaaacgggatgaggtttttcagatatactgggaacgagaaaaaaacaattatataataaataacataaaaatccatattgttccataaacgattggctgcgttctagaaaatattcctcgtttttcatatacacgaaacggttaaacggtgtgtttttattaaaaaaagtctataaaaaaattgattaaaaaattatactaatctgttttccaactgacaacctcaatattttttttctccttctcatatatacccttaatactactacgtccgttccaaattagtagtcgctttgacctttttttaaacatttgaccattcgttttattttaaaaatttttgcaaatataaaaggataagtcatacttacttttgataataaagtaaatcacaaacaaaataaataataattccatattttttttaataagacgaatgatcaaaagttatagacaaaaactcaaagagacaagtattttgagacggaggtagtactacatagataagtcctcccaactaggggtgcaggtgggtttgtccgcgaacccgcttataggcaaaattagtacataacccataggtttgaccagcgggttacctattaatttgatctataaatagatttatggatcgacccacttacatatctagatacagcaaaccagaccacgacgcgaaaacccatgaattatcatttatttgacctatgagtgaacttgctggtcggcccgcttgcatccctactcccaacatgtaaacgtgagggtaaaaagtcacgccaggaaaaaaaagggaaatgcagagagttccgaactccttaggggctgtttggatcggagactaaaattttaagtccatgtcacatcggatgtttggatactaattagaagtattaaatatagactaatgataaaaacccattccataactctggactaattcacgagaatctaatgtgcctaattaatccataattagccactgtaatgctacaataaacatgtgctaattatgaattaattaggtttaaaaaatttgtcttgcgaattagtttatacagttagttttataattaatttataatactctaaattagcgtccaaatattcgatggatccaaacaccaccttaatgaatcacaatgagaaaaatagtataagtagatcgaaagaagaaaatgaagaagaatagaaacggctagatccgggcggcctgtttggaggttgggggcgagtggatctaataaggcgacgaagctctgggactcatctccaggctccagctatataggtcttcgggggcgagaacggcactcatctcccggaagctactgccgcacaagcacagcctactcgcccgcccgccggagcatgcggaaggatgttgacgaccggctgcgttggttcgagaatgagcacgcatcaaaactagccaaatactccctctccaaaataagtgcagccttgagtttccgtgtataaatttgaccgtccgtcttatttgaatttttttttatgattactccctccggtcttgaatttgttatgttttggagctgggttgtttcgcttcaaaagcttgacgttttggcctccccacgctcactttagactagtatacccctacgcatgcttacaaaccgcattaatagatgttgatgcattgtaattaatatgggtaaaacaaaaaataaataccttaattaatcacttatttgtatctgaaatcatgtccaaaacatcaacaaatagagtaccgagggagtagtatttttattgttattatattataaaacatgaatagtacttgatgtgtgacttatgttttttagatttttcaaaaataattcaaataagacgaacggtcaaagttcgacacggaactcatggctgcgcttattttgggacggaggtagtattaggttttttaggatggaaccaaccaacctaaattaatatcctaaattaaactcatggctacccaatatttttcaccctgtcacatcaaacgttagaacacctgtatgaaagtattaaatataggctaaaaaataactaattgcacagatggcgactaatttgcgaggcgaattttttaagcctaattgctccatgatttaacaatgtggtgctacaataaacatttgctaatgacggattaactatgcttaataaattcatctcactatttactgacggattttgtaattagttttttattaatacctgaatacccccatgcgacaccctatataatctaatgtgacacactaaaactttacacccttagatctaaataccccttaattattcttctagtatgtgtattcatagcgataagcgtgcacgtgttatgagcgtctacgtttgtattgtggtactaaaaaaatcataatactaacatgttatgtacgggaaactctcaccaataattttctagtgtgtccataacgcactaattttctaaccttaaatcatcctggccgttctcaccgtgggacggcttgagcccacaatgcagttgtcctcggcggccaccacttacctatcttcgacaagcagtgctatttacactgggaccaaactgtatatgtaattttaatataattataaattttgatgtcatatttactttatgaaaaaaaaatcccgatgctacaaaatatttctgtcttaaaaactttgcacaaatcttttaaaagctactgttccatccatccaaaatatttaaagctaaacatttttaactttaattgctaaaaatgaaaaaaaataaaatatatcaataacaataagaataatatcacaatttcattagatttattatttaacaaactactctacctgtcccaaaatataatatttaaaatctagacaggaatgtcaagattcgtaacactagcatatattatccaattctaaattattatattttagtacggagatagtatcataaattcataatagctctttgtatttatagcaatttatttttataaatattattcgttaaaataacatctcaaagatcctgctaaaataaaaaaaaatcttatattttaggatgaagtgatagcagaaaatttaaaattttaaacgatcaattaatttaagggaaatggtagtataatttggaaaaataatttgtaagtataatttggaaacggaggcaaagggtggacggctaaacccccaaacccccgaacagccaaacccttccccaccttgtaaccctcgtccaaccttggtgagaaaaaaaatggcggtctcagccgtcgccgcccgatctagggccatagcccgcgccgcctcctcctccctcctcgcccgcggcctcctccccacctcccgccgcgccacctgcatcaacaggtaccgcacgcgcgccaaccctcgccgcgctctgaaccaatcccccttttttcctcacgctgttagtgttacctgctgcgcctcgggtgggtttcgcaggttgcctttggtgtccgggggcctcctctccacgctgccgctccacagcgccgtcgcgtcggcgcggttacggtccgcgatcgcgcccgagtcacagagctggggtttagtcccccaaggtgaggttcttggtcactgcacgttctaagtgcattagtgtactttgggcccctgatttcaccatgtttacttcatccaggaacggaatcggttatggtttgtaactttccagtttagtttattgtaattgatgatgttagatgaacgtaaatgacgattttttttgttataaaaaattgaccaaaataggcatcagttttgttgcgatttgttggaaatctcggtctctttattctcatgggaggcagcttgtacatcttataattgcattgtgtttttagtactcggaaatgatatgagcttgtggtttgaaagaaagtctattgagattggtcactagacccgaagcacattgtggtgttatcaggttgctgctaggggaacttctatggttgctcatctgtttgtgaccaaggttatttgtactcgatattgttttgcatccatacacaatagggagctttatgggcatattgactttttatgcttttcatatgtactacctccatcccaacttatatgtactacctccatcctaacttgtccagctgcatagccagaaataaagtatttttgatatttttgggatgtaggtagtatgttttatacactaagcttgggttgactagtccaaattcctaaatggcaatgacttgagggttttgcttaaccccaaaggattcatagtatcgtagatggatattaagttgcaagttatagatccattgattgccgagtatataagcacagtataatagctttactgattggtgatttggtgcacgtggggctttacacatcatggaagttgatgccgtccagtatgtggctcatgcatccaactgattttttagaggaagtcactttgttgcaacactggtgttaatgctgcaagcagggtgctttcctaaccattcataagaagataaagcacttctgataaatcacaagacatagatgtaaaaactagtttcattgctcacatatttggatgtcctatgtttattgatagttatgagtgtatactggttgttatgttatcccaggtcaggtcaacaaaatcggtctgtttgcttttggacagcatttgctttcccttgcaggtttgcacaaacaataatgtgtgacactccctcctcttcttttgcagggaactccatgcctttatgagagcaaagcttaccttttccgttgtaactgcctaaacaaattgtgaatgctttgaattttcataatgttcatttcgctatcagaactatgaatgagcttacgagaacttatttttctgtggtaagaatggtttggtgggtaaaagtttggttgttttctgctatactagctatttttctgtgataagaatgcttatttgacttggctgatttggaattttggatacatttgttaccaagtgaacatatttctccatctattggctctacttcctgaggtgcagtttctggtgcaatgttctcaatcgatcatatggcggcagttcagtatcattatttctttttcagcggcaacaattattgaggcgattaatggggcatccgattcttgtgatctgtcatcttactgtttgggttggtaatggattctgatcatgagactgatggattcatggttttgttctgtgaacttgagtttcctgaaactatcaattttattttctttagtcttctggcttgttctgctctatatttgcatgcgagctaagtgtataatcttgtctagcagttgttctatttccctagagggaatggtgtacatgtctagaaaatagcaatatgacaagtttacaactacttgagttgagatttttacaacgataatatgtgggtttcaaattttcaactatatagtgtatgttcattggtggtgaattatattttgaagattttggttgttcaaaacaatatagtagatgaccaaattgagtaacaagaaaatgtagccctttttggggagcttctattgactgcaacttcttctaaaatcttttcctctggaaatctagcttttttagattatcattagctgcttcttataatatcgagctccccaaacatgccctgtatcacatgagatggctgttgcgcgaacgttcgcgggaaggagtttgcacgaatggacacgtgggctgggctcattctagaagagtgcatgcaagtctatctgatctgaaaaagtatgatgtatacatgttcctttctttcaagctggaaaaacatgcatgtttaagtatataaaataattttgcatgcgcatgtagtcataattataatttctacttattgagtgattttatcatataataaaatggtgcattttgtgtataatttttaaagtcctatattaacaaatatttaattgttgtagaaagtttcctaatagaatatttttcatgtataaagtttatgaatataaacattttccgtagaaagtttgtgaatggattttttttaatcttacattttttatttttttaatcccatgagttgattttttttaattaccgaagaaagtttcctaatagaatttttttgccatgtaaagtttatgaatataaagaattatttttgtacaaagtttataagcagagattattttaaaaacttttgaataggctttaatctgaatggcatgtttaaaatttaggatataaattattgaatataatgtgttgctattaaatactgaaaaaaattaccacgctaattatgctgggctttctacttttgtatgcatatggagctgaaatttcttaataacacctacgtatgctaatttcacggtactaactgatgagtgttaattacacgctaattaggtgacgggatccgtcggatcggagacattcgtgacaggcgaatgcttgcgagctagactcacccctcctattaagtatcaacttaggctgtgtttagttccttttaaagttaaaagtttatgttgaaattggtacgatataactgaaaagttgtgtgtgtatgatatgttgatgtgatgaaaaaaagttagaagtttagatctaaacacagccttatacatactcccaattaacattaagaactcgtctggaacatacgaatcttacaggagcttgacttgtccttttgcagcatttgctaccatgaattgcggtaggcttcaagggaaacagattacttactttggaaggttcattcggcgtctttggggcctcgtttgtaatgttgcaattttacgtgaattttgaagggaaaaaactgtttcccatgaaagtcacgtagaatttcttattagttcaaaagtatggtctctgaagtttttcctacgctggatgataatttgtatgaagtaaaaaaaataatttgagcaaataggtatgctgtagcggtaggtgagaatgaactagaactatcaagggcggtctacacaacttatgatggaaaatccacccgacattgtacaaatactagatcattagatttactttgagatttgttccatctccttctagtcagcctccccccctcccctctcccctcaagacatcgatgtcgaggtgccctgccccatcgtcttctctgtctgacggcgaggagccctcggatccgctacctctagtttgttgcttctaaattagtcactctgatttgcccttgccaccaaagtatacgacatagttggagggacaagatcttataagttggttctacccttgttaaactagtaaggtggtactccctgcgtttcagactataagtagttttgactttaattaaaatcaaactttttcaaatttaatcaaatttgtagaaaataataataatatttttaatcccaagataaatatattataaaaatatattcaattacagatttaatgaaactaatttgatgttgtaaatattactatatttgtctacaagcttaatcaaatttgaagtagcttaattttgaccaaagtcaaaacaagttataatttgaaattggagggagtattaaatatgagcacacatctctcataggccgcacatgtcaaattctaattgggtaaggatgtcacacccctctagacccttaggaaaacccttcttttcgtgcttcccaaacccaaacacaaacactaatctatgtcctcttttgttcgtcggcactggagaaagggtggaggtcaccaaagttagagaaggagcacaaacacgaatcacggtttagaatctgtaaagattttgttcctaaattatccgccgaatgtcatttagcaaatccgtgaattaactggcacgcgtgtatattagttcatgtgatagaatttaaattttaaaacttagaaataaagctgagaaataaataggattagacggtaaacccggccgctcatgcatcacagaaccttatcctgttcgctcctgaccttcgttaaaacctcacccgctgctctcccgctgcgatggcagcgcgccatggccatggcgcccctcttcgttcctcctcctcatctcctcttcctcctcccagccaccacctcatcatcccccgctgcttccctcaggcgactcctcctcccgccgctctcgtgccacgcgcgccaggtgctcgacgtaatgccccagggagaccgcgtcgccggcccgagagccgccgagggagctggcgctaaaggcgcgacggcgcaggtcggcgtggccacacgggaggccggcacggcggggcggcatgggcggggccgtcatggcggcggcgcgaggccgtggaggagaggggaggacaggcccgcgcgcggaggacaacatgccgccgacgacggggaggttcagggaacgaggaggggtggggatctcaaacaacgcagggagggcaggcgctggacgagaggcgaaacgcaagcgcgggaatctggaaaggctggaaattcggggagatgccagagtaacggtagtggtggcaatgccagcaggaaggggaagaagaaagccaagggtggtgagaacgaagtcaagctgagagtcgagctggacatgtgctcgaagaggggagacgtgattggagccatcaacctgtatgattctgcggtgaaggaagggatcaaaatggggcagcatcactacagcgtgctcctttacctgtgttcttctgcggcgcttgggtttgtgcaaccggcgaaaagtggcaatgccggtagtgggattgctagtattgggcagttacattcatcgtctactcaaagcgtgggaaatttggagggagacgatgtacaatctgaaggccactctgaagatcaggagggaaacaagaccgatttgtttgcttcggatgatgggacggagaaaccgagtcgaattccagtgagtgatgagctgagggagtatgcaagaactcgagggtttgagatatttgagaagatgcgctcggaggaagagaaagttcccatgaatgagtctgctctgactgcagtggctcgtatggcgatgtccatgggcaacggtgacatggcctttgatgttgtgaagcaaatgaaggatcaaggtattgcgccaaagttgcggtcatatggtcctgctttgacggcattctgcaatagcggcaatgttgagaaagcatttgaggtggaagcacatatgttggagtctggtgtcagacctgaagagcctgagttggagacacttctcaaggctagtgtggccgcacaacaaggagacaaggtttattatttgttgcataagttcaggactactgtcagacaagcatcttcaaccacagctaaactacttgaggattggtttcagagcccaacagcatctaaagtggggaagagaaaatgggattcaggtgctataacaaaagctattgagaacaatggtgggggttggcatgggttaggatggttaggaagggggaaatggaccatatcacactcgcacatcgacaggaatggtgcatgccttgcttgtggagaaaaattgactattatagatcttgatccaaaagaaacagaagattttgccacattggtggcaaaattagctatcaaaagagagaggagatcaaactttgataactttcaggtcatctatctctgaacaccgtaaatgctatttttactaggctgtgcatttaccaatacatgtcatcaatattatgccttgattaaattacactaaatatttccgtaagtgtagattgaagccaaggtttacagcatgaaaggatacaaaattagatgggttttcaatattgagtaaattatgtatgctcagaattatatccaattgtaaactaaatataaatataacaattctccatctcattttgtatatttaatgaatactgtgcattattttattaagcagtgtgcaaactagaaaatttcatatgccacaatatcttagtttctctttattgcaattaatttttagccaacttgcagcctctttgttggaaaaagaattatcatctttaaatcataaatagttcttacagcgtgtgaatcatgatcaatagagctttccagtggtgtgtgtagtccatatcctttctcttaattaaccatttagcttgactttttcgctgtatttttctatattcagaaatggttggaaaagcatggcccttttgatgcagttgtggatggtgccaacgttggcctttttagccataagcatatttccttgagtaaggcatgtatattgtgataaatattttcttcttcttgtataacatatatctaaaatactaggcctctatctttttttaactggacagattaatattgttgctgatgttatacggcaaagatttcaatcaagaaagctccctttgatagttgtgcataaccgacatctcactggagagcgcatgcaaaagccttctaatcgtaagttggtggaaaagtggaagctttctaatgctatttatgcaacccctactggctcaaatgatgattggt

SEQ ID NO: 8556 - DNA, 8352 bp, Oryza sativa
tagtacaaggaaaacttgttggtatccgcaatcaacgattgcataaaaaatgagtctattcaacatttgtttatagattgtcattatgcaaagtttatttggagaatggttcagttctcttttggtttatacctccctagaagtatatctcatatgtttgatggttggcttcagggtgtggacaaggaaaagagtaaactgatacttgttggtgcctcggctttatgttgggctctgtggttgtgtggaaatgatagggtttttaacaaatcaccatctgtttcctatatgcaggtgattttcaaggcaacatattggcttagactgtgggctcaactacaaaagtgtgaggaagatggagaattcatgtctgttgcatgtcgtaaccttgagtcaacggttatgcaactttttaccaaccatggatggagattcaccaatagactggaataatgtttttcttgtcatgttaggacttcttttatttttggttggtgtgcttgtttaattttggactacgcctttttagtgtgctacttcttataataattggttgtagctctcatgagcaaaggccgggatgtttcattccattatctaaaaaaaatccgcaatcaacgaagatgcataattgtaactaaatataacttagattaattataccttataggagatcacacctttgaagcaaccagcaaacagagaagcagcaacgaaactcagcaaagctatgacccaatccacaagcaaaacaacttgggactaggaaagaaaccctaatctttaacttcactttacttctgtcaatctcaaggataaagcatacatccatacatcagtgatccctgtaaatttgatacagcaagattgcatactctacaagaaaaattcccttatgatctcttctgtttcttttcgtaatatatcatgattaacaggagtgtacctattttgatcagttctctctacaagctgcaccagttccactcttcagatcttgcatgtttcagtgccaatagaatcatcatctcaatctgtccttgcaggaatgataacacatcggactcatcaggcgatctgaactgagttattaatgaattattactactcagtcaccttgtattggtgcactgacaatgtataactgaatatccactataagtttagttaactgttctgcatattacatatcagtttggcagatccatagtgataactgaaaggatcacttggaactaggactactcctaacaaagctagtaatatttctattcgtagtgctaggatgtgtcgcatcccgtactatgtttattattatttttgggacggagggagtataagttattacacggacagtacaggactgcagggaagtgccaagttctcaagttttgttgaaatcgcacgagttgtggaggatcctactgatacagcttggaagttccttgcaattgcagatgttccaagagaaacttaaaaaaagaccaacaaaacaaaaaatcttatgagctggatgagaaacaagatggtcaacgaggaaagctcatagatgaccagaattcctcctccatactgagccgcctgcttgagttgtgataaccagcgtcaccaacagcaacgatgttggaatcgctctcttcagtcaatggagaattcaactgaactgcacgtcgacctctgatagtgtttacagcaccctgcaacccttcaagtttcacctcaacctgccgcattgtcggcctgtcttcaccctttaagtttaagcacataacagcaatttctgccacttctctggcttcttcttctccctgctccttagtgatttgactgtctactatttccaagagcctgtcctcactaactagcaagataaattgttcggttagattgaagccttctggtgatatgtaggaagttggccttcttcgtgttattagctccgcaagtatgacaccaaagctgtatacatcacttttctccgtaagtcggcttttacggtagtactctggatctaagtatccaaaagttccctggatagtagtagttacaatattttgatcaattgggatacctcgagaagctccgaagtcggatacttttgctatgaacctatcatcaagtagaatgttggtggtcttgatatctctgtggatgattgataccgaagcagctgaatgtagataagcaagagacctagctatttcaagtgctatcctcagccgttccttccatgggactgattgtgcagagttgacatgaagatattcatgaagtgttccatttggaatgaactcatagactaacaatggaacttctgtctcaagacaacatccaaaaagcttcactacattcctgtgatttacttgggaaagtatggcaacctcgttaataaatccatcaatttctctcttaatagcatatcttgacttcttgatagcaacaacacgttggtcagacaaaatccctttatagacggttccatggccaccaccaccaagctttcgagactcgtcaaaattgtttgtcgccttctcaagctcttctaagctgaagatcatcctttcagcgatatccttgtctacaagttgatgaagcaacaatcctcggttttgcttgaagaagaattccttcagttttttggcccttcgagacttgaactttcgccttacgacaattccagtaagaattagtaccacgatgattagactgccaccaagtcctattccaatgatgagtcctggatttgtaagaaaatgtaaattttaaatcgtttactccgttaaattgatctcaacaagaaacatagtaatgaacagtaccctcagacattgactgaactttctttctgttacctgaaaatttaagtttgcttgaaacacatccattttgtatatgggcgttaccagatgtgccacctggacagatacactcatatgatcctactgtatttatgcatttcccaaagcataggggtggatttggcagcatgcattcattaatatctgtgaaaaaggaaataaaaattaaattgtgcaaagtgatcacgcaataaggttaaatgtatctgagctgcattttactgtttaatctgggtatgtgcccttgcatgcttctaagttataacctctcaagtgtcgatcgaatagttctgaaaatttcttaactccaaaactgatacacgtatagagaaacaaaaggaacaaattaaacctatgaaaagtagaggcactatttatagccagttctgttgttacaacttgtagaaaacttgtagtcttgcacgcttgtggagtgatatgagacaataatctacgctctcaaatttttttataactctttaagtgacatcaaaaccatgagtgcacatactgacatatctgcagagagtatcataccttggcatccatttggcatgtaagggttaccatcatatcctgagcggcacttgcacgcatagcctctccctgcagggccatcaaaacactcactgttgtcactgagacacccaaaatcactcaacttcttagcttccacgcacgatgagttacccagcatccagttaaccacagtccggacacccacattccttgcagcatccggcgccccagcgatggcacccagccttgacaggacctcttgctgcagcagcatggcattgtctgccctcctccaccactcccccttcaccaccaccatgctcgcgttgaacggcaccgcccttggactagactgcagggagagaagcttgatcgtgtaggagttgtggtcttcaaccaccgatgcgttgcagcagccaatgccatagcatgtgccatccgttgccagtatggggtaacctgggcggcaattcgaaacgcagttgctgctgctagtagcattgtctcctgctgctgcaggagaactacctatgaagaagtggaaaccacaacccagggtgatgaaaacattcatgtctgccgatacccggaagagtttgtcatccaagtcgaggatccatttctggttgtagctgtctccccccaacatttgggtgatgccggtatcaaggtgcagaactctacgtgccagctttatcttgtgaacttcatatccagggccgttcatgaagagcttggggggatcataagctgggtcgcacactagtttgaagccctcgcggaagcaccgttcgtcgccaataccgaatgggtaaggtatggttgtgtttccgcatgtgtcagtgcaaccaggcaatgctatgttatatgaaagtatcaggggtattgctgctagaaactgcagcaagtgcagtgtggctatggcaaaaacatgcattttactgacatgaataggtgccctgatcagtgtggcttggtggtttggacttaggacacagttcatgtcacatatataggccttgacaaagcatttgcaggaactggtcttttgctaccttggaaaatttcttcaccggttatatattacactataaagatgttatcagattgcaccgataattgttgcgtatcaaatcagggtggttatatgtcactttatcaaccttaaaggacaggacggcaggtttaaaaagagtcaatctaggacatgaaaggaaccacaatacattggaaatttcatttcttttgagttttgcagtttggagctccccaaaaaacaaacctgaagaaagctcagacatatttatctacttctgtatccaaccacagaaggcaagactatgtccagtcaaactgctgacctcattagattgcagaaaattagattaattacattgaagtgttgaacatacgttaaaatggaaaatgaacggcagtgacaaggacggtccggccggcaggccaaacatgattaggaaacttgaaaacaatttccacccgttcaaacttcagatacgcatcaccattatgaactattttttgaacacaacatcgccatgatgaacttttgtttaccacaacatcaccattgtgaactagatttatagggtttgattctcaaacagacaaattttgcaacaaaaaaaaaaggagggagaagaagatgtcaaaatgtcatggcgtgaacagatcgaacggttaaatttaacaggtattgcacttcgtaggtatgtataatgcagaatcacctaggaattttacattagtaagattttacccaactatgccacagtggtactactaaaacctaacctaaatgcaacaatcacttagagcatgtacaatagcagactataaaccagctgcaaccatatacttcctccatcctaaaatgtttgacgccgttgacttttttaaaaatatttgaccgttcgtcttattcaaaaaatttaagtaattattaattctttttttatcatttgatttattgttaaatatacttttatgtatacatatagttttacacattttacaaaagtttttgaataagataaatggtcaaacatgtttaaaaaagtcaacggcgtggagggagtatatttttaggagataaatgaagaccaggaacggaaccgcggcgcggcggcgtgcatgggcggctccgatggaaccggtggccgctccggccgcgggctccggctcagccccacctgctacgcggaaacggaaacagcggcggcggggggagccatgagccatcgaggggaacgacgctcacaggggcgctgtcgcggttgcggacgttgaagcgagcggcggcggcgtagattccgtcggcgggggaatcgaatcgggcggaggtgccatgccgagcgccggctggttgtgcgccgacggcgtcacgatcggatcggcgcctccgccaacttcggtgtgactccgcgctctccatcgattttaaccaaggtttcgtaatcatccccccttgtatttaccatagcatgagcaatttgagcagccatcgactttgtgaactacctttgcatctagatttatttactcttccaactgaaacacaagtcaagattcctactcatagtcatcgaaagcatgcaaaagattaaatctacttttatagttttatttatttataatgtaacgaccacgtggttgaatgatgcaaatgccccttaatttttatcttgctactagctgttgttaattcttattttgaattggagtcctgtcgctttctctgaaaaatggggagtgctgtgctgtcctatttgggttgttagctgcagggaaaggaaggttgttcaacttaatcaaatcgtgttgatagtgcccgaattcctcgtagtttcatttggtaggttggatgcataagggtagagtagtggttaattagcttggggaatggagactacaagaagctcaagtgccatctgcctagtcagtggagattgagagagcatcagttcaacatatggagaggttcgcaagtatgagagttgtgttttcgctatctgtacttgcagttctgctgctacagctgctgttgggtgtagcaacggcggcagcagctaattgcagcacccactgtggcaacatcggaatctcctatccatttggagtagagcctggctgctaccacgagggcttcaacctcacctgcgatcgctcgcacaagccgcccaagctgttccttggtgatggctccgttgaagtgctcgagatctcgattcctagtggcacggtgcgcatcaacagcagcagtatcgttccagtatcaacatcaagtgctgttggaactggcagtgtcaacaagacagggaaataccacacatggggtggactgagaaagggcggcccgttcttcatctcgccgtacaagaacaagttcctggttctatcatgcagcaatgttcaagttcttcttcttggaggcgataattccactgtcaatgcctgtgctacttactgccctccagcccccaagaaaggccaaccttttcagttcccaatgcgcaacgagtgttctggtattggctgctgcagtgcggccatccccaaaggctacacatcctatagcatccagatccaacctgccaatgaaatttcagagtttgatgcagagtcctctgtgtacatagctgaggaggggtcctataatgccacacgccttatctttgaaactgtcagtgcactcccagctttgctggactgggctattagcaattcgacatgtggtacgaagccatctgcagcccctgcacctgcatgccgcagcagtaacagctattgtcaaaactatacaagctatgtctacaatggctatcagtgtcgctgcaatgctggttatcaaggcaacccttacattccaaacggatgccaaggtaaacaagtcaattcaacctgcttttattttctttaagtcatacaaagttaaaatggaaatcagttgaaaacagctcggtgcttcgataagtatacatctatgtggctattttcccagtctaattacatgcttcttcattatttggttagacattgacgaatgttcacactggaaactccactcatgctatggtacctgcgtaaatatgcccggaacatttcattgccgctgtcctgatgggacttacggcaatcccttgatggaagggggatgcatcaagataaagaattcctctcaaggtgacaatcactccctaattaccttgtactcatgccatcaactctatatgtagattttttttagtaatgagactggtggtaatggcatctacatagctggcagttggtatccagtaattgatatttttttgaaaggaatgttcagtagtttttattaattctctgccaattaaacatgtctgttgctctgttctatcttcattacctgagtgcaaataattgcgcattccagttgtttttcgtttgtttctctgaagaactgttttattcattttacatgagctcttcaattatttgtttcacattctgctcttacacgtcgcagcacacactactatttttttaaataaaaataatagcctttgtatttagaagcagattgttctgcactttttcagtaaccatttgtttatgatcaccactaaaatgtgggaagctacatgattatgtgagcttgagtggttacttttaaaggaaaaacatagttgttcactttgaacaaataatacggcactgtggtgatatgttgaataaactaaaagtagactatgtgatttgttatgtaattttgttgtgttagttctgtacctaaaaaatcatgatgtgttgcatcaacagatcaactaaagtagactgtgattcaccgtatgcgcattgcaactaattttgttgtgtcaggtttgtacccgaaaaagcatgatattaatatttacaaggtttctaccactatttattatgttctttcttactatcctgcataggatctttactggaa

SEQ ID NO: 8557 - DNA, 6558 bp, Oryza sativa
agggttatatataacttgccattgctgcagtttctactttggtgaggttaccggattagcatccaacattcatcatttacagttcagcagctccactagagttccagaccaccaggaaagcaaatcttgtacagctggagcagcacactcattaacccagttgaccaagatcagctcaaatgataggatagggactactccacaaccactcagaacaacagaccaaagatagcttgatccagttaaaccatacacatctaacaaaatcacgagcaagacaacaaaacaaatcgccgctcgtattacgtcaacccgtacacacagcaatcgatcagtaaagtaaaaaaatcagcagagattcgacgaccgccacaccagaaaaatcagatatttcagttgttgtatacaggtggttaattctctgataaatttttcgcaggaaggtgggtgggggtgaaacgattagcaggaggcctcaccggtgagcacgatggccttgacgtcgtcgcgatccatcgcctccgcgtacttctccttcaatccctggatgactgcagggagcagcaaaaacccccaatcggagcacacggaatcagaaacaaaacgagtaaaccaaaaaaaaaaagaagaagaaatcgaaattaagaaacgaggaggcctactgatgggatgcagcgcattgacgggcgggttgcagatggtgacgaccgcgacgccgtcggcgcccacctccatggtgacgcggatcgcccccgccatggatgacctagggttcttcgttcgttcgatctcgagagagagagggagagggggagaagaggagatggatggaaggtggaggaagtaatctctcggagtcgggagggggagcgtggggaggcaggagttggggtatttatccgggaggctctgaaagaggaagacgaaataggctagttagtagtagtagaagcggctgattgggaagaagttgatgtctctgagaggaagagtccaaatacccagtagcaactactaggaccacgtgttatgtattttaagccctaatcttttattattattcacgtcatcaatgatgtttatcacgattttcactactaatattgtactcataataattaggggtagtgaccaactatcgtaccaataaaaccgagccttatcatttattatgcaggtataatatgtacttatatcttataatattttgtcatcttttttattcgaatgtttttgttgaagtgtcatgatgaaacaagtccctaatgtaaaaaaacatagaaaataatgtagatcattttaacatattgttatcctatattactataaaattgatgttaactaaatctcaccatgtaaatgtgtcatatcatcactcactacaaattatgtaaatatcaatatgttaatatcatgccaatataacttttttttatttttagaactcaatatacaaacaatgtaaatcattatctccacattgtttaaatatatgtatctatcatttctataatttataacgttcgttcatctacatatcccatagtaaaagcacgggatatcaactggggtgatgaagtgttttgttgtactcccttgatcccttcaatcttttctatgacgttggttagctcaaacgagcaatatataaggaaatgaaggcgtattttgtttatttagttgatcgtgaagactgttagctaaaaacggtatttaatcaagccaatccgacctagctaatcacccgaataatgcatgtgactctccctatccaaccaaaatggcctttaaccatcggagaaacatttaggaagattaaaaaaatgaccctattgccaactctcctcatatgcttagcgtatgcaatgacgcaagacgcgcgtaattagacaccacccttcaattctcactatttaaccaggtacagcaaagaaaaaactttttaactccagcatcacagtacccattttttttctcctcgatttaacacaatatatgcatagtactgttccggaaaagacgacttttgctccatacggcaataattcaacggaattgtggaaaaaatacagagaatttcttttttaaaaaaagaaaaaaaaatactagcaggtacttcctccgttctataaaaaaacaaagtaagtattggatgcgacacatcataatactattaatttggatctatctctgttcagatttattgtactagaatatataacatttattctatattcgtttttcgtgggacagagacactatgtgcggtcagacagtcagactaccacgcaagcaaaagcaagtaacaaaaacgataagatgagatgagaagcgagagctcccgtgttttgtttcgtccggaaactcgaacgagccgtcacaggcacgcttcctccaatgcgatctcttctactactacgacctatcccccgccgtccaaagtggatcggacggcccatgttcgacgcaggccgagccaaatacgtaccacgcggtggtgttgcgtacggggcaccgctatatatgtctcctcgtatacgtcgtggcggtagcggtgcagccctggccgtcggatcggagcccccggacggccgcgattttatcgacataggtacataaatgaacatgaaatatcttggttgtcggatgagtatatttgattaggagtgtgacgtggactggttgtgttgctgaaccgtcggaagtctcaatccacgaagatgacatttttcgtgtctttctgacagcaaccttgaggggatcacttgtacaaattttcttccaaaaaattataattatagtataatcatgatataattatattgtacgtaacttttaaaaatctctccgtaaaacgctatttccgtgaaaacgaatcctctcacatgtgtgcgcgttgtgacttttttctttcttcacttgcaaaaaattttgaaacaaatataatatttcaaaattatgtgaaagttacgtacaagttacatataagttatagtgtaattatatcacgattgtattgtaattatatatgtcaaatttttaagagaaaatttatcgctatatatatagcaaaattgtatgttaatcatgtctacaattaccgaattaaaaacagccaggctagtcctataagatacacaaacaaatcgctttccagtcatataatcagtcaggaatacaatatgctcaacccgacaagccaattaagcgatccaactcctaccgtaccctacataaggggggtgtttagatgagaggcgtaaagttttagtgtgtcacatcgaatattatatagggtatcgtatgaggtattttttataatggattaaaccggcctctacacccaaaaaaggatgtatttgggcactaataaaaaaactaattacataatctgtcggtaatccgcgagacgaatttattaagcttaattaattcgtcattagcaaatatttactgtagcaacatattgtcaaatcattgagcaattaggcttaaaagattcgtctagcaaattagtcgcaatatgtataattagtttttttttgtctatatttaatactttatgcaaatattaaacgttcgatgtgacaggataaaaaattttaaggtggaatctaaatagggcggaaaatggttcgacttcggggttcagacctgtccatgaactgcctgagtgacagactcacagatgttgaacacaacaggaacttctgacaagatgttaatttctcgtcacaccctaatttgtgtgcttgactacaaatctacaataaagactgttttttttctaatctaaagactgcacgtttttgtgacaaacatgctgggtccaaaaaaaaaaaagaagattagaaaagaacatcatagcaacttccttcaaaaaaggacgagacgagaccaacaagcaagtcgagtcttcgtcaagtctgaggaattcatatgggaagttgtcataaaaccccagagaagttgtcatgaaaccccggcgaaaccacgcactccgcccacatgtgtgctttcagatcatcacatggcgcacgccatggtccaggcagtcatgttgagggctttcagattccaaaagttttcagactccatctgagaaattcagtgtgaaatccgtccactgactagcatatttccaacatttgagttattttaactttaccaagggaaaacagccgtccaaaagggtcaatttgcgattcaacattccaaaaagcattccaatttcaacacctgcaataatacggtccatttggatgtaccacagcactgaactcacatttccagtagctgtgtccagtgcatctgagcttcctctcggtgaggtcaagccatgatttactacgggtaatgtgaacgaaataaacatgcacggcaggaattcttgtagagttttacagatcaacagatagggtagtgctaacaagttaaacaattattgttggaacatatcattgtttgcatcatatccagcgcgttgccttcgagcaatcaggtttttctcaaactccttcaggtaatctaggagcaacacacaagtgaagagaaggaatccaccgaagtagttgctgccacctccaccacctccgccgccaccaccacctttgccgaaacggaatggaggaaaaccaccgctcccatcatccaattttggcccctgagtttttcctgaaagtcacaggacagaaagtgaaattaagcgattgcgttcctgccacctatagaataaaattcaattagaggcagatctacctttggggtcagatcgtttgacggttgcagttgaagatttccgctgagcactttgggtctgagtggcattgcatcttacgctctgttgtcaatagcgttcgcacaaaaaagcagtcaatgagaagatctgacagtgaagtatgcagataagcaagctagcattttccctttcatcagttttgaagttcagtaactggaggtaaagcatcatgaataattcagaacatatattaatcattgagattgaccatgtaccagggataatattgcttcttttagtactactattaagaaaaaactgcatctataccaccagagtttcagtgatcccaataaataacatcagaacattacatcccctgtcatgctttgttcctatttcggttttgaccccttttttttaccacgcagaatgactgcaatacccactgcttgctgtcttcatcatggaggtgacactacttggcttggctgctcaatctaccgtgctaagagggaagcaagaaaccaggaaaagcatgttcttatgatcttgatctcattaggctccacctaggacctgtgtcaacatctgaggccacctggcagtgcagtcctcagcctggttgtatgcatccacagccaatgctctcagcccagccacactgctcacactgaccctcatggtgaggccgctcagaggtgggggtctcggccaggctgcagacgctctgatgccttgaccgcccacgtctctttgctccattaacttgttgcccacctccagcgacactaatgatgccgccggccactactactggctgctggagagatgtgagatttggtagtgcaacaatttaatattcacgtaaggacaaaatcaataaatcacccttatctaacaccgttgccttcaaatgtaacagaagaggtatttcgaatttttagaccaacttgctggtatatattagaggtgaaatactgaaatgttttgttgataccatcaaaattgtagtggtactgatgcagttttatctactaattaacaattcaaagcaccttatctttaaatgtatgcagcatgcacatgccatggcccatgagatatgcacctattgagcactacgattagtactagctaggaagggtataaccaataaaccaatcaagtatggtaaaatccttatctactgtattttgaactaaaccattttaacatgaatatttcatagttcatactcctcagtcccaaaatatagcaactaggacagaattggacatatcctagtactacgaatttggacaggggtgtccaatctggtcctaagttgtcatattttgggtcggagggagtaacagtaactcctaattcaatttttctatagaatctatatataatcatatataataaaaagagggtgatacatgccaatttggttattgatcaaatgccttattgtcatgaactcacaataagctaaccaaacagaaaatagtaaatttgtttgcaggaattgaacacttaattttgtttataggaagattgaggtagatatgaatctatgatatattccaacttactcttaatactgctttagcagacacttcccttttaaatgagatgcagctagcttgagatgtctgaaattgtgaacctgcccagagaaggtataatgaaaaattagtacataatgaaacattgtttggcaaaagaggatcaacaagatcacaaggtgcctgatcaggagactaagggcctgtttggtacagctccaactcctaaatattactccaggagttgagtctagagtggagttgggg

SEQ ID NO: 8558 - DNA, 9853 bp, Oryza sativa
tccctagcaagtagcaacatagattgataaagtaaaggcaactctttactcccaactaattttgtggcaagtagcaacatggattgataactctttactccgactaattttgttgccaaagttcgaacaccaaacctgaacaagtgagttttgacctgcctgggatggaagagtaggactcaacttctgcagcgactgaccttgcctctttagtatcaatcagagatgcttctaccacgatcgacctccgttagagccatctcagactccttcggcgcggcctcaactgacgcttacaccagctcggactccttcaccatggtctccaccgaagcaacctccgtgggctctgcctccttcgccgcagtctcacttgcgttcgcaaccgccgccgacgaggttggctgcgtactagagggtggcggcgtttcgtggggggcatcatcggcgcggtgttgccgctactagatcggctaggtggggagagaggttgggggcgtggtggctgcgattcacggtggaggcagccaagagatgcggtctcatgggatgaggaagcagtgagagctctgcctcctttgcgggggagttgccaacggtggcttggggcggcatagcagtggcggagatgcggcacacgggatgaggaaacggcgagagctctgcctcctttacgagggaggcgacggcggcggcagcttactgttgcggaggaaccgacaagagtgcgcgaaagagatagggagaggcgataaaacgagaaaagtcgggggtgggaaattggggatcgatgatcgatctgatgaccttgtgtcggttgatttgtcagtccctccaccgacatttgttggccccagttgtcagtgatactaccattgagaatgttttaaagagtatagattatagacagatagtacaaagaaagaaacagaaatgcaaaatgacatagtcacaagcttttaccaataaaagtgttagaaatttgaaggcaaatgctcaggtattgttattccctgcactcacaaatatttgcacaattgagtatcaaacagttaccaaagacacaggaaagtgctagtaatgccatggtagcattctagcaggctttacggaacatacaacataggagtaattgcttttacctgactgacgaagcctggagcagcttatgtaaaacatggctgcaataaacaaaatttacacctcaagatttcacacaataaaacatacagagcacagtatggttgtgttcatctttaaccactccaatattcattcctagcattgccctttaaattcagttcatgaagacatttctaatggtgaaacttccactgaaacaacccaaccaaggaagtaactacacagtacaaaacattaaacattattacaaagcttcaggagtcctcaagcatcgagataatttttattagattcgcttttccagatagcctatcaacacgaagaatctgtacccagctgaaagatattacatttcagtggattccattccgatgacgggaaaggacacgctggtcaccttgattgcgaataggaaacagatcatcctcctgcctgtaaccatggccacggctattgcccaaattatgaggtcgcccatgggtgtcaaatggatgaacatagtctcggtcaggtccacctcttccaatggaggctttgttcaagggcctgtcccgaaagggtgaacggcttctctcccgtaagtctagtcccctgttcatgggcttgttacgcatgggtgaatgacttctgtcccgtacagcttgtccccagttacccctgggagaccccaaccgtggttctcttcggtcaagatatggtccatcgcgtggatgctcccggtgattatagccatcccagtcaaacttcccacgctgtcggtgtggaagttcatccccgaagttgatcctgtccctgtgcatagggtctgccattcgtcctggacgatcttgggacaactgcgtagaatagtccctatgatcatccggtcggaccataccccaaccacgcggtggtgatctatacctttgtttctcccttggcagatcacggccactcggtggaccaataaccctactcggtggcccttgtggtggagagttgaactggcgtctgtcaggactgtagctggacttgtacatggcaggtgcatagcgttccttgttgcagttgttacagtgagaccgccgagcaaaattaagatttccgcaactgaaataaaaaaaataatgagtaataaatttacaagaccatcagaagaatctatttcaacaaaggaaagaagaaacaaatatacattcagcatactcacgtgggattctgacatatccagtcaccttctcttggagacaagtttgggtcattcctgtgcacatattctccattaatgaagatgaaatcttttccaggagcaccaccatccctcctgtgtggtcttcctcttccattgggaggagaaacatattgtaacctttcacctcctttacttgccagctcatatccataacgtgaaccgtcattgaaattgctgctttctactccgcggccacgtggaggtatcatggaacctgagtgcgggtgatatcctgaaaggcgagcgacaaacattctacatgaacattagaagccacaaggagtaacagtcagcaagtaggacttgcatcatgcatgagttctgcaactcctgaaggtgaactgctttcagcaaaggccctcaagagtcaaaccagaaaaaaaatgcattgcagaaataagcctctgaaaataatttctgtcaagtaaacagcacagtaattgaaggtgaactcagcaccatatgatcctgatctcttgtctggtttataaagtagttaaaatatcaacaatgcagcaacccacatttgggctcgccagtcttgcagaattcacatgttcctaaagcctggttcatctctttatccaattcatatcatataggttaggcctcctggagcatgatctaatcctctgcaaggagttccacccttcaatttctacaatccgaagaaacagacggacattccagaaacaagtggtgtcctgagctattttccaacttaccaagcactccttccaccattatttcccccgaatctcaaatgttatttttagccatgcactacaagataaaccagagatctttggacaatagatgaactgaacatctccattctccatgtttccatggatctttttcttgtgtgccaatcgttttgtagtagtgtaagcagtcccaggtaactaggcatctcaatatccaattcacttataaccaagtccgcaataccaaataccttcattttcaacaacattttccttgggcagatgctttcttaagcaactaaaacaccctagtttatttctataaataaggtaatcaaggccttatctatgaggaagtagctataagaagtgaagagctcaaatcccataattctgtctattttgacaagaacttggatgaccaggcaacccagagtagtgattcctaacagaatacttgcattggaaccatttagcattgaacaaccaaaatatagcaaaccaagccattcaaatattgtcaagtgtccatctctcatccttcgttttctttcatgtttacacctccaatcttctcataacttgccaaatgcatgactcggtaaagacatttccaagtgagaagtggcatctgagcatagacagaacagctcagcagaaaaaggcagcaaatagaatacgaacccatcaaataataaatgttcaataagtaaatactaatgtcagaaagaaaaaaaaaaccaccttgacatgttatcacatacaagatatataaaaataaaccgccacagtatattatagtaattacaccagccatggaagccatggaaaaatatagataatacacacaacttatcaaagcagtgtcaggtgttagatatcaacattctagtttctgacaaatagcaaagtaactttgggcacaggaaaaacacatgtaaaagttcataccacttacactacatgatcatgtgacaaaaaactaaacttggtggaatatgtaacataactgaggataatagtagttacctcatgaagaagcaaacagcctttgcttaaacgtagctatgataaatttttatttatagttgctctatacaaatctttatctttacctatttacaaaaaaaaaaaaaatgtttccaacttcttctttttttcgtttgtccgtcttcgtgaatttttttctgtcaccatgaccgacatggattatttttcctctgtcattcgtacggaaatcaggcagcggtacaacacggtgaatccaaactattcgctagagcccaatgggctcatactctggtgctgcttgttgcatggcaggctgtgggcctgcctgcccaaggcaaggatgcagggatatggaataagtccactttgactccctcaaatataggatcaacctaatttgtatccctcaactgcaataccagatattttgaccctccaactattaaaattaaaactagtgcaaaatgactcttggtggttttgagggtggtttttgctaacgcgtctcctctcttagactcctctctctctttttttctctctactttccccacatagcggcctaaggcaaagcggtggcaggacagcctcgaggctcgaggcagagccgcggcggggtggcctcgaccctcctctgagtcctctcccctcttcctatgccatggcggccgccgaggaagccatgggcggcgagcgagcggatccaagcaggtcacgtcatctaccaccggaccacaccgctctccctgtggtgtcagcctaagccactggagcacgtcgcgcgcccttcctgtagggcgagctgtgcggcggcggtcggcattggcaatagggcgagggagctaggagctacagcttatcctcaccttgggaaccagaagacggtgtcctcactgggaaagaaggggtagctggcgatggcgcgctctcctcgctaggagataattttgttcagttattttaaaattgtctttatccgttgcaacgcacgggtaatattggtagtaaagcacaaaaatcaaagtagaaatccaattatgtctattccacagtactgtgcttgctatgctctgggaacatgaatatcaaagtccaaactgtgtatgtcttttcatattttctaagctactatgcaaaatttgttttcggtagataaatttcagctttatttcacagagatagttattggttcaagagttcaaaaacacccctaataaagtccatacagcatagcacttcatacttggcatatagcatataaactttgttgtgctgtttggaccagattgccattagcttttcttttgctttgctttatatcttttctgtagacttcttctaagaagctccatatatcatatgtgtcagccctgattagctctatcatattcctttgatctattctttgctcctgtctcactcaatacacccatcaaggaacaagttatctctaataaatagaatgatatatttttattttatgagttccattaaagctactcaaatatctcgtttggacattatagtgccatttcgtaatcatacacttggtaattactgcacgcaagttaaaaagaaaaaaagaactagagttttttttttgggtcgttgttatgaattgaaatactcaggatactacaattttattttcagtaacttcagccaggatttggcatgcaatgcttggcgtgccagcttcacagtatgcttgttcgcacaactgatgcaacaaaatcaaactcccaaatgagatttccaggaaacctaccttgagaaatactatagtactactacaacgggatcgatcaaacacagaatggtacaagaccgtagcaagtcaacggttttgttctattgcaaatcaagaactaactatccttaatccttctgtagcatgtagtctaaatccagaaggcaacaaggaagaaatcattgccactaacaaggaaaagataggtgtaccaaccggccaatcaatcctcgaagtaaatgataacagaagagtgggtaagaacaagagggtttttcttttcttttccatttttttttcataccttgtggctcctcacggggctggggatacctaggccgaaaccccagggggctcccgcggcggcgagggggaggaggggacgcgctgccgccgcggcgcctcggcgccgcgtgcggctgctgcggcggcggcgtctggcgcgactcccggcggcgcatgaaccctggaggcgagggctcccgcggggggcggcgtgcggcgggcgggggatcgcgccggcgctccagccggtcggccgcgccgtgctcctcctccggcccccgcggctgcagcttgaccacgaggctgctgaggaggggcgcgcgcggcggcgcggggtcggggcggcggcgcgggcgaggggaggaggagcgcgcgtcggcgtcgtcggagtcggaggcggaggcgtctctgcggcggggccgcatagctgtgtgggtgtcgggtggtcgtcgggacgacttggtccgagtcgcccgactatacatacggtggttgggtcaagccggtcaaccccgtgggttttcctcattttgaatggcctgtttgatttttatttttatttttttcgttttggagtattctgcttttggatttttgaattggaccaacaaacgaattcggttttagtttatgtggataaattaattcggcccgaaaatccaactcacgagcaaatgtatccctcctacttccgatgaaaaaaactcggcctaaagcagaattcagcccatttagtttctcacgaaaaagtaagcccactaataatacagtccacttaacagccgtgagaaaatccgtacatgaatttggcccactctgttcaattaaagctaatcagcccgcttaccaattcttgacgaagaattcggtccactagtgaaatccacgtaacatagttccatcaacaaataagtccacctgtcatccctcaactttacgagtacgtatgacattcttaatcctcaatactgggaatctcttcccctcaactgttcaaaaccatgcaaagtagatcccatggctgtaaagcatgggtggtttcgctaacatggcatcctggtcagcatgcagagaatacaaataacatgtggggcccacatgtaagtggcctagccacaggagatttcattgccaagccgcacccaacatattgcctcatgccggtgctcctcctgatcacccacaccgaggctgccgcggcatcgcgatgccctcaactcctcccacctcaatgtccgcactggccactacaccccactccccgctcaagcagcccatcgctaagcacctttgctacggtgtcataaacctcaacaagccatccaacctcttgtcgcacgaggtcatcacttggaacaagaacctcctccacatcgagaagactagccacaacgggacccttgaccctaaggtcaccggtaacctcatcgtatgcgtcaatcgtgctacccgcctcgtgaagtcctggttaggtgctagcaatgagtgcatctgtgttgcgtgcttccacgccattgtgcccgacaaaacgcatgtcgcgtgcgcttgaagagctcattggtgccatcttctatcgctcgccgctcatctccactagtccaccgtcaagtgccagctccgggttctagatcaccactttgtcatgttctagatctcttgcgatgcaggtactacgttcggatgctctgagcagttctggatcatagacggcgaccttgtctccttccgagcaagccactcccctggatgacagtggggatttttccccactagctgacgagggctatagggttagatgcatgcgtaggagggggtgttgaggggcacaactggcgacgcgaaagagggggtggctttgttggcacggggaggggacgacgtggatggggtggtcggtggcagcccattgatatggaggagacatggagaacaaatggggaagtgagggagagaggaggaagaaggagatgccactgacatgtggaccccacatatttttttttattctctccttgttgactaggatgtcacatcagcaaaactaccaatgcatattaccatgggacctactttacacagactacacagttttgaacacttgggcagtaaaagatttctagtattagggattagggatatcatatagactcgacgcaaagttaagcggcggaagtggacttatttccacgtattaccacacaagtggatttggcccacctattttagtctacgaattaggcccacgtaataatttggcccactaaagttggcccataccaccaaatagcccaccggaataggcctctgattcctcgccacctactagttcccccccttcccctcggcctccactctcctgctctctctgcccgcgtcgaccagcgcccaggtctccacctcccgcttccccgcgacgcgagagccaccggcgccgccgtcctcgcccgccgcatcctcgccggtgagcgcgcgcacgcgcatcctcctcctcaccattcctttcctcttcctgcctcaaactcagcttctccggtagatctgagagcttctctcctttttggcttaaacagcagctttgtttcgaacgaaatttgttcagctgaggctccatccatgccgcccgttaggtccgcaccagtggctcctcctccgcctccgccgccgccgcagcagaagaagccggcggtcccggtgtcgaggccgtggccgatgtccttcacaccgcacccaccaccaccaccgccaccgccgtgagaaatctccctctggaattgggattttgtggttttgcatgttggtttgtttctacttttggtataggagatcagtttaggtgctttgaattcttgtagcttgtggtgtgtgtgtccttttccgaaggaatggggtgatgctgaaatatgttctgtttaaacgtgttggttacattgaatctttaagtctcatgattcgaatgttattgtaagcagccagttgttcgactcatatgtgctaactctgtcttttttttttctaataagatttacctaactccgtgtcattttcattggtaagattgcccggcgttcattcctttatctaagaatgttagaaatgagtagttgagctcagatcgaccattagtgtctgatatggtgactatatgccaatgtctataaatgtgcatgcacataagcatgttggtgcttgtgaaaaaacaaatgtgattgtattggtaatgggttatcacactttgccctaagtgaggattgatgcctaagcatttctggggtgaagttcgatacatcgtgttgaaaatttggggatattttaagacctaacatagaccatgttatttcatgtgtctccattgtttcatgtgcttaatgaataaatctatcaaaatgcctaatggtaacttacatatgcgatcaagattgaaagaaatctatttctgagagctagatcttgctccactacaatacatggatgctcttccttttttgcctttcagaagagagttcttagccgttctgctcttttgctcttaacttatcctaaacaactgattcattgtctatttattttcgtttcagaactgtagtgaaataatgttaattgtagatcaactagttaattgataacaaattaccttgaacttttcatagagtaaatgcacttccaagttgaaatcaaattcattaatattttccaagaaatgtatgtgtttcttttgcattgatctag

SEQ ID NO: 8559 - DNA, 23061 bp, Oryza sativa
agtgtcgcccaaggtcggtttccgaacagacattgctgccctataaacccgagcccctccccaaaccaatcttccccattttcgccctcgccattgccgcgccctgccctgttcgccgtcgccgttcgtcgtcgcgcgtgtcggaggagccggcacgagcgaggacgcgtgacgtggactccgggcgcaccctctccttcctcttccccggcccgaggccagagcgatcacgccccgcgccgtcggccatcgtcactgcgccccttcaccccgcacggtagtgcctcctccccgttccccctcctcgttcctcctcttccccttagctttcggtagaagcttgtaaagcctccccgtagctagctggcgccgccctgactgctgccgccgctcgctgtgtgctcgccgccgtcgccgcccgtgcttcgtagcgcccgcacgtcgccggcctctctcgtagtgtctccgtctaatccgacggtagaaacggacaccggtggccgcgtagatgctctagtccggaggaattgaaccctagtcgcgtcgttgccgttccttcttttctcgcagccggttgccgccgccgcaatccgccgccgtcgaactccctccggcgaatccgagccgttggctcgtctcccctcatctcgtgcaaccacccggtgtgctcgatttcgcctgtatcgccgtggttcgccccgccgttcgcagccgccgtccgccgtccgttccggccggcgccttcttcaaccttccgccggcccgtgtggcagccacgtaggtgccacgtcggcgccagctcggccaagaccgggtcaagccgaccccggtccgccgctcccctctgccccgctcgcgcgcgcggtccaccgcgagccgtgaggctgcgcgtgggcccgccgcatccgcatccaccgcaagccgcgcgcgtgcaccgcgccccgctccaaaccctagcgccgcatcacgtgctcctcgctcacggtgagtcgagccgccaacaagcgggtcccactcgggaccacgcgagatggacccggcccaccggctacctctttcctcccctcccgcacgtgccttgggccgccttctcgggccggccggcccattatgctcggccgagccgcccctttctctcaggccgtgccctagccgcccgagggaagtctgtttcccctccctctttcttttctttttcgaaagggtttaattaaatcctttttcctttagaccaaaaatccaataatcttataaattcaatatcttctcaaccgtatgtccgtttgactccgttcaacttccaaaatttctcaaatcttgatatctatttaatggcacgtttagaggtcaataatagggctttattttcgccatttgttgagttgtcccgtttcgcgtgtagtttcggagcccgaagacccgcagtgcgaggatttcaaggatcaagctctcgagcaaggcaagtcacctttgatcatcttgcacctataatttaaatctaagtacttcttttccgcaaatattgcatgaataagtttaacacaagtatttcggccgcggcttgcgagatagcctaccggccccaatcctaattgttgcaattaccctccttgaattattgaacacttgaaccacctttgtcaactgttgtgcttcgatgcacgggcctacaggcacgcgcatcggaacacctcccctcaaatttaaaacatccaacgatgggtaaaacttggggttttacaaaagacttggaaaacccgacacctgggtcggtgcttgcgaactaaaattaaatttccaaaatcgcggaccgggggacgtaccgggagtacggtttcccgctcttgcacttaaggaccgtttccttggaatttcatccgaacataaggcaagtgcgaccacatgggtggaatgggacacccctggctgagtaactagctaatcgggggaaccatgatggcaagagacatgtcgattcaacggggtggtgccggggggaacccccgggcttcctggcacagtatggtgtgggacctaacctgatatcggtctgggacccctctcgttggcatatggtgaacctgtgtcggctttcgaaatgccttgtcatgaaagcctcaaggtctccagacgtggccgttctgcacgggcggggtgatccgggttagtaatgtcatgtgggtaaagtgtaccccctctgcagaggttattaaactgttcgaacagccgtgcccacggtcatgggcggatgtgaggtgattcctagcgtagtttgactactgcttgtgaaattacttttatggaatgggttcaatgtttggaaaatctgcggctgatgggatcagccaggcccgggtggccgtttgaaagccgttggccgggtgccaaccttgaatcagttcaaagattgatacattgcacatactccgaccagacgagacgcactgtctcatccgtgtcgtttgagaagcactcacttagttgtttcaacaaggagtttaaataaaaccaattgcaaaaacaacagcatttcctttgaagcctgcattaaacacttaattcccatggcttgctgagtactcctgtactcacccttgctctatataaataatccccccccccagttgctgaagaaaatgatgtggatcctgctgatgaggagttcttccaggagcaagtcggctacgatgagttttagggttttggcctagttcccaagtcacgcctgtgatgaatggtccaagtcttggcttccgctttcccttttgtaatgcagttgtgagctcagcatctatccgcagcccaacatgattgtactcctactctgtaataaagagacctctgctgctgtgatattctgtcttcctgtgataccagcactgtttcctgggactggtatcgattaacatgttaatttggagcgtcacgggctagttccgttcagggctagttcggggcgtgacaaaagatggtatcagagcacaggcttggccctagggcgaaacccgacgtttaggatgaccctaaggatactaagttcaaaaactacttgctcaaaggcttctttttgctttctttattttcagtagtttattgctaaaatggttactgatcttttctccctctttcaaaattgtagatggtagtgaacgccagcttcagttcccatagttttggtgagggtcaccacgtcgctcagcttcgtgacctcgcccgcttccttggcttctcgtgtcccgagtacacggggtactctgtggaccgtgttccccctcgttgtgagctttcggtgtacctttaccctcgtggaggtatacacggggctggcctttgcccacaccacttcaatgtggccaggcccactctccagatcgtgtaccaggacctctcctggacagcacttcgtcgcttggtccacgactacagccaccgcctcgggggctctgccttccggcagctcccacgccttccttctggccgcactgacactaggtacccttgtccgtaccgcgagcctcagcctgtgctgactcgcatggttgagctttctgaggctcaagccacccagcacgacctactccttgaggcttaccgctctggaggcccgtctggccgaggagggtgtcacctcagttgacactgcgtcttgggactcaggccgcctctgccacgccagccacctgtcttcccacagctcccgcggctcctttcgcactcccagtggcccacgctcccccagctcgcgtgcgccgtactctccagtgtactctccctaccctcacccagttagcccttcctacactcctggtcacaccccagtcgcttcctcccgccgtggcccacgctttatctgcactgcgcggaagcgtgttgttggttcttccactatgttccgctttgactacccagctcccccaccgccagcagctcgtgctgctgccggccctcgacaggttccgccggtctcttcgcgtcagccgatcgacgtctcttcgactgaggagccgactacaggaggcagccaggcaggcgaggagtagaggaggccgtcttcagcagttgtccgtgtgttaggccccttttgtgccaccgccacctctcttggagtcgtggcgaggtaatgcgtgcgtgtgtttgatgtgggtgttgtttggtagtctggttctcctaggtggtgtgcgtacagtcaagctcggcgtagctctgtgacttgtccacacccgttgtatcagatgtctttatgatttgagaaaaccagtttatgcctagtgtgtgctatctgagttgttatttattttgcttcttgtcttccttaagtgcttatctggttcttatctcgccccttttctgggagtttagatggctagccgcccccgtcgcgctgctcgtgcaccagcccgcttcggctttgaggaaggtagagttgagccagaagcagatcatgagtcagctaatgagcagtctcaccacagcaaccgttcgcaccgtaccgctccccgcaatgcagaagtcgagcaatcccaccgcagcaatcgctcgcatcacacagtttcccgtaattgtcacgaccggaattaacccaacgggcgttccttacgtgcgtgtattattccttgtcccaggaggcaaggtacaccaaaagttgatacatttcagagtttatcaagcggaagcgtaaatagttaatttattacatgggcggcgaaggcccagcacacacaaagacaaatgagaaacagcggaagactagggcgacgaccacaggcgcttgacggcaggcacgagctagacaccaaagccttcatcttccaggggctcctcttctgggtttgggaaaaattgagcaagactgagtacaaccactgaggaggtgcggggagggtttaaatagagttagaagggggagagggcggccggaggggaaggaaaccggcgcggcgctctcgggctccatcaatggcgccgtcgagatttgcgggggcaaatccgcccgtttgaacgcgagagagggaggggaaaatggggggaaagggagagggaatcacggggaataattcccccctattgattgcacgcggggaggacgggggcggcgggattcgcggcggcggcggcgctagggcgtgggcgaggcagcgggagcggcgggaggaaggggatgacgggtgggccccacccgtcagcgagggtggcgggcgggcccgcccgtcagtggcgcgcgcgcggggagaggccggatgggccgcggggagaggagagggagggggagggagatgggccgagccggcccgagagggagagggagggaaaggggtctttttagagtttttctttttataaaaccttttcaactttgtttatttcttaataattattatttgtgctctgaaaattccactaaaatttatttacgcattttaggcttttaggaaatatacaaaaaccctctaagccttgtttgacttttaactttgcacattttaattgttggaggctttcacacggattttaattattctaggcacaatttagaggatatattttagggtcgttttgggacgtgacagtaatgcagaagtggaacagtctcaccgctctcactgcactgccagtcacaattctggtgaagaacgcattccttcgccaccccatattcaaaataacatgcagcacttgatggcagttcagactcaaatcttgcaaggtttagccacagccatagccggtattcagcacaacgcgcatggaaatggccacccccacatgggcaacaacagatccaagcagacagactttctgaggtctcgtccgccagagttctctcagaccgtcgagcccgttgaggctgacgattggctgaaggatgtagagagaaaactcaacttagtgcagtgtactcctgttgagaagacgttctacgcctctcaccagctaagaggacctgctgcagattggtgggagaattattgcaatgcacatgtcgcgaccgagaaaatttgcattttcccgaacgctagtgtattaatccccgtcccaggaaaagccggggtacaccacacaaacatgatataaaagacacatctttattatatcgataatatttacattattacaaaggcacttcaggcctggcaatcaaaaataaacagcagcggactagcgggcctacggctccatcttcacaggcgctcaaccggggtataagccaggactccacctaagacatcttctccaaagcctctcttactgaagaggggaaatattgagcaagagtgagtacaaccacagtactcagcaagtcacaccggcagatgcatgattaatgcaagggggtacaaggggataataataggggttaagttttgcagtaaacagcatttaaaagtcacttagttgcccaaagctattttgtaaacacgatcctagagctatacaatattattaatcaaggccgtgaaccctcacgaacctgccttaacccaaggcctacgatgattcagaccgaactggcaacccgaccctgggtcccagctcgtcccaagccaacccaggccaaccattccacattttagttgttaagcaaattttaagaattaaaacactgacttgggtacattgctcggcttgcccataaccgagggcgcggctattcgaatagattatactctgatcagaggtgtacatctttacccacaagacacatcttcctcacgtgtaaccacgtgccacataccaccacggtatacggacggaagacgtgacatagttcccaacccatcctagccataaacaagagtaccgacccaaccccacctacggccggaacccccgggacaggcaggcaggattgagccccctagcagcaggacaccagccctgtgccatgacatctcgactaccgggccgcagctcgtgtagccttcatttgccctggagaatgtccatcgacccccgacttcatccatctccaatccgtgcacttttgtttataaccagactgagccacaaactaagccttacccactagacatgtggaagtacggtagtgctttgcaacagaggcccgagcttaatccttatagtggccggggtgctacttcccacaactggcatgcacccaaaccccaccgaaaaacaggttttaggggctttgaaagaggaagagaggggtatgtccaattccaccataagccaaccattccatagtgtccaaatgatatgagaattcccaaagtctaaagttataaaatcacctaatgttgcctaattaatcagcgaagcatctacctaaatttatactagtggaaccatgaatagagtacccactagttggggttttgtttattctagggtaaacaaggtaataataacaatagcaataataataaggccataacaaaggtaaataggcaaggctaaataaaacagtgataacgcgggaatttaaataaagcgataatgcattaatttaaatcaaaataattttataaactgggattcaatatgctcaaggatgatgtgacttgccttgctcgctttcccaaacgtcggcttcaacttccacgaagagcggatcttccgaagctgcagcgtctacacgaccaacggaaaagaaacggcttttactctaataaactccatataacaagcagaaacaaagcacaaaaatgggttcttgacttcttaaggaaaaattagagacttgaacggtccaattccgagttcaaatggccaagttatggccatttgaagtttatatgctatttaaatggatatttgcgaatttcttcatttaaattttaatttaaaatagatttattgcgtcagccgggagagaggagcgcgcggaccgggtccacgggagtggggcccacgcggcagcctctcggtccacggtggaccgggtgcacccggctcacaccggccggcgccgtgggtcccacgcgtcagccgcacccgagggcgcgggcggctgacggccgggccccacatggcagccgcggggcgcgcccgaaggcggccacgccggcacagccgacgggaggcggcgcacccgcgccccgatggtcgccgccggtgaccactggcgcggcggagcggcgcccgagagaggggagggaagggggaagcgaaacggcggtccacggctcaccccgggtcgacggcggcgacgggaacggcgaccggagcggaggaaggcggcggcgcggctcgggtcgacgaggacggcggcgttccggcggtcggcgggcaaaacggaggggtggacgaggtcggcgaggttgcggcgaacccgaagaaggcgacgccgaaacgggaggaggtccggggcgacgacggcggcggaccggagctcggcggcgacggcggagagagagagcgacggcgcgagctcgattccggcggagagagagagcggcgagaggcggaaccggacgaagggggtgcggggagggtttaaatagagccggggcgagagagggtggccggggaagggaggaaaccggcgcgggaggtcggccgccatcaatggcgccggcgggattaggggagcggtttccaaccgaatccgagggagagagggagggaaaaatggggggaaagagagggaatcacggggagtgatttccccctctttattgcgcgcggggacggcgggaggcggcgggattcgcagcggcggcggcgctagggcacgggcgaggcggcgggagcggcgggaggatagggatgacaggtgggccccacccgtcagcgagggtggcgggcgggcccgcccgtcagcggcgcgcgcgcggggagaggccgagtgggccgcggggaggaggagagagagggagggagatgggccgagccggcccaagtggggaagggggaaaaaaggactttttagggtttttcttttcataaaacctttttaactttgtttatttcttaataattattatttgtgctctgaaaattcaagtaaaatttgagggctccttttagaccaaggagaatttaacaaaaattctccgggccgcatttgaatttttcttgtacgtattttagtgtttgccaatttcttttcgaattttaattaattctattattccttttagcgaatgatttttaattcgggatgaatttatcaggacgtgacagcacacctcgaacccactaacattccatggaatgagttcgctacagctttccgtgtagctcatgtgcctgaaagtactattgacatgaagaaagaagaatttaacaggcttaagcaaggcaatagtcgtgtcaatgagtacctaagtcagttcaacaagttggctcggtactctcctgaggaagtggacacagacaagaagaagatcaggaagttcttgaaaggagtcacagttggaatgaggctccagttgcttgctcatgacttccccacttttcagcacatgatcaacaaggcacttatacttgaggatgccagaaaagaggcaaccgaagaatataagaaacgcaagtctaaccatcgggggaattcttcctgaggcgcacctcgccctcgctttggacaacccatgcaatatcaccagtcggtcactcaggctaaccgccagccaggctatgcccctcgtcctcagatgaaccatccggcacctcagccgcagcagcgtgccccaaatggcaatactgcagcaaatagtgttacctctttcaagtcaccgccaggactgtcagcagttcagtgtttccggtgcaacctgatgggtcactatgccagacagtgccctcagaatcctaccaacttgaactcagggcatgctaatggcagcactgccagaactcctactccagcagcagctcagtccagtcctagctcgcaggcaagtggacaaggttcccgtgcttccaacaactttggtcgaggccgggtgaaccacattcaagctgagaccgcttaggatgctccagacgttgtgatgggtatgttctctgtcaactccgtacccgcaatagttctgtttgattctggagcttcacattttttcatatcgcaagcttttgtgaaaagaaacggttgtgacggagcgtggggctcctcaccgggagaccgcgcaggcccccctttgccggttcggccgggggcgctaagtgaggttcttcgccctcgatctgaggaacgtcagcgagagaggaagtgcacaagacacgggcgacgtagacaggttcgggccgctgagaagcgtaacaccctactcctgtgttctggtggatctgtgagtgaaggaatacagagagccggagagccagagagagttcaggctctagaacccattcgctagagtcccaacccctttctcttttttctcctccccctttctctcctaggcctgggcctcctttttatctggtcaggggtcaccacaagggcctccaactacctaagaaaggaaacatgctttttacaatgagggctagtctacagccggaagtgacctctgacaagcagagcacacgcctcctgccccgctcgcccgcttttccggtggacgcccatttcaaccttcatttaatggccagcgacttccttgccatacttgcgctgaagcctggaatggatctgaccgggactgacataccaactccaggagttagcacgccggctccggctagggacgagagccaggaagctctcatcattccgacgggatggggcgaggcgtgtgacaggccgcctgttgccacctaacccgcgatctgaccgatctgtgaccggtcacacaccgcgaccggtcacggaccggataagcgtgcgctgcgccgcattaaatgcggcgtggcgcgctcgtccaacttgctataaatgcggttaggtgagcccgctgtgctcacctaacccacacacgtggcgccaaaaccacagggggtcggggcgccccagccctcggggccgaaacgggagcggcccgacccctcggggagacagagggaggggtggccacgtcaccctcgggctcgacccccccgagggggttaggccacgtgggtgaccgcggctacccaagcctctagtcacgatacccccggccccatgtcaccgacagtagcccccggcgtcacgccagggcaatcgcccccctcgagggaagcgctcgggcgtgacgccactccttaggcccggtgacaggtggggccggtccctacaggcgggcagaaacccagcggtcgcaaatcgcgcgcatcggcaaaggaaaaccgaccgacaataatgagcggcctctttaagaccgctacattactcgagcagcgcgcgaatcgggacgagccggttcgtttcgcctggagacatgatgatggcgcttttcacggttggcgggcgtagttaatgcgcgcacaatctgccccatctcaaccgctacggccgcacatctgccgcgtgcgccgcaaacgggcgagtggggttagtggaggcgtgggcgcgagaaacgagggggcgaggtagcgggcgcgggaagcgaggagccgggcatagcattggcaagggtgtaaagacgccgagcaagggattcgtttctttcctctcgccactcttccccttgccttcgccacttgtgctctaactcttcgtttcctgtgccctacccttgccgcactcgctcgctctcaagcttctcctccgccggtgtcatggcacggggctccgcaccgctcgatggtagcgtgctgccgccttcccgcatcgtgagcgagaggcaggccgggctgccgcgccgattcatgccggaatctgccaccggccgggaggtggtcgcgctgggtgagggacgcccggtgccacactacccggggcggtccgtcttcttcctctctttcgcaatggcggggctggtcccgccattctctatttttttcatggatattctggagttttatgatctccagatggcgcacctcacccccaacgcgataatgacgttggccatcttcgcgcacctgtgtgagatgtttatcggggtgcgtccatctctccggctattccggtggttcttcaccgtacagccggtgtcgccgccgacggtagtcggtggctgctacttccagccgcgggggcaggtgctaaaccgctacattccctgcatcctccgcaaaaagtgggacgactggaagagcgattggttctacacccccctcgccgatgaagcgcgcttccgacttccgagccagcccccggcgcaggcctccagctggcgggcggcggtagatctgggagacggctacgacgccgttcttgaccgcctggcgggtctgcgatcccagggactcacgggggccatggtgttcggcgactaccttcgtcgccggatcgcgccgttccagcggcgcgcccagggcgcctgggagtacaccgggcccgaggactacattaggacccaccaggggcgcaaatgggactgggaccctgaggacttcaggatggtggtccaacgggtgctgaatctcagctccgtggaggcatccctcatcccccaaggggtcctccccctctgctgtgatccagagcgcgccaagatcctggccatcatgcaggtggtcggggcgtcgggggagcgggccccccgaggccacgatggcgcgggcgggagccgcaggggggaataatctaccccgggagggggtcgtgcttctgggccctgcgacgggggcccggggggcagccgccctgccgacgcccgggggaagaggaagcaggagggtacccctcccccatctcctccccgagggggcggggcggtgcgtgccagcagcaggcgcccggagggtgccgtgccgacgccgcagcccgagggggagcgaaagaagaaacggctccgcaagatgggggggatcgtgccatgccgggggaacctcatctcgcccccgaggtggtcgtttagccgacctccccgcaggttcgtccccgcgcccaccgcggccgtattcattctcccatctcccaaggcgagttttcactcacccgtttctttttgtcttctggtttttcttctgcctcagcgagatcccgtcgcgcccccccgccattccaagtccggccggtctgaggccgaggagacggcgaccgcggaggcccggaggcgggaagctgaccggcgagaagccgcggaccgcctccgggaagccgaggaggctgcccaggaggccgtccgggttcgccaggctgaggaggccgctcgggaggaggccagactccaccgggccgaggagtccgtccgggaggcagaggcggcgcgcgcacgccagacggcctgccaaacccccgacccgactccgcccgaggcgacgacgacttccgaggccacccacgacgaggccgcgggcgcgccgctcgggcccgacccctcgggcgacgcttgggacgagccagcttcgggggacgcccccgagtccggcacgtcgatcggcgggccgagccgcgcggcacccacaccgaggcggctctcccctctgtcttccgctgccccactgagcgcgaagcccttcctgcaggccttggccgccgcgaacagcacggtgctggactggttaagtgcccagatggaggccctacaggcggagcgggcggagctcgacgcggcgtgggcgcgcgtcgacaaggggcggcgctcggtggaggccatggtggaggcgggccgcaaggcgcaccgctggcacacctcacagctcgaggcccgtcgtagggacctggcggagatcgccagggaggtggaggaggagcgggagactgccctcatcgccaccgccgtgctcgacgaggcgcgggacgacctccgcctctaatacgggagccgggcggcggagctagaggagaagctcgacgccgcccggggagtccttgacgccgccgctgcccgggaacggtgggcggcggagaacgaggcggcgtcccgtcagcgtgaagagggccttgaggctcgcgccacggcgctagaggagcgcgcccgcgccctggacgcgaaggagagagacctggccgaccgcgaggccgccgtcgccaaccgggaggcaacactggtggcgcacgaggccgcctgcgccgaagaggagtccgcactccgcctccgcgaggacgcgctcaccgagcgggggcgagctctcgaggaggccgaggccgcggcgcagcggctggcggacagcctgttcctccgcgaggcagcgcgggaggagcaggcgcgccgcaatctggaaggcgcctgcgccgagaaggccgcactggatcagcgggccgctgagctcgaggcgcgggcgaaggagctggacgcgagagcgcacagcgacggggcggccgcgggccacggcgacctagccgcccgcctcgcagccgccgaacacaccatcgccgagctgcagggcgcgctggactcgtccgccggggaggtcgaggccctccgcttggcgagcgaggtagggcccggcatgcttcgggacgccgtctcccgtctagaccgcgtcgggcggcaggcgggcctctggggcgggcggtacgcgaagtacgccgccaaccaggggggcctcgcccagcgtctctcagagatggccggggccctcgagcggctcccagaggagctcgaggagacgatcaagtcatcctcgagggacctcgcccggggggcggtggagctcgtactggcaagctaccaggccagggaccctgacttctccccgtgggcagcgctggaagagttccctcccggaaccaaggacggcgcgcgcgcgcaggtccgggacgccgccgaccacatcgtccacagcttcgagggtacggcccctcggctcgcgttcgcgctcgactccgacgaggagggcggtgacgacggtgcggacgacagtgacgacgaggccgacgacccgggcgcgttggagtgagcccccaggcccccgccaatcttaataacttctccttcttcttccgaggccttcgggcccccttcttgtatagactgatttaatctgcaatcaagtaaagaggaaatttctgcgtcggttctgtttgttgtgtgtatgagacgaggacggtctgtgccgcggtccttctgtgtcttggcttgaacaagggctcgtgcccaggccccagcctcaaacggcgcgtgtcggggctagtgcctggggagatcctcgtgtcgagactggccaggccgggagcgtggtgaccgagggttatggatgacccgattgtgggcctttgccgattcccccccagagttcaccacgccccggggcacggctcggttctgggccccgtttggcgattttagccggcccgggccaccgagggcagggtcgagcacgagcgtgctaattcaagccaagattcttcaaaaggaaacgatggcacagacacggtcgtcaggaaatcgaaaatgcttttattgaaatacagaagagaaaaaaggtaagtatgtgcatatggtagcccccggccaaccctgcacgcccggggggtgcggggttggcccgagcccgagacatgacacccgacccccactaggggtagaagcgacgaaggtgttcgatgttccacgggttaggcaactctgtgccgtcgcccgtggccagccgaacggagcccggccgagggacgccgatcactcgatacggaccctcccacattggtgagagcttgcttagtccagcacgcgtttggacgcggcgtaggacgaggtcgtcgacgcagagtgatcaggcccggacgtggcgctgatggtagcgccgcaggctctgctggtagcgcgcggctcggagggccgcgcgccgccttcgctcttccaagtagtcgaggtcgtctcggcgaagctgatcttgatcagcctcgcaatacatggtgacccgaggggacctcagggtgagctcagatgggaggaccacctccgcgccgtagacgaggaagaaaggcatttccccggttgctcggcttggcgtggttcggttcgcccagagcaccgctggaagctcctcgatccacgagtcgccatgcttcttgaggatgttgaaggtcttagttttgaggcccttgaggatttccgcgttggcgcgctccatttggccattgcttcttgggtgggcgggagaggcgaagcagagcttgatgcccatgtcttcgcagtagtcaccgaagagctcactagtgaactgggtgccgttatccgtaatgatacggttaggcaccccaaaccgagcagtgatgcccctgatgaatttaagcgcggagtgcttatcgatcttgatgaccggataagcctcgggccacttagtgaacttgtcgacagcgacatacagatactcgaacccgcccggggcccgcctgaacggacccaggatatcgagcccccagacagcaaacggccacgaaagaggtatggtttgcagagcctgggccggctgatgggtttgcctggcgtgaaactggcacgccctgcaccgccggaccaggtcgaccgcatcgttgagagccgtcggccaatagaaaccctggcgaaaggccttgccaaccaaggtgcgtgaggcggagtgggctccacactcgccttcatggacatcggcgagaagctcgacgctttgttcccgaggaatgcacttcaggaggactccgttagccgcgcgccgatagagggtcccttccaccagcacgtagcgcttggagatgcgccggacgcgttcactcccttcgcggtcctcgagtagagtcttatctgcgaggtacgcctggatctcagtgatccaagcaatcaatctaggggagctgggagcgctcccctcgggtcccgaggcctgggctccgacgggcctcgggggccgttcaggcgcgtccgtctcccctacggggtcgggtcgcgccgacggctgggcaagcctttcttcaaaggcgcccggtggggtctgggctcgcgaggaagcgagccttgagagttcgttggcgaccgcgttatcccgtctgggcacgtgccgaagctctatcccgtcgaaatggcgctccatacgccgcacctggcgcacgtaagcgtccatctgcgggtcagagcactggtactcctgacagacctggttaacgaccaactgggagtcgcctaacaccaggaggcggcggatccccagtccagctgccactctgagtagcaacggctcatctggctccggggcgaccaagactgggggagaactgaggtacgccttcaactgagtgaaggcccgctcagcctcctccgtccaggtaaacggcccggagcatttgaggagcttaaataggggtagtgccttctctcccagcctcgatatgaaccgacttagggcggccatgcagccggtgacgcactgcacatccctaagcttactgggggggcgcatccgctctatagctcgtatcttctcggggttggcctcgatgcctcgggcagagaccaagaacccgagaagcttgcccgcaggcatgccgaacacgcacttatcggggttcagctttatgcgggcggagcggagactttcgaaagtttccgctagatccgagagtaaggtctcttggttgcgcgtcttcacaaccaagtcatcaacataggcctcaacattgcgtcctatctggctacccaaagaaattcgagtagtacgttgaaaagtaggacctgcattctttaacccgaaaggcattgtcgtataacaataagttcctatgggggtaatgaatgcagtttttcctcatcctccctagccatgcgaatctgatgataaccagagtatgcatctagaaaatacaaaaggtcgcaccccgcggtggagtcgacaatctgatctatgcgtggcagggggtaagggtccttaggacatgccttgttaaggtcggtgtagtcgatgcacatccgaagcttgccgttcgccttgggaacgacgaccgggttcgccagccactccggatggatgacctcacggatgaatccggcctccagaagtcgcgccacctcctcgcggatgaaggcttgacgttccggggcctgccgccgcactttctgtcggaccggccttgcgcccggccgcacggcgagacggtgctcaatcacctccctggggaccccgggcatgtcagaggtcacatcgaagtccacccgctccgtgcggaagttggcggaaccaccgaaggtgaacgggaggtcgatatgacccaacggccaggtgtgccccggaaaacccaaaatttgcgagtaccaatgatagtacattccccttgtcggtgacatggggccgggggtatcgtgactagaggcttgggtagccgcggtcacccacgtggcctgaccccctcggggcggtcgggcccgagggtgacgtggccacccctccctctgtctccccgaggggtcgggccgctcccgtttcggccccgagggctggggcgccccgaccccctgtggttttggcgccatgtgtatgggttaggtgagcacagcgggctcacctaaccgcatttatagcaggttggacaagcgcgccacgccgcatttaatgcggcgcagcacacgcttatccggtccgtgaccggtcgcggtgtgtgaccggtcacagaccggtcagatcgcgggttaggtggcaacaggcggcctgtcacacgcctcgccccgtcccgtcggaatgatgagagcttcctggctctcgtccctagccggagccggcgtgctaactcctggagttggtatgtcagtcccggtcagattcattccaggcttcagcgcaagtatggcaaggaagtcgctggccattaaatgaaggttgaaatgggcgtccaccggaaaagcgggcgagcggggcaggaggcgtgtgctctgcttgtcagaggtcacttccggctgtagactagccctcattgtaaaaagcatgtttcctttcttaggtagctggaggcccttgtggtgacccctgaccagataaaaaggaggcccaggcctagagagaaaaggagaggagaaaaaagagaaaggggttgggactctggcgaatgggttctagagcctgaactctctctggctctccggctctctgtattccttcactcacagatccaccagaacacaggagtagggtgttacgcttctcagcggcccgaacctgtctacgtcgcccgtgtcttgtgcacttcctctctcgctgacgttcctcagatcgagggcgaagaacctcacttagcgcccccggccgaaccggcaaaggggggcctgcgcggtctcctggtgaggagccccacgctccgtcacccctagaagggatataagggcaactaaaatatgcccagaagttaaccttagaattgaggaagttgacttcctagccaaaccgatagtcctagactcgcaaagcttggacatcatcctagggatggattggttggctaagcacaaaggacagatagattgtgccgaaaggtctatcaccttgcaaggacctggaggaaagcaagtctgctttacccctaacacccttatcgcaagtcggtctatcctaaccagtttgcaagccactcctttggaatcggtgcccatagtctgtgaatatcacgacatatttccagaagagttatcgagtatgccaccagaccgagagatcaagttctccatagaattagcaccaggtaccgcaccgattgcgaaaagaccctaccgaatggcagctaacgagttagcagaagtcaaaaggcagatcgaagaactggagagtaaaggttatgtgcgacctagctcatccccttggggagccccagtgctcctggttaagaaaaaggatggctctgagagaatggtaattgactatagagccctgaatgaagtaactataaagaacaagtacccgttgccacggattgacgatctgttcgatcaacttgaaggagcaaaagttttctctaaaattgacctaagatcaggttaccaccagttgaaaatcagatctgaagatatcccgaggaccgctttctcaacgcgctatggtctgtatgagttcacagtgatgtctttcggactcaccaatgctctagcattcttcatgaacctgatgaacaaaatcttcatggaatacctggaccagtttgttgtggtattcatcgatgacatcctgatatactccaagaatgaggaagaacatgttgaacacctgaggctgataatggaaaagctcagggatcatcaactattcgctaagttctcgaaatgcgaattttggttggaccgagtagcatttcttggacacgtgatctcctccaacggtgtcgaagtagaccccagcaagtttgaagccgtacttgcttggaatccgcccaagaatgtgtcagagatccgcagtttccttggcctagctggatattatcgaagattcatcgaagggttctctaagctagccagacctatgaccgagttgttaaaaaaggaaaagaagttggaatggtcaacaacctgtgaagatagctttcaagaaatgaagaaaaggttgaccactgccccggttctcaccttgccagatatacgaaaggatttcgaaatcttctgtgatgcatcaaggcaaggcttgggatgtgtcctaatgcaagagcgaaaggttatggcctatgcatccaggcagcttaggcctcatgaagtcaactatcccacccatgatcttgagttggcagccgtggttcatgctcttaagatctggcgacactacctaatcgggaacagatgtgaagtatacaccgatcataagagtcttaagtatatcttcactcacaccgagttaaatatgaggcagagaagatggttggaactaatcaaggattacgatcttggaattcattaccatcccagtaaagctaatgtggtcgctgatacgctaagtcgcaagacctattgcaatgcagttcaagtatggccagaccaagattgtctatgcagagaactagagaagttaaggctgacagtggtacagtcaggcgtccctgctaacctgaccgtgcaacctacactggaatcgcaaatccaagaagctcagaaagatgatgaaggtataaaagagttaataaaaagaatacacgagaagaaagacaccagtttcaccatagatgaccaaggcatagtgtggtacggatcacgcatctgtgtaccagccaagaaagaattaaaagatatcattttaaaagaagcccatgagtccgcctactccattcatccaggaagtacaaaaatgtaccaggacattaagggatatttctggtgggctggaatgaagcgagatgtcacggaatatgtggctctgtgtgatatttgccaaagagttaaagcaaagcatcaaaggccagctaccgatccccgaatggaaatgggaagagatcggaatggatttcatcaccggtttgccaagaacccctagcgggtacgactccatctgggtaatcgtggatcgactcacgaaatcggctcatttcgtgccagtgaaaactacctttgatggaaataaactggcagaactctacatgacccatgtcgtatgtagatttggttgtcccaagaagattgtgtcagatcgaggcacttagttcacctcaaggttctggaagcagttgcatgaagctctcggaaccgatttaaattttagtatagcttaccatccgcagaccgatggtcagacagaaagagtaaatcagatcctagaagacatgcttcgtgcgtgtgccctggatttcgaaggcacttgggatcgttgtttgccgtatgccgagttctcctacaacaatagttatcaggccagcattcagatgtcgctgaatgaggcaatgttcggaagaaagtgctgcacccccttgtgctggaatgaggtcggggaagcactagtgtttggccccgacatactcaaggcagcagaagagcaagttaagctgatccgagaacatttgaagacagctcagaaccgccagaaaagttacaccgacaatcggagacgtgatctcgagtttgaaaaaggagatcatgtgtacctgcgggtatcacctctccgtggtatgaggaggtttgggatgtccagcaagttagcaccccgctacatcggcccctacctcataaccgccagacgtggcgaagtggcttatcagcttgagttacctgaaggtctcgcagatgtgcacaacgtgtttcacgtgtctcagttgaagaaatgtcttcgtgttccagaagaacaagttcccctgggcaatatcgagctggaaaagaatctgacctacaaagaaataccgatcagagttcttgaagaggcagaacgtcagactcgacgaaagaccatcaagttctacaaggttcagtggagcaaccattccaaagatgaagcaacctgggaacgataagatcatctccgcgccgagtttccggagctgctcccttaggtgctgaatctcggggtcgagattcttgttaggggggttggtctgtagcgcccgttccgtcgtggcgcctagcgggaaaatttaaattctaaaaaccctaattgcgaaatctgtttctttgcttgttgtcagtctccgtgccaatccctgatctcgaatccccgatctatcgtcaaattcaaatcccgaatccaaatccttcccaaatcaaattcctccgcaaaagtctattttgcttccctcaggttcggtgggccgatttcctctcggcccatctctctcgctctctctctctctccctcagctctcccctcgctttgcccgtgcgccgcgtgcacgtgcgcatgcgcgtgagccgacaccgagccgagctctccctctctctctcgttctcccgctctctctgcccgctccatccccggcaagctccccgcgcgccgttaccttgcgcgcgcggtcgccgccgtcgtcagccgcctgctgcccgtgcctgcgctgtccggcccgcgccctaccgcgctgcgctgcctgcgccgcgccctgcccagcgagccagcgcgcgtccccgagccgcgccgcccgcatccgtccaaaaaccagaggcagcgcctcccgctcccatccctcttcctccccaaaccggcata

SEQ ID NO: 8560 - DNA, 12579 bp, Oryza sativa
ctatcaacatggccatatgaaatatcaactaaaaatccaggcagttcatcttgtgagtttcaaatgtgcatcgcaactcgcaaaccacctttaaataaaaaattgccacgttaaagacaagattagataagacagattaacagatccaaattgtgttgtcagattcagaataagattagcacctttattgtgtttgtagaagcgaaacttctatctcttgcaaagtctttccctttgtttcaaccacatggcgccgcacaaatattgctgctaccacacaagctgaggaaaacattgtgtacagaacttgtggaccaagttgctccagaagccgcaagaacaacaaactgacaaaaaaatttaccacctgcagcatttaagcatagcatgtcaagacgtcgatacgaatcatggtagaactacaatgaaccatggcaagtaaatagtgcgccctaccaaattattgttgcaaccctacacttatcatttaccattacataatcaaccatatcgaaatgtctaagttttttattatctaatttaaaaatctggccccattattcatttattattaacagcatacagtaccttttatcttatggcgattgggggaaacgattttgttacacagagaaagctgcagcttacagagtcaaatatacttctgaaattctgatcttcattaccataaccagggttggtaaaacagtgtggaaatgctattgaggacttagcagcttgaatattttgaattgatctaatatacctgttctagctcagcctgactaaacaacagctcaaattcttcaccaggtatttagcactaggctccttttatcattgaacaatgtgaacagctatggttacatactagcagtaacatatttttaaacatcctaatggaacaggaaacatgcatagacacataataccaaatattaacatattaaaccaaaaagtgaaaatcagcaacgaaatttccacgttgaatttcactgtttgatctaactgccagcattttgacatgcagtgtctattttttgaggatgaaaaatgaactcctatccaatgcacagacatgcagtgtctttttttttttgtgatggaaacataactccttacccaatgcacggacatgcacagagccatagccttggcccgtattttgtttgggaaaatctcaggcaaaagaagtcctggcactggacctgctcctaacgaaaatgtcaagacaaacctgaaaaagaagcactcaactataagaaactggtagacttaccataacatttgtacttaatgagccagtaaagtataattgtcaggaacaattaaagagttctgctaagagcagcataaaggtaaactgtctcataatttaactagttacaaattaaaccaaatggaaagccctattgttcatataaagaataactaaggatgcacaacaacgctgagggtgaagtcaggggaatcaaaatgaaacaactgcaaagcagaacaatatcatgtatgcaactgatatccccagtgccatttacatgtcagatcgatatattgacacagaattgttccaccatatgcaaccaaaaggttgcctgaacaagttcttggaagaatttatacgcaacaatgttttgtatcaggttgaataatttgtttccatccttcttataatctattacctctaatgaggtataagagaaatgatatcctttgggttgatgtgaaatggatggtctgaacaaatttagagcaccataaaaaaaatcctatttgtagatacaataagtagagaattttgcatatttttaagcctgatattggcacatttggcacaaaaatgtagcataaattggcttaaccaataggagcataaaacctcctgcttaaggtattcaactagtagtcacagctatttagtttagcctcctagacattaataactaaattcagataacttgaaagatagtagaatcaaagtaacggaagacataaaattctaaaacttacaatagcatgccaccaactgaaagatatacgcttgcagaaccaaggtggtgacgatttgctccaacagcctgaagtcccattgcaaaggcctatagcagtaaagatgtgcagtgagtaatgttcaacattatcttccaagttccaatcacagtgatagcttaccatgccaaggaagctccctgaaagaagtactttccttcctagtttgtccattagaagcatagctacaattgagcctggaagcaaacacatcaaacaaaatccatcaaccatcaatataacagaacagtagaacaacagaaaaaaagagaagatgctccaatgagcccacctgataaatttgctatccccatgcatatgttcgcaaggttagggggcacacccacacttctgaacacagttgatgagaaatagaacacagaatttatgccggataactgttgtaaagcaaagagcgttgtgccaataaaaacaactgtagcaaaaagggacttgtaatgaacaaacttcaaggccaaacataaataaggttatagtttagcgcaaatacacaacagaatggaaaacacataacagcttgtaccattaaagttgcgaccataaaacaattccgaatacttcacattttctccatcatcgcctctttcagatcgggagagttctgccatagcagacttaacatgaagaggacctagaagtttttcaaattgtatctctgcttcagtcgttcttccacactgaataaaagataagactcgtcaataattttcaatgtatgtgctacaagttaaatataaatatgtcaatacaaattgccaatataaagaagtatgggagttgtataagtctgtgttgagaattggttttctcagaaaaaaaactaataaaatgttttgctcatatcagagctgtatttgcatggtgcacaatcagaaaacaggcacagtattgaggaaactaaagatcaacgatatttatccgaaaatctaatgtgtgctttctgaagcaaataccaatatgtgccaatggactactcttctatagatatcattcgtgttaccatctaagtaacaataggcaataagtttgtgtcaacccattattaattgtaagcacaaaaaacctcaggatgatggtagattgcaagttctaaccaacagattaattgtttgatttaatacgacagtgaccttcaaacattcatggaaaaatcagcatgtggtatttgcatatagtttaagagatcaaatgtcgtttccgacaaagtgactccaagatggtcctcaaatatgagtatctcattttacgactagcaaaggcacttaagatcaaatttgccgaagcacaattatagagaatcagacacctgaagggtgatttaagttggaagatcatagatagaaaataagcagcttcccccaagataaacacaccttatacagccactgggggctctcagcacagaactccattccaagagcttgtaaagttgctggaacagctgcaacccagaaacacaccctccacctgttaatagcaaaggataaagttagatgcatcagatttactaactacacaaaacatgtagagagctacagaagaaagcatctaaccatctatcaatatccttcacaggtgtaccaattaggagagatactacgattccaaggcaggttgcaatctgaacaaagctcccatatgtgcccctcactgaaggaggagaaacctggatccaagggattataagaaaaaggtacaaatgaataagattaatatttgatacagacaatcagagattgaggcataggtgcataacaccaattacatacctctgttatgtacagtgaagctactggtggacctaatcccatccctgttccaaccaaaaatcttccaagaagcataccctccagactattggtgagagcgctgcaaaatgtttcttcttcaggaaggttcaatgaaacagaatcataggaataactaagttcaggcatagttccttccggcagctctcaagtattaggtgctcatagatgtaagtattacacaattgcattttcggaaataacagtcttggtgcaactaccaaaacggatcctattaaataacatgcagaagataaaagtgctaaagattcaaaaaaaggttagcatcttaaatattatcattcaatgcacttaagtgaactttagtttgtggatgccatgtagcaatggcaatgtaaaagcacctcaaggtaatcagagcacatatggtttatgttgttattattcaacttatcagcaactctacagcaccaataaataaaccaagacttaacacccataagtgacttggtatgctatatccaaaacgtacactagctatcaattaataagagtgttgaattattgaaaggctagaacttttccctttttaaggataatcaatctaagtacatcatgagcgcaattaagaaaagaatatttactattgagccatggttttctagaagatgcgtgtaattaattttcagtactcttcagtctattgtggctagtgaaagtcaatttatcgtaaagttcgattgctttcatgtttgcatgtgaagttacactagctccacagtcagtcgaagaaaccatataaatttacctaatggcgggatggcaaacctagtattctcaatatactactctctgcactgtgttaagaggaccacacattttattcatctcctacataactcggagattcaaaatcccatggaaggacgaatccatcaagctactacttgtcacaccaccaatatatcaatatgatacataagaaagagtaagtttgttgttcccaacattcaactttccaaataaagtatacaataccaacaagaaaccaggctaccagtggccactgaccttatttgtttaacaccaagaaaccaacaactccagctagaaaataagaaatgctagcaagtggcaattaaatacattccaaactgaccaaactgcacatggactaggatttagtggaagtgaccatcaacagaagtgtgatgccatggattaccacacatggactaaggattcagaggaagtagccatcaacagaagtgtgacaccacaaattaccacgcatggactaaggattgagaggaagtagccgtcaacagaagtgggacaccacgaattaccttacggcagcgccgatgatcatgggcagcgcactgagctgaaacgcgcgacgcctgccgattccgtcagcgatggatccactgaacaggcacccaacaaacgcaccacccaggcagatgctcaccacaaggcctgaaacacaggacacccaattgctcccatgcccaataacatcaaatttcacccgaatcgtggctgcttacttaccttcggcgagggtgttcccggcgaagccgaggtcggtggagatgctctcgagcggctcgttcacgaccctgcaccaaaccaaccaatcacacgcacgcgctccacaccgtgagttgggaaaacaaccacaaccagaagaagaaatgagaaaatggatggcacgcacccggagtggtagccgaagaggaaggaggtgagcgtggcgacgcacacgtgcggcagcgacatgcgccacgacggggccccgccgtccgccattttcgctgcagaaaccgccaccgagcacagaaaaaaaaaacctcaaaatctcaccacccaaaaaaaaatcgcagggaaaaaaaaagagaaaaaaccgtgcacggacctggcgtctcgacgtcgagatccatggcggcgtccctggacggcacgcgcttgtacgccgacgacttaagcttccaccgcatcggcgctgatcggagaaagagacaacgcaacgcaacgcaacgcaagcagcagcaggaggaggtcagtctagggatttgggaaagcggaaggcgagatcgatctggtggtaaatgcctcgacactcgcctcggggatgtattaatagcggtggtggcgtggcgtggttagcacatgagaagaaaaaaaaatcaaaaaatcgaggaggaggcggcctacaaagttacctgaccaccaccgccgcgtgcgcgggcatcagatcggccggagggggcgacggcgacggcgagggggtggtggcggcggcttggatctgggagaaaggggaggtgatttgatgctgtgaggctgtggatctctctctctctctctctctatctcggggggagtgggtttggtggcgtagcacggagaggagaggagaggagcggagcggagatggcgggggatgagctcgtgtcgtgaggctgtggtgctctcgtgcgacgaacgaatgccacctttgcttctgttggttccttttttgcttggagcaaagcttgttggtacacttcatttaagagaacggggttttgcacaatagcccttgagggtatagggtttttcagacaacttcagcggctacttcctcattttctgtaaacacgcttataaaagaagaaatctatataaaagttttcagaaacaaaacaaattaatatttataggtttgtaataaataatactcaatttataattctctaataacatgtatcattccgcgtatcgcaaaaatctcgaccgaacagcaaaccttgtttttggtttctttactggattatttgctccatgctttgagaaaaaaagttctcttctcttaaaccacttattttatattatttgttaagtttatttatcaaactatttaatttatccttagaatcaagtaaataatcctacaataacaatttgctcaacgatttgtttgaaactgtgccaaggttctatttggggtgcgtgatacgtcttgatagtattacattatataaaacaaatggtcaaacgtgtgttgaaaaatcaaagtaatcatccattttaaaaaggaggtagtattatccatttgcatagtattatcgaacatagtatttaaaagtcttagcacattggatgaatcgttttttaggtaatggaataaccggaattcaacgagctacaatcaattattacaaagtccacacatgaacaaactcagcacacactgacataatataaagaaaacatagactaagaaacaccaacacacgataaaagaacccttaattacttaattctatttgagaatctccatctgaagttgacaaaaaggtgcataatcgtcgactcaagtttacaaaatgcttcatttattatcttgatatcatcattatgcctttatagttgggtctaaccccgaaaccaatatattgccctgaaaagtacctgcaaataagattttgatgatgttttatcaaaaatcatatcattctactatgccaaagagcccaacattataacggaagcctctacaagaataagtttcttaactttttttattaacactcaccagccaattcccaaacatataagaaacactatgtggtgtgtataatccaaatgagaattgaattgatctccaaagaaatctagaaaaatgacaatccaggaaaagatggtaaaattgtttatttttcatataaaaacaatatctcaaactaccattccaattcctcttagccaaattatcttttgttaacacattcgatgaatcatggtgttgaaaaaagttaatttacaaaagttttaagttaggaaaagctcgtatacatataaaaaaattccttggaaaggatttgagttgggaaaagatttgagttcgggctggtttaatatagccagccaaatttaatcctttgaggcagaatgcgaaaatacaacaaagatagtggacgcccatgcaaagtctccaaaccagaaatcccagtacgcaacgtgtggaggttaggctgtgcgcgcgctgcggccaccgtgacgcgtgttcgctaacaccccgggtccaccgccaccacgcccgaccttttggtggtggtgggtcggcgcgggtcgtaatcgcaacgaagaagaagatgcccacccccggtgaacggatcccgcacgcagcacgctcctcctcgcgacagtgttactctgtgctacagacatgtggggcctacggtatcagggtcccacgtcccagcgactgttagagtgtcggccggttctggtgcccggtcgttttctcctccgattttcgagcggctcacgttttttcgcggacgtcggggaagggtctggattttgtcattggaggtggtgggcccctattgacggcacggacgcgaccgaatgatgagtggggtgattgacttgatgacagaagcatgattactaatccccgtttcgtatcataagtcattttgattttctttttgcaaaattagttaggttagttaagtttatagaaaaaattaataatacgactacacctcatcaaattcaaattaaatgtattttgataatatgtttgttttgtattgaaaatattatatattttttctacaaacttattaaacttaaataagtttaactaataaaaagtcaaacaacttaccatataaaacggatagagtaatttccgagcggtctcacctactagaccattgctaatcaaataacgtgcggccttacaaaagagatcatgagccatcgtatggagcccataattgtggattaacatggggggaaactgttttaatcactcgggtggacgtccacccgtttgttgtatgtcatctaaatagttatgaaaaaatttgaaaaaaataacaagatatattaatatttaatatttcactccacaaacatgcaagttaaaattcgacttttacaaattataacaaaaataacaaacaaaactcaaattactatacgtatgtttgcagttaaatttgttatttttgttacaacttgtagaagttgaatttggacttgcacgtttgtggagtgatgtattacatattgatctatcttttcaaattttttcaatttttttcataatcatttagttgacatgaaataaacgggtggacgtccacccgagtgattagaatccatctccttgacatgggaaatattcgttccgaatcgtcattaaaccaaaaaaattttctcaagttttctatttgtttccaaatcgtgtttccaaattttctcacatacgactttgtgcacatcctcacctagaaggaagcaaaacgctcttagggttccatgccatggcaaaagaaaggcagagcggtagtggcggcttgagaacaaggagaaaaagcatggaagccaaaagatactcctaccgacatcgatgacctcctatagtgcgtcctcctccgcttcatcacctcgtcaccttcgcctgcacgcgcttctgctgcctcatcgctaatgcctgtccgcccgccgtccttggccactactacatcctcgactggctggaaagacactcacatgttgataacaatccggcctaggtggggttgaccgaggcccaacaaattaaggtaatccggactccaacagttcttaggcacacccactcgaggaaaggcccaatctccctaaaaagaccagtccaataagtgaagggtggctctcccttttaaggtagcttcctcctcctaagctaagcagggtggggttattcataagctcacacggtcgccgcccgacttttgcatctttgccagcgggtaatagtggaggatgtcctcatcattcccacccccttaacaagggcccagctctgataccacttgatgaaccctgagctccacttgagacactcaaggctgttgttggcccgatctttcggtgagttgatgataactacgatttgggagaaacattgacgacccgactacaaccgtactagacgttgttgtgttgcgccttagcgatcgatacacctctccgtgggttgttgatcttgccggtatagatcaaccttattcctgcaagcaaatcgaagaaacaagcaagaacaagataaaagcaatctgaattgaaaataggaatgaatacacacgataagttggggtttctaatacaagcagatggacggtctagccgacacgcgtgctgcaaggaagtagcaatggctaaactttcatctaaacaaaacccaaaaaactctaaaggggtacctagctaattataatggtgggaggatgaccaaagggaccctagggtcatgatctacctgattggggcgcatcccacatgggccccacttgggccggggtcccatacgaagttacatgcccataggcccatgacaggtgacgcaacaccttgtttctttgattgtggccaactgagatggagtttggcgatgaggctagatccgttggaaagaggactccgagacctttccatcaagtattcacgggcccaaaacggagctcgtatgcaaatttggcagccgtttgaagtcagcagtgtagcaagtggccgaatcggattccagcacttggaggacttgatcttgatatcatcttgttcattcatgatgtgagcaatggttgtatctgtagtagccatggtcacatcacatgtggtcaatcctccgttcatccccgtgccttcgtcggatggctccaacagtggcagcagttgtttatccctcgactacctcttgttcacggacatttgaggcacgtaacgatcactggcggtcaagctccccattccccatcccacttcgcttcgtccctgtcgtgtgaagctcgtccccgcattccaccggtggtgatagagggcagcagggccccaaatcagacgagtgacgagactcccatcaccgagttaggctgcttcttcatctgcagcttcctcctgctttctcagcctacgcactgcgatccctaagccttgcaaccatgggagagggaggcgtgaggcagggccgcgaggggaagaagcttggcgacagagtccatctcggtgtgatgggcgagttggagctagcgacgataaagaatgacactaacaggaggtcaccgcagaaagagatggggtgcatatgagggaggagcggggaggtcaacaagctccttccacctcctctggacgatgacgctaccatcttgatcctccgtccactaggcccatcgacgactgtgaccccgacgcctcctacccttcttcgactaagcgccgatggcaacatcagcctagcaacagttgtgtcacgcgcgacagagctagcgccctgtccccatccctccccgcagtcgtttgcctatctctctctctctctttgtcgagatagagggagttggagctataccaaacaggacctaaaagacaagagaggatgggatgtggacacattgatttttttttctcttgagatatatatgggtcctacctttttaaatttcgctttttttccttgactgaaatgtcatttaagtgccacttacatgacaggtcaacgtaaaagaccgggttaaatgtcacgtaggcaccatgtagggcaaaaccatttagggaggcaaattaatctagttttaacagttgagggagctgtacctttttaagggcaagtacaaaggtagagaccggtatggtctctatgttaattagaggctatcacgttacgatagttaagacaatacggtctctaaccattaatgtgccaaattactttcttactagccatatttcctttattagactcaatgcaacaaaaattttcctaataaatgcgaagagtcgactctatgccgttgtcatgcgtagcaaccatctttctctttccttcttcctctctcttccacgtcaccaaatatgcttacataacaataaagagagatcgctaataaagaccattgtacatgccctaagttttgcggtttgaggacgcgaataaaactcggtccataggtgagggatgtcgaagaacatttcccaagctgttatggtgacgctattgcaatctgggccgggctggcacagcccacatatatctataactaatataaatatttatatttttccggtcgtcacatctaattttcatccatacacgatccgattcggttagcaatagccatggaaaaaaattgcaaaaaaaaaaaaaaatcggccgccgccgacgcctccaccaccgccggagggagaagagaggcggcggagggagcgccgctgccggatccgcccgcggtggccgccaccgccgacggatccaccctcggacgaagccgacgccgtcgacgccgccattgagagggcgacggggagagggagggagagggggagggagggacgaccatctccgtcgtctccgccgcacccgaccgtcgccgcgccgcccgcaccccgcaccccgccgtcgccgtcgcccacgccataccccacacctcgccgtcgcccgcgccgtgccgacgggagggagagggagcggtccaccgtcgccgctgcaccccgtcgtcgcccgcgccgtgccggtgggacgggagggatagggggagagggagcggcgccaccggaggggaggggagaggaagcggtgccagtggaaagagggggagggggagaggcggcgtccgggacgggggaggcggccggcttggttgggggggagggggcccccggagggagcgggaaaagcggcgtcgggggcggg

SEQ ID NO: 8561 - DNA, 36117 bp, Oryza sativa
cctaccattgaatgaacttttgtatatcaagtgcttcatggaaataagctgatcaaccatgaaaaaagatgttccatcggttatttttgtcagagcaaagatatccatgtaacatgtgaaaaaatagttggctcaaccatgcagtaagccatgcttccatggtaattggttgaatactggcagctccagattctcgaccaacaaagtggttcatctgtatcaaaacattgttttggtatagcagatcatggacatcaatacatcatgttaatagaagaaaaacataaaacttgtttttttaaccacaaattcatatatatatttttgtatttttctaggacatagcgcctaaaaatttgcaaatagtttgctaattgttgtgggctttgaactacattttgcttctacgccagtctacttgaataagaacgcagacgaaaatcaggcacatgcacatatcaaagcaaacatccaactggccataaagaggcaaaaaaaaaaaaagatagcgtaaaatttccgtacaacagaaaatggagcaaggctgtgccagcactatgagcttcaggataaatagaagtcgatgtataaaacttattatatatagtactatatctttattagagacaaaatggaatgtatggcatacgtctatcacactcatgactcatgaatggacatgactttcgacattgatatggtgattgttgtctcataagcaactgtacctcatactaaattttgtataccacttgtaaaggaaaaccttattttgtaagttgtgtgtgattaggttcactgtaattttgtgctcaaatccaaatattattgctcatatttgcaggcaataaagtggagatgcaagcagagaagcaatatcagacaaatgatgaaataaacaatgataagaccaaagagcaaaacttgaaggaagcttctctaaaggacatccaaaacaaggcctgtatagatcgtcagaacattaatggaacagagccccatctagctaactcttttaaagattctaggcctgcatcaccaggaacacaagcactaatgtgtgatgaaatggatactacattcggaaatgaggattatagaagtccatttgtggtgccttcacgtgatcaggatatttctgagctaaatgctgatcaagaaagaatagtattgacagggctgcgagattatcttcgtgtgcttatcacacgtggaaatataaacggtgagtgcaacttgcttacactgttattgtgaatttgtgatcctagatagcacatcgtgttcggtttgctaaaatgttaatttcacacatactttgccatggcataagagatcaaatattatgataaatttaaagactatcaaatctttgaaaaaataagcaaagctttcctggacagttagaatatatggacattgacttcaaaatttcattgatcactatggatgtttatgatgaaacgcagaaatattgttataaaatagctccatctgaaaattatataaggttaataattttccatgattgtatcttcttttgtcgttttcgtatagtcctcacatatcagtatattactagaaaatagcatttctaattctctagtgatttttttttctgcttttacctttattattggaatgtgttggttattagacctgcaatatctttaatttgattgcctttccaataaatctgagaacctaatggtcggtgccacagcaaccaaattctcgttagagacagcaatggaattggattcccggaggcatcatggagcaacaactgttttttcccaagacaaatctatgtcttccagttgtcgtgaaacccttggaaataatcaaacatctatgtcaaatgatgaacaaaaggaaaaaagtggaggttaagtagtagtattagatacacactgcactgtaaatgatcacctctgtacatggatggataagatagatagtataatcctcgttgcctaatttgggcaaccggcctttgtagaatcgatcattgttcattgagtgtagcaaagcaacactttcactgatgtgttgatcaattcaataaaaagtcaattgatttttttggtcttcgaaattgtctttctgggaattgtgaaaagccgatgtcactagtgtcgatgggggatacccgtagaccggatacagagggtattggggtccgttggaacgagaatttacgtaatacgacataaaacaaacaaaaggcgaggattatactggttcaggccccttgataggtaatagttctaatccagttggtatgggattatatgatggaaaccacagattacaaagggaataacagaacttgataataccgacgagaccgtagtcgagttggtccgactagatctcctagtgacttgggtcctgtaggctccgactccgtaggctgtagtgggtatgttggcggtgatattcgatgctttaggtcctgcctagggggtcccttttataccgcgggtcagttgatctccaagtaggactcggagatatcggacccctcacgatatgataaagacctagtattgtccgagtagaactctttccatccgtagataccatatatatcacatgatagatttccttaatgtatacggaaactatccgtatacgtgcgggtataccgtatctgtatacaatgtacatccaaggatagagggtataccttatccgtaaccctgacagtagcccccgacttctgcttaaatgagctcatgtcatcgatcgcgacttctgatgtcggaattgttgtcgttctcatctggtcgatctcggtgtgaaaaccgtagagacgaagagccatcgacaacaccgcatgaagttcaacggtcatgagtgaatttaaattgaagtctaaaaactgccgcgcgcaatggacccaggattttccaatggcaatctctctcctttccttgggatacgcactgtcggaagtgtacctatttaaagggattttgggaatccatttgaagtctgtttgccaaaaactctcctgcttcctagcgctcttcgtcttctccgcttcccgcaaagaaaaccctagctcatttcctccgtcttgttcttcggtgatcctccggcggcaatggatcttgaaaagtctacctccaccatcgcgtccatgaagaagctgcaagacgacggtgccctccctggtcgggggaccatgcagagggaggcaggaggtaagaacctgaacccatcttgggccgcatggttgtggtcgaagattatatttcttgcggttttattcctccgccttccgagtttcttcttcttgtcttgaacttctatggtctttctttgcttcacttgaacctcaactccatcgcattctttagcatcttttctcatctttgcgaggcctacattggggtagatgttggcgggtgttaaatgtcaattctataccgccaacatttgcataaagatcagataataaaacatccaacatagtgataggtgcttaatctcacatattccacaagtgttggtgtatatttgtatgcagatgataaaccccggtgttgggagaaaaatcggactaaagtgaggagaattatgcatccttacaaggaggggttgtgaactttatcaaaacattagtgaatcaacccaaaactccgagaaatggacagaggagagcccagggagtccaccgactgaaggtgtcacgccctgaagtttcccccttttcttgctaaaaaaattggttaaataaattgctcgaagaaattgtttaattaacctagagttgaatccctaattaatcaatgcaattaataatcggaaatggcgtggtggaatttttcttgagttccccatgttgcaatatattaacaggatttttagtggaattttcagagccttggaaataattttaaccaattaaaaatgagcaagtgcaatatttaaccctcaggaaatcctttttccatttcctcctttttcttttctttctttttctttgttgggccgtcggcccaacctccctcccacgcgccgtccttgctgggccggcccgctcctcccctctcctccctgaagttctctctccctccctctctctctcaagcgccgacaggtgggccctacctgtcgggtcatccctaacctcccgccgccgccgcctgctccagccgcccacgtcgtccgcccactccgtgcccactccgtgccccgcgctcgcgcccacgtcgccgcccacctcctccacctctcccgtgcgcgcgcgcccgtttagaggccgggattcggtttgaatcccgtctctcctatctctcttttcctccccactcccccacgtcgctggcgcaataggggccatccccggccacgtccaccccttcctcacccataaaaacactcccccaaacctcctctcccatttccctcactcgccgcgccctcccgtgcttcctatcgtcgccgcgccgctctcccgagctccgccgctcaccgccgcatttcagccgcgcaccgccgccgctagagccgccgccgccgctagcttcgtcgttgcgcgggtcatctcggccaccgcctcgcgtcgccggaaccccaccggaaccctatctccctcgcgagccggtgagatatccatccccctccgtctccggtcaacaatggtggccgccgtggtcacttaccccacccctaacccatctctgctctctcctagggtgccaccgccgctcgtccgcgcctcggcattgccggtcgtcgccgccaccctcgttttccgcgtcggttgccgctgccccctctagtgaggactccctcccctcctctctcccttcccgcgtgcgccgccgccgttggccgcgccgccgctccggccgttcgccggtcgccgtcggtggccgcgcgccgccgctgccgcaccatggccggccggcttgagctgtgccgacccgccagccgcgcctcctttccgccttgtgccgctgcccgtggggcccgcgtgccggcgccccctccctctctcttgagccgctgacatgcggggcctgcttgccggtgccgccccccttgctgacgtcagccctggggatttattgcgcaataaattgattaaggacttttctttgttagtaaaaacatagattatcttctaaaattcataagtaattcatccgagctccgtttaagtccattcaagtctcagtaaattcataaaaatccctagaatccattaaaaatggttttgtttcctgtttcagtagtcttatagcatgttttgcttgtgtgctttgtttgtcgcatagatctcggccgtttcgtcgatccgcggtttctcgaagacgttgctaaggtctcataagtgcgagagcaaggcaagtcatgcattacaattgatcatattgtacccaatttacaaatatcccgcatttctgttaaatgttacattcttttacaatgtcatgtgggatgggtccccttactcagccatatattgtttaccttatgccattgataacatgggtatcaaaatgactagatgttggtttaggaaatgcttagccatgcttagttcaactagtatacaaatggggatcacattattgcatagactttgactattagcatagctttggattggtgccaccgcaatggtgttagttaattaaaatacactgaatggtgggctgtgggtgcatggttttgctggtcgcaccatggcaattaaggaccggttcacgggaaaccctgggagacttaccgtgtttaccacaagcgggagtgggtaactgcttgatctaaaatatagctcgaccctttcctaggcatcggtggcgagggtgggcgtgatggagttgggtcggtcggggtgtccggttgtctagctgccggattcaccgcgactcaagaggggaccgtccactgccttttgaggggtgggggtgaaaccttagcgtggtgtggatggttaggggagggttatgcggagggtcttgtcacgatttcccccttcgcagtatcatggtgatacttcggggcatggcgacatgtgtggaatcgtgtcttgtgggtatagttgtacacctctggccagagtaaaactattcgaatagccatgcccgcggttatgggcgatcaaccagattcaccgtgattagtctcaccccttgtttagcttaatgaactggtgtagttcaagtggttggttgggcctattgcaacgtggtgtagcgttggacagtgattggttaatattgattaattactacaattgttttactgctttcaactactgcttttaaatgctagctttgtgcaaatgaacccctaacctcctttggttatatcatgcatcttacctccttttccggtatgacttgcggagtacagtgggtagtactcagtcttgctctcttttcccccacactagagctgaagatcttcctagtgggagctgtcctgttgaagttggtttcgtcgctgccgtcaaggattgcctgtggaatagagtcgccccactgtagaagtcaagtttccaagtttagctcgttttatcttttccgctgcatttgtaatcttttatatttttgtaagacgtggatctgtatgtcaacaattgtcgtttgtgtaccctggctggtcctggacagggatttaatgcacattcagcctagaaattctggttagtgaatttctaggcgtgacagaaggccaggccaggagggcccagcccaggttcggctaaacccctaggttcggccgaaccccctggttcggccgaacccccctaatcaccgttgatcctggggtttggcgtggacgctccagatgctctcccaatgacggttgcggggcagttcggacatttccccttcgctaaccgtcatacctacctctatattaaggcttcacttcctcactttacacatacacttccaagcttgagctgaattataagagtcctccctgtccggctacgtagtagagcgacatctgggaacaacgggttaccaatgcctgaagtattgcgttaggattaaaattaagctttccctagacactgtttctcactagtcaatcctctctatcctggcctatcatttgcttggtgtctttggatgaaccggaggaagctctgatcacacacgttctcttggattccatacccttggaatactccgtaggggaagtgctacatcggtatatccgtgcgcttgcggattttatctgtaatcgtatcaaataccaacagtagagcccttccttgatctcttctgcttttactatgagttgcgttggatggaacccaacagggtatctagatgcgttggattccgacttcgggattgtctgaagtcgcgttacatccccttccaatgcccctcttctcgcagcaagtggcgagcgagatggttctatctttagatagagaactcggatcccgtccttgttgtccctaaagaacagccaaacaaaatcccagagtggaccaccaaacccgccctgactccctccctctaatctttcatcgacatcattgatgatctccgaaaacgggggttgtcggtgtacgaagtcgctgccgacttcgtagataggcggattcaaccgctgcaggcccgcgcccatccggcctttgattactctaggccagaggacacgacccgggtctctcctcggggtatttttttctcgtatttctaattttgttccgagtgcatccgtttctcctgacttatcgagttctcgttctcgatttacaggtctggacagtgacaccgtggaacgccgtgtcggacaggtgatgatgagcgccccctcagcggcggacgacatccccgtctctctttgcgagaagaacccggccgaacgcatcgctgcaattaatgtgagtgtactcgatgattcctttacatctttcttctcgagatcgcgttgtgacttcaagttgtgcaggctctccctctgacggacgtcatcgggccactcgtggaccaccaggcggcagcgtcgttgaaggaaagcgtcgccaaggaggcgtctgacattgttgttgctgccaccacgagtggcagcaatgttccaaagaggggaaggaaattctccttcgtactcaggacccatcggaaagcgacgaactctgcggtaagcctctctctcgttctttagcgcgtagtcggaacgacttgacctcaccccatttcatcttactcaggactcggacgcgtcccctctgcctcagcgaaggcagaggttcgtgacgatcggcgagaagtaagtaaacgttcttgaagtcttttcattctcgaagttttgatcgcctagcctcatgaagagaaggcaaatattcgcaggatggcgcgggcgaaggtggcgcaaggcaggactgatgctgcttccagcgcgtcccctacggcaacctcgacaggattcgtggttaccgctaaggaccaggaggtgacgccgagtagccctgtcgtcagcctcgtgcctacccggagcctgtccaccgacgccctcacctggggagaactccaagcggagatggagcgcctcctccaggccggtgcttgcggcgtaggttgcgagatcgaggaggccagggcggcggcgttgtcggcaaaccagcgtgccgaccagctggcgcgcgacctggcggaggctcacgaggacctccaaaagatgagggagctggtggccggcaatgagatgcagtggcgtggacttgagcaccggatgtcggagctcgagggccacatgatcgacatccgcggttctctgcggacgtcgttcaccagcctgcactaacttgtcggggagtgcggtgtcatgactactatcccggcgtaccccgatgagttctcgctgacgtcgtcgctcgcggaactgactacggcgatggaggagatcccctccaagcacgtgaccaggatcggcgaggagacgtctaacggcatctataccggagcatgccacgtccttgcgtgcatgaggctggcgcatcccgatctagaccttaagagagctttggatcggggggccgccgatgacgcgcgcaagattatgacggaagaagtcggtgacttgggggagtccgtcctccccctttttgaagagtaggatatcttcatgctgtaaaactatttgtggatccaaattgctcttatctaaacagctgtttcccttgtttccttagcatgtgattccgagtactttgttgtcattgtagagatgttgatatcgaggatatccagcagcacgggcagcccgatatgccggtgattgttccggcgcttacgctcgagccgttcgtgccgcgggaggagatcagtcaaagcccgtccgcggaggcgaatatggcaatgatgtcccaaggtttgtgtcttggtctccttcactccttgtgtttggattgacttaattagccgtgttctcggaagagaagagtagcttgactcagtcctttccgtggcgggcagacttcgagaacatgttggctgaccgagatcgtcgaatccaatattggaagacgaagctcgaggtggccgaactcgagaaaaccatggtggaggtgaagaaggaccaggccgtggaggctctccgaggtcgcgaggtgtggttcaactcgtatctcaagagttgctgcacgacgatggcgagggtttgcaaggagctccgagttccccgcggagatcccgaggagtcggcggctggttatatctcgtagttgaatgggcctgcgcacagctcgaagggattggcaagcgcatcgacgaggccctgaagcagaagtgtcgtcaagcaagccgctacgccggaggacatgtgctggcctgcatccgagatcaccgcccgcagctgtacctcgagttcctgcgtgaagggttcttgcgttctcggaggacacccgcggagatcgacggccttgcacagtcgatggcgccgctcgccgagaaggtttttcgctccatggattggcgttggccgtcctggtagtatttgtatcctgtagaaaaacatcttaaggaagcatgtaatatactttgaagtatttatgacttgtaagaaatacttataaaatagaaaaggaatctatctaagttttcttactctgggtatgttgtgtatgagtgttttctcactttgcgacttcgatcagtcacctgagccatacactctccctagcccctagccttgtcatcagaaaatcgttctcagaggataaggctcttggacccttgacctgccttggttgaaaaagtactgaccctagcccccagccgtgaagttggaaaactcaatttccgattacacggcttggttaatacacacggtgagaactcttatatgaccagatcttatatggtcgtttgtctctgcatgatccgacaatgccttatctgctctaggcgtccccagccgaagttctcttaggtttctcataggccttgccagaacgacacctagagttgagactagtttttttttctgtccataataatcatgaaaacattgtactgatctactgccatggaaacatcagcggagcagagaaactgctattatatgtgtacaagtaaacgtatcgtttacatattgacaccaagtcaagtggagcagagaaggatttggatcagatagcgttttgtgttacaatgatgccaagctatatattagagcaacaaacagatgtaagatgcaatgtacggtgtatcatcattcacctaagtatgcttccaggcatcgtgggcaatgcgttcaaatgatattatcattatactttttatttgaaacaggtagattatattaaataataacatagattacgttattcgagaaaaaaaaacatagttacaagtttacagccacaaataggaaaaaaaatgtcaaagtagactgggtgtgtttgcaaggaggggaaataagtagactgtaaaaccatgtaaaccattaggttatgatttattgagtaatgactattaattattttaaacttgaaaaatatattaatataattatttaaaagcaatagactatttaaaaaatacatcatttagcagtatagaaaacgtgagcgtggaaaacgaggactttatccctcttgtgcttgaaattgtcaaccgaaacctaaggggggggggggcgtctacggatcggacgtccgatcttttaggagaaatcggacgcccaccccagtctccgtcagcgcatgcagacgcagcctgcatgcatgcaaactaattcagcctgctcgcacagaatgcatgtatactagtaactgttagggtggttaaagtttttaagcaaactttaaactattttttctcctaaattatatatccaaatcatgatccgattgcaccattaaattcattgtaattaaaattttaaaacaagaccacacatggatatattccgacgaaattttttttagcttattatagaattatgtttaaatgttgcacgatgtttcactaagtatatcggaattgttttactaagtagatcgaaaatgtttcaatcgtttaaattgggtgttgtttcatcttttataaaaacaatatttcagcaaatagcgaaagaatatttcagttcactgcaacatttgatccatacatagtgaaacattgtgactacactaggtgaaacattttttttggaaaaaaaataaaacgaattcccttaatagagtgtcggtgacatggggccgggggtatcgtgactagaggcttgggtagccgcgatcacccacgtggcccgaccccctcgggggggttgggcccgagggtgacgtggccacccctccttctgtctccccgaggggtcgggccgctcccgtttcggccccgagggctggggcgccccgaccccctgtggtgttggcgccacgtgtgtgggttaggtgagcacagcggcgctcacctaaccgcatttatagcgggttagacaagcgcgccacgccgtattcaatgcggtgcagcgcatgcttatccggtccgtgaccagtcgcggtatgtgaccggtcatagactggtcagatcgcgggttaggtggcaacaggcggcctgtcgcacgcctcgccccgtcccgtcggaatgatgagagcttcctggctctcgtctctagccggagctggcgtgctgactcctggagttggtatgtcagtcccggtcagatccattctaggcttcagcgcaagcatggcaagaaagtcgctggccattgaatgaaggttgaaacgggcgtccaccgggagagctgacgagcggagcagaaggcgtgtgctgtgcttgtcaggggtcacttctggctgtagactagccctcattgtaaaaagaatgtttcttttcttaggcagcttgaggcccatgtggtgacccctgaccagataaaaaggaggcccaggcctaagagaaggagagagagaagagagaggaaaaaaagagaaaaaggagaagaggagggaggggttctagagcctgaacggtctctcgctctccggctctctgtattccttcacacacagatccatcagaacacaggagtagggtgttacgcttctcagcggcccgaacctgtctacgtcgcccgtgtcttgtgcgattcttctcgctgacattccttagatcgagggcgaagaacctcacatagcgcccccggccgaaccggcaaaggagggcctgcgcggtctcccggtgaggagccccaagctccgtcatctggcgcgccaggtagggggcgcgcgtgtctttctaagccctcgtcctctttcgtgtgcgccaagcttctcccgctcagcccaatggccgaacgggcagtggcgcacagcctctctccgaacgctagcggtgacgacggggagcagaacccgcgccgtcgggctcgcaccccaccatccccctctcgccgaaatcttgggcggggggaggcgctcggggaggtcgaaggatccgcgacttcgccgcccgcgggcaacgggggaggacggcgagacggggcgcgtcgccgcctcgtctacggcgatggcggcacgccccagggcgcgctccaggctgcgggcgcgctcctgcgtcacccgcccgtcgtccccgatccagagactccagcccgacgttggctggatgacgtggccgatttggtcatgacggcacagcagcgcctaggcgccggcaggcggtcctccgccaccgggacctctggcgctgccgccgccggctccatgtcgtcgaggcggagggcgcggtgagcggcggccgttacccgctgttcgtccgccattccctcgtcaacgcctccgacccaagaagatgtgcgtggggggccggatgcccggctcgatatcgagcgccggcgcgacgatcgtcgcgccgcccacgcaacggagggcgcttcctcgtccggagcgccacttcggtccgggcacgggggccggccccccgtgtccccggttggcggtgccggctgtcgagcctttgtggcgagccttaggaacgtccgttggcccccaaggttccggcccaccatcaccgaaaaatacgacggaagcgtcaaccccgccgagtttctccagatctacacaaccgggatcgaggccgccgggggtgacgacagggtcatggctaatgaacttgccacccgcgtcggtccactcttgggaggatttgtgccagcagttcaccacgaactttcagggcacatattcgcgcccaggcgaagaagcggacttgcatgcggtacagcgaagggacgatgagtctcttcgctcgtacgttcagcggttctgtcaagtccgcaacaccataccatgcatccccgcacacgcggtgatctacgcattcagggggggcgtgcggcacaaccgcatgctcgagaagatcgcctccaaggagccccaaaccaccgcgcagctttttgagctcgcggaccgtgtggctcgcaaagaggaggcctggacctggaactcctccggctctggcgtggcagctccggccgcccccgagtcagccgctcggtcagggcggtgggacaggaggaggaagaagaggtcggcccgttccgacgacgagggtcatgtcctcgccgccgagggcgcttcgcggtccccccgaaaggggaggcctgcgaacgacaaaaagaaggaggccggcgctcccaacagggagcgcccaaccggcaagtggtgtaccgtgcacaacacctccctccacgacctcgcggactgccgcgcggtcaaaagtttggctgagcggacgaggaagtgggaggaggagaagaggcaggagcgccgtgagggcaagaccccggcggctcccgccagcaaccggcgaggtgaggccaagcagaaggccaccgccgaagacatcgacaatggcgacgatgacctggggttccaggagcctgaggccaccgtcgccaccgtcgatgggggagcgtgcgctcatgcttctcgccgaagcctcaaggccatgaagcgagagcttctggccgcggcccctacccatgaggcgatgcggcgggcgcggtggtcagaggttcccctcaccttcgaccagaccgaccacccgccgtgcgttgcccggggaggacagatcgcgatggtggtttcccccaccgtttgcaatgtgaagttggggcgtgtcctcatagacgggggtgcagctctcaacatcctctcccccgcagcctttgatgccatcaaggccccggggatggtgctccggccgtcccagccgatcatcggtgtgacgccggggcacacctggccgctgggtcatatcgacctcccggtcaccttcggtggttccgccaacttccgcacggaacgggtggacttcgatgtggcggatctcagtctgccctacaacgcggtcctggggaggcccgcgttggtgaagttcatggcggcggtccactacgcctatctccagatgaagatgccgggccccggtggccccatcaccgtccatggcgacctcaaagtcgcgcttgcttgtatggagcagcgcgcggaccacctcgccgcggcgtccaagcctgcgggtggcgacgagaggctcagcacctccgtcccggccgccccaaggcagcggatggtcacgtgcgacgaagtcccggtcaaggaggttgccctgggtgacggcccgtccaagaccacacgaatcggtggtcttctggacgacaaataggaagacgcgctcgtctccttcctgcgggcaaacgccgacgtcttcgcctggagaccggcggacatgcccggggtccccagggaggtgattgagcaccgtctcgccatgcggccgggcgcaaggccggtccggcagaaagtgcggcggcaggccccggaacgtcaagccttcatccgcgaggaggtggcgcgacttctggaggccggattcatccgtgaggtcatccatccggagtggctggcgaacccggtcgtcgttcccaaggcgaacggcaagcttcggatgtgcatcgactacaccgaccttaacaaggcatgtcctaaggacccttaccccctgccacgcatagatcagattgtcgactccaccgcggggtgcgaccttttgtgttttctagatgcatactctggttatcatcagattcgcatggctagggaggatgaggaaaaaactgcattcattacccccataggaacttattgttatacgacaatgcctttcgggttaaagaatgcaggtcctacttttcaacgtactactcgaatttgtttgggtagccagataggacgcaatgttgaggcctatgttgatgacttggttgtgaagacgcgcaaccaagagaccttactctcggatctagcggaaactttcgaaagtctccgctccgcccgcataaagctgaaccccgataagtgcgtgttcggcgtgcctgcgggcaagcttctcgggttcttggtctctgcccgaggcatcgaggccaaccccgagaagatacgagctatagagcggatgcgccccccccagcaagcttagggatgtgcagtgcgtcaccggctgcatagccgccataagtcggttcatatcgaggctgggagagaaggcactacccctatttaagctcctcaaacgctccgggccgtttacctagacggaggaggctgagcgggccttcactcagttgaaggcgtacctcagttctcccccagtcctggtcgccccggagccagatgagccgttgctactctacctggcggcaaccccacaggtggtcagcgcggcgttggtcgtggagcgcgacgaggacaaccctcgctccgcgcatccccaccctgtgtcgactcgacccgggagagagcaggaaggagaggcccccgagccgaacggcggcccaaggcccccgacggccggagctggccctccgcctgcttgtccgacggtgccaggcgcccccgacccctaggatggccccggggccactgcgggaaggccgcgcctgtcgccctcggaccccgaggtcgtcggcacagaagccgagtgcgccccgcgcggcctctcggacgaagagcgccctggagatgcggcccctggcgaagaggatcggccccgccgaaaggtgtagcggcccgtctacttcgttagcgaggccctccgggacgccaagacccgataccttcaggcccagaagatgctttacgctattctgatggcttcgaggaagttgcgccattatttccaggcgcatcgagtcacggtggttacgtcttaccccctcggccaaatcttgcataaccgagagggtactggacgggtggtgagatgggcaatcgaactctctgaattcgatttgcgctttgaaccacgccacgcgatcaagagccaggccctcgccgactttgtggcggagtggaccccagctcccgagcctgtctccacccccgaggccagctcgggcccctcgcagctgcctcacaccgcctactgggtgatgcagttcgacggctccctgtctcttcagggcgccggtgcgggggtcacgttgacctcgccgagcggagatgtcctcagatacctggtccgcctcgactttcgggcgaccaacaatatggcagagtacgagggactccttgcgggactcagagtggcagctggactggggatccgccgcctcctggtgttaggcgactcccagttggtcgttaaccaggtctgtaaggagtaccagtgctctgacccgcagatggacgcttacgtgcgccaggtgcggcgtatggagcgccatttcgatgagatagagcttcggcacgtgcccagacgggataacgcggtcgccgacgaactctcaaggctcgcttcctcgcgagcccagaccccaccgggcgcctttgaagaaaggcttgcccagccgtcggcgcgacccgaccccctaggggggacggacgcgcctgaacggcccccgaggcccgtcggagtccaggcctcggggcccgaggggagcgctcccagctcccctagattgattgcttggatcactgagatccaggcgtacctcgcagataagactctacccgaggaccgcgaagggagtgaacgcgtccggcgcatctccaagcgctacgtgctggtggaagggaccctctatcggcgcgcggctaacggagtcctcctgaagtgcattcctcgggaacaaggcgtcgagcttctcgccgatgtccatgaaggcgagtgcggagcccactccgcctcacgcaccttggttggcaaggcctttcgccagggtttctattggccgacggctctcaacgatgcggtcgacctggtccggcggtgcagggcgtgccagttccacgccaggcaaacccatcagccggcctaggccctgcagaccatacctctttcgtggccgtttgctgtctgggggctcgatatcctgggtccgttcaggcgggccccgggcgggttcgagtatctgtatgtcgctgtcgacaagttcactaagtggcccgaggcttatccggtcatcaagatcgataagcactccgcgcttaaattcatcaggggcatcactgctcggtttggggtgcctaaccgtatcattacggataacggcacccagttcactagtgagctcttcggtgactactgcgaagacatgggcatcaagctctgcttcgcctcccccgcccaccccagaagcaatggccaagtggagtgcgccaacgcggaaatcctcaagggcctcaaaaccaagaccttcaacatcctcaagaagcacggcgactcgtggatcgaggagctgccagcggtgctctgggcgaaccgaaccacgccaagccgagcaaccggggaaacgcctttcttcctcgtctacggcgcggaggcggtcctcccatctgagctcaccctgaggtcccctcgggtcaccatgtattgcgaggctgatcaagatcagcttcgccgagacgacctcgactatttggaagagcgaaggcggcgcgcgtccctccgagccgcgcgctaccagcagagcctgcggcgctaccatcagcgccacgtccgggcctgatcactctgcgtcgacaacctcatcctacgccgcgtccaaacgcgtgctggactgagcaagctctcaccaatgtgggagggtccgtatcgagtgatcggcgtcccccggccgggctccgttcggctggccacgggcgacggcacagagctgcctaacccgtggaacatcgaacacattcgtcgcttctacccctagtgggggtcgggggtcgtgtctcgggctcgagccaaccccgcaccccccccccccccccgggtgtgcagggttggccgggggctaccacatgcatatacttaccttttttctcttccgtatttcaataaaagcattttcgatttcctgaggactgtgtctgtgccatcgtttccttttgaagaatcttggcttgaattagcacgctcgtgctcgaccctgccctcggtggcccgggccggctaaaatcgccaaacggggcccagaaccgagccgtgccccggggcgtggtgaactccgggggggaatcggcaaaggcccacaatcgggtcatcataaccctcggtcaccgcgctctcggcctggccagtctcgacacgaggatctccccaggcactagccccgacccgcgccgcttgaggctgggacctgggcacgagcccttgttcaagccaagacacagaaggaccgcggcacagaccatcctcgtctcatacacacaacaaacagaactgacgcagaaatttcctctttacttgattgcagattaaatcagtctatacaagaagggggctcgaaggcctcgcaagaagaaggaaaagttattaagattggcgagggcctgggggctcactccgatgcgcccgggtcgccggcctcgtcgtcgctgtcgtccgcaccgtcgtcaccgccctcctcgtcggagtcgagggcgaacgcgagccgaggggccgtaccctcgaagctgtggacgatgtggtcggcggcatcccggacctgcgcgcgcgcgccgtcctcggttccgggagggaactcttccagcgctgcccacggggagaagtcagggtccctggcctggtagcttgccagtacgagctccaccgccccccgggcgaggtccctcgaggatgacttgatcgtctcctcgagctcctcggggagccgctcgagggccccggccatctctgagaggcgctgggcgaggcccccctggttggcggcgtacttcgtgtaccgcccgccccagaggcctgcctgccgcccggcgcggtctagacgggagacggcgtcccaaagcatgccgggccctacctcgttcgccaagcgaagggcctcgacctccccggcggacgagtccagcgcgccctgcagctcggcgatggtgtgtccggtggctgcgaggcgggcggctaggtcgccgtggcccgcagccgccccgccgctgtgcgctctcgtccagctccttcgcccgcgcctcgagctcagcggcccgctgatccagtgcggccctctcggcgcgggcgccttccagattgcggcgcgcctgctcctcccgcgctgcctcgcggaggaacaggctgtccaccagccgctgcgccgcggccttggcctcctcgagagctcgctcccactcagtgagcgcgtcctcgcggaggcggagtgcggactcctctacggcgcaggcggcctcgtgcgccgccagtgttgcctcccgggtggcgacggcggcctcgcggtccgccaggtctctctccttcgcatcgagggcgcgggcgcgctcctccagcgccgtggcgcgagcctcaagggcctcttcgcgctgccgggacgccgcctcgttctccgccgcccgccattcccgggcagcggcggcgtcaaggactccccgggcggcgtcgagcttctcctctagctccgccgcccgcctcccgtattggaggcggaggtcgtcccgcgcctcgtcgagcacggcggtggcgatgagggcagtctcccgctcctcctccacctccctggcgatctccgccaggtctctacgacgggcctcgagctgtgaggcgtgccggcggtgtgccttgcggcccgcctccaccatggcctccactgagcgccgcccctcctcgacgcgcgcccacgccgcgtcgagctccgcccgctccgcctgcaggacctccatctgggcacttaacccgtccagtaccgtgctgttcgcggcggccaaggcctgcaggaggggctccacgctcagtggggcagcggaaggcagagaggagagccgcctcggtgtgggtgccgcgcggctcggcccaccgatcgacgtgccggactcgggggcgtcccccgaagctggctcgtcccaagcgtcgcccgaggggtcgggcccgagcggcgcgcccgcggcctcgtcgtgggtggcctcggaagtcgtcgtcgcctcgggcggagtcgggtcgggggcttggcaggccgcctggcgtgcgcgcgccgcctctgcctcccggacggactccccggcccggcggagtctggcctcctcccgagcggcctcctcagcctggcggacccggacggcctcctgggctgcctcctcggcttcccggaggcggtccgcggcttctcgccggtcggcttcccgcctccgggcctccgcggtcgccgtctcctcggcctcagaccggccggatttggaatggcgggggagggcgcgacgggatctcgctgaggcagaagaaaaaccagaagacaaaaagaaacgggtgagtgaaaactcgccttgggagatgggagaatgaatacggccgcggtgggcgcggggacgaacctgcggggaggtcggctaaacgaccacctcgggggcgagatgaggttcccccggcatggctcggtccccctcatcttgcggagccgtttcttctttcgctccccctcgggctgcggcgtcggcacggcaccttccgggcgcctgctgctggcacgcaccgccacgcccccttggggaggagatgggggaggggtaccctcctgcttcctcttcccccgggcgtcggcagggcggctgccccccgggcccccgtcacggggcccagaagcacgaccccctcccggggtagattgttcccccctgcggctcccgcccgcgccatcgtggcctcggggggcccgctcccccgacgccccgaccacctgcatgatggtcaggatgttggcgcgctctggatcgcaacaaagggggaggaccccttgggggatgagggatgcctccacggagctgagattcagcacccgttggaccaccatcctgaagtcctcagggtcccagtcccatttgcgcccctggtgggtcctcatgtagtcctcgggcccggtgtactcccaggcgccccgggcgcgccgctggagcggcgcgatccggcgacgaaggaagtcgccaaacaccatggcccccgtgagcccctgggatcacagacccaccaggcggtcaagaacggcgtcgtagccgtctcccagatctaccgccgcccgccagctggaggcctgcgccgggggctggctcggaagtcggaggcgcgcttcgtcggcgaggggggtgtagaaccaatcgctcttccagtcgtcccactttttgcgaaggacgcagggaatgtagcggttcagcacctgcccccgcggctggaagtagcagccaccgactaccgttggcggcgacaccggctgtacggtgaagaaccaccagaacagccgaagaaatgggcgcaccccgataaacatctcgcacaggtgcgcgaagatggccaacgtcattatcgcgttgggggtgaggtgcgccatctggagatcataaaactccagaatatccatgaaaaaagtagagaatggcgggaccagccccgccattgcgaaagagaggaagaagacggaccgccccgggtagtgtggcgccgggcgtccctcgcccagcgcgaccacttcccggccggtggcagattccggcatgaatcggcgcggcagcccggcctgcctctcgctcacgatgcgggaaggcggcagcacgctaccgtcgagcggtgcggagccccgtgccatgacgccggcggaggaggagcttgagagcgagcgagtgcggcaagggtagggcacaggaaacgaaaagttagagcgcaagtggcaaaggcaaggggaagagtggcgagaggaaggaaacgaatcccttcgtcggcgtctttacacccttgccaacgctatgcccggctcctcgtttcccgcgcccactacctcgccccctcgtttctcgcgcccacgcctccactaaccccactcgcccgtttgcggcgcacgcggcagatgtgcggccgtggcggttgagatggggcagatcgtgcgcgcattaactgcgctcgccaaccgcaaaaagcgccatcatcatgtccccaggtgaaacaaaccggctcgtcccgattcgcgcgctgctcgagtaatgtagcggtcttgaagatgccgctcattattgtcggtcggtttttcccttgccgatgcgcgcgatttgcgaccgttgggtttctgcccgcctgtggagaccggccccacctgtcaccgggcctaaggagtggcgtcacgcccgagcgcctccctcgaggggggcggtcgccctggcgtaacgccgggggctactgtcggtgacatggggccgggggtatcgtgactagaggcttgggtagccgcgatcacccacgtggccacccctccctctgtctccccgaggggtcgggccgctcccgtttcagccccgagggttggggcgccccgaccccctgtggtgttggcgccacgtgtgtgggttaggtgagcacagcggcgctcacctaaccgcatttatagcgggttagacaagcgcgccacgccgtattcaatgcggcgcagcgcatgcttatccggtccgtgaccagtcgcggtatgtgaccggtcacagactggtcagatcgcgggttaggtggcaacaggcggcctgtcgcacgcctcgccccgtcccgtcggaatgatgagagcttcctggctctcgtctctagccggagctggcgtgctgactcctggagttggtatgtcagtcccggtcagatccattctaggcttcagcgcaagcatggcaagaaagtcgctggccattgaatgaaggttgaaacgggcgtccaccgggagagctgacgagcggagcagaaggcgtgtgctgtgcttgtcaggggtcacttccggctgtagactagccctcattgtaaaaaaaatgtttcttttcttaggcagcttgaggcccatgtggtgacccctgaccagataaaaaggaggcccaggcctaagagaaggagagagagaagagagaggaaaaaaagagaaaaaggagaagaggagggaggggttctagagcctgaacggtctctcgctctccggctctctgtattccttcacacacagatccatcagaacacaggagtagggtgttacgcttctcagcggcccgaacctgtctacgtcgcccgtgtcttgtgcgattcttctcgctgacattccttagatcgagggcgaagaacctcacatagcgcccccggccgaaccggcaaagggggccctgcgcggtctcccggtgaggagccccaagctccgtcatagagggtttccaaaatatgtgggtgatttgttgcaaaagaatgttctaattaactacaatattagactatacatagtgaaacattgtaagtacactagatgaaacattttttgtgaaacaaaaaataaaacgaaatcgcttaatagatggtttctgaaatatgtgggtgatttgttgcaatgcggcgcgtttcataatatcaaaatccactacaacatttaatccgtacatagtgaaacatcataagtacactagctgaaacattataaaactactggttgaaacatcaaaagagaccatatgcaacattaaaaaaatcaataaaaaaactaaaatatttttttcaaaatataatcatgtgtggtcttgttttaaagatttaattgtaacgaatttagtgctgcaatcagatcgtagattagataaatagtttacaagaaaaaaatcttttgaagaaataagagatgtgagcatatgggtaaaagattctttgaatgtaatgacagacacatgcatatcgatttttctccccttccgtcgaacgtccgacacccagcattatcctaaggggctccatatctttaaaatgcctacgagcaaatgtgcacagccacattgatcaactccgacacgcgtaaaaacagaagaacacatatcggcggatcggccatcatcttcgttcttatgatggaacaacaaaattatgtcattgaacaagtcggtgacccaaatctcacagttagcgctgccgattcaatcgataacccaacagataaaccatactatacgtctttcatagtttcattggtgaccatctggccgtggctggtgattttagtctatccggagtcgtcgcctacaatggaatttcacgtcgaaatcatgtacagcacagatgtaggagtactgctacatttttcaagaatgtgcgtgtcgttttgcaatgccgtggagaccagttcagcgaattagtcagcaagtgtaagtgattgtgaaaatgatggaactaatgtccgtacatatgagtacttgcatataattgttactccatctctgtttttctgctctaccatgatgatttaattttaaaatgaagtccttttttttagttacggcatgttcatttgccatgtgcaatttatgttagagaggtggtcaaagtagaatacttgttgatattaattagagtatagtacttgcttacaaaaattgtcgcaacgattctataggttctagtgatttagtcctacggctacacactatgtagatggcggcattactgttgtcattaatgcatgtcaactttgctgcaacctaacaatgccgtggcatgacaaggttgaaaaatatctagtcttttgtaaaagaaaaataaacttggtatgcccacataaccatttcatcaattacttttattatctacacacacacacaaaaagaaatactattaagagcgtatgcaatttctctgttctttctttattacagatctgttcatgcataccagaagacacaggagcactgcagtggagtcgccggtgccttgtgtggtctttgtgcaaatgcatgacatgcatttgttggaacttggaaggttatgagcaaatttgatccgaatgtttttgtctctgtccaccattgcatcaaaattattgctgcaagacgtgtggaagcacccaagaagaattctgcagcatgttctcacttgccgtgctgtttggtcatgtactcacgtccatttcaaagaaataacttttaatgcttttagaaaacttatcatgtttatagcctaaaagaaattaatttcgaattgcctgtgtaattctttcgtgttacacaatactttgagatgtaagatctggctgctctgcttgacggagatgagatagagttggaaatgagggcatcttgctaattgtattactccctctgttccataacataaggcacaactattttttaaaaatgtttcataatataatgcatacatgaatgcataccattaattagcacttctttcccactaaattattattattttagtcatccatcctcaatatcttaaattctattagatgcatacattatatttataattagggtgattcaaactataagatgataataattatttcttagtttttaaattgagggtggttgagccttatattttgaaatggagggagtattagtaaaaacagttttactaattagaagcaataacatattcttgcacaacgaattaatggcatgttcagattgtagccaaaataaacctcatcaaaattttggctatgtatttaccaaatttggcaacaaactaaacgtagacattttttttagcaattttaccaaaaaatgatatggttgaaaatgacatcaatctgaacagtccctaagtctcggatataaaagggatagacgccaagtcaacggaaaataagggggtgtttagatccaccggcaattttttttgtctcgtcacatcgaacgtttgaatacatgtacagagtattaaatattgataaaaaaaaaactaattacacagtttgcgtgtaaattgcgagacgaatcttttaaacctaattgcgccatgatctgacaatgtggtgctacagtaaatatttgctaatgacagattaattaggcttaataaattcatctcgcggtttacaggcggattatataatttgttttgttattagtctacgtttaatacttcaaatatatgtcagtatatcttatgtgtcccggcaaaaaaaattttcccgtggaactaaacacagcctaaatactagtaccttcattctccaaagaataatattctagacatcgatacaatccctcaatctctatcaggcatgttttatctctttttttcacaagctatggtgttcgtttctgctaaagatgaagatgaagctaggaaaaaaaaacaagaaagtcattagcgcaaaattaattgagttttaattgttataatcttgaataatagatttatctgatatttcaaaataacttctctagaaaaagttttcgtatggaacacatcatttagtactttaaaaaatgtgctaatggaaaacgagataaaatctaaatcttcacgagaagaacataaaatgtgaagaatgtaacctgtgaaggagttcttcaaagaaatctattaatattattgaggtttgaccgcacatatcttaggatttttttttcttttcagaataaaggtacaacaacttgatattgcacaatagacctttgcttacaccgaaatagctattcttacgactaacatctgactcaactagttgtttagacacatctgctattttcctgggtccatatggaaagaagccaagcgcaaggattagtggatgaggcgaggtcagatgctaaagtcatgctcgtgaatagtaataatcaaaatgaaggcagcatcagaaaatgaaggctttgtctgtgccattaaggcttgagcttagagcatctacatttgtaaaaaaaagaagaagaagctaacattaaacaataaatgttgcaacaattaatacaacatatttactattgtggaaccataagacgtgatcacaaggcaataaatatttttttattactagcacatatactcgtgcattgcaacgggacaaaaaaagaatgcttgaagattaagttttttacgcaaagcgaggtggtattaacgtatgattgattgagttttaattattacaaacttaaaaaataaattaatatgatattttaaagcaactttcatatagaaagttttcgcacgaaacgcaccatttagcagtttgaaaagcgtgccacgaaaatcttaatctttatccaactcttgtcggagaaaagaacgggacctgagttgagaagataaacatggttctcgacagatggagtgaggtgttggtatgaaagagatgagtgatcgttctaaaaaaatacctgagagtttcacatgcaaaggtgactacagatcggatgtctgatcttttagctaaaaatcggacgcccatctcaatctccgccaacacatgcagacacaccaggactaggtgcagcccactgcaagtatcggaagccatgcatccatactagaaaataaaagttaggttggtttaagtttctttgagcaaactttaaactttttttttcttaaattacttttctaattcatgattcgattgcaccactaaattcattgcaattaaaattttaaaacacgaccaaacatggctatgatccaatgaaaaaatatttagctttattcatgaatttttttaaatgttgcacctattacatttaaatgtttcagctagtattcataagatgtttcactatttaatttgcaaattttgcacctattatatttaaatctttcagctagtattcatacgatgtttcactatttgatttgcaaatgttgcacatggtgttcttggaatgttttagcaagtattttatatttttttaataattatagtttagtgttcatatgtgatataaaaatatttcaacaacatcatgttttataaatatattgtatctctgatatgattttttttgttttactcattaggactcagtgtttcatataagtggttgctagtgttgcagcccaaatttttaaatgttgtatttctaaacatcgtttgattttttatcaaaatataatcgtgtgaatacaatgatgtaatcatatgtagattggataattattttaggagaaaaaacatttaaaggcggagaaaagggtgtagatgagtaaaaaaaattatatgtggacatgtatgaatggacatgacatgacatgtgcaacatacactgtgaatgagaaaagaaaagatttggtgtttcatatatgatatatctggaaacgcgaaggatttggtgtttcaaagttaggtccaagctaactgtttagtacggatattaaaaaaaacaagaatcttgtcgatatgtaaaaagtgtgtagtattatacataattggaaacggtcttgtgcagcgtgctcatgcgaggcggtgtgcgaggcagccgcgagcgggcagtgcatgtggcatcgaatggactctggctgaatcagaggggaaactgttttgatccctcgaggggatgcccctcgttgtttgcatgttactcaaatagttataacttttttaaaaaaaataaaaaatgtattaacatgtgatatatcactccacaagcatgcaagtttaaattcaacttctatatctcgcaatgaaaaaaacaaattaaactacagctattaatgtatattcacagtcaaatttgtttttttcatttcgagatgtagaacaatataagttaaatttgaactcgtatgtttgtggaatgatatatcctatgctaatacatcttctcaattttttaaaattattttataactatttaagtgacatgtaaaaaaataagtggacatcctctctctcaatggatcaaaatccactcccgaatcagagtgggcgtgcacaaatcacggcgcccggcaaggaaaacaaatcgcgcgcggctgaaatggactcggacgcaatcgacggttgaacggcacgcgcgtcttggacgaaatcattgcgcgcatgccgcacacgggacgacgtacaaaatccctaacaaaaacatcttaaataatatttatagtagtagagattttagtatggaacatagatttatctcgagcgatggagttcacgagactgttatttttacttggtgggaccgacctacctttacttcatagcagaagattgagctagctatactgaccttattattgtattatattgtggtgtacatattttttaaaattatgatacaaatgaaaacacataatcgttataatctgttttaccaatcgaattacggttgttacatatcatatctctttcacctgcttcatttatttaataatataataatactatcccgtatcatttaaggtatatatagagttaaagcagtttaattcaaggcacctatcaattgggcgcctgactgttttaccaagtagatcggatatgttttactaaatagatcgaaaatattttagtctttcaaaaagctgaaacacaatcaaatcatctcataaaacattttgttacaacgtatgaaacaacggttttcaaaaaatcagacgttgtttcaccttatataaaaataatatttcagcaaatagcaaaataatgtttcaattcttaaaaaaattgaaacacggtcagatcgctagatgaaataatttagttcaacgtatacaacaaacgatttgaagccattgtagcacttaaattccatatacatcaacaaaccatgtgtccatcaagatagaaaatattaaacagtataaaaatccactgcaacatttcatcaatgcatagtgaaacattacgagtatacttgctgaaacattgttagtggaataaaaaaagaaatggattctcttaataggacgttttcgtaatatgtgggtgatttgttgcaacggcgcgtgtggtggtgcgtgtggtggggacggcgcggatgcgcgtcgccccgcgcgaaggggcgggcgcccgatttgaggcatttccgggtttaatttgtcaaacaccgaaatatctatccaagaaaatggttgcaccatcatccatcgcaacatccaacggaggctaactatatggccgagatcgaccggatcaatactcgatctgttcgatcgaattgggtcaccatctatcacttgctctaccaacgccgatttttactgcatgattcgacgcgaatagacgccgacgacttcacgtagacttcaacaataatccagattatttcagaatcatcatctatatatgttgtagtaacattgctcgattaatcaccgagctaattaagctgagagcccgagatcttaattaattcctagaagctccggtgcattggcgccatgatgatgatgtgcgcaggtggtgcggcggcgatcatctttctgacggcgctgtcgtcggcggcgtccgcgctcggtgtcgccgccgccgccgccgccgccgcctgcgtcccgagcgagcgggcggcgcttctcgccatcaaagctggcttcaccagcgaccccgacggccgcctcgcgtcgtggggcgccgccgccgactgctgccggtgggacggcgtcgtctgcgacaacgccaccggccacgtcacggagctgaggctccacaacgcgcgcgccgacatcgacggcggcgccggcctcggcggggagatcagccgttcgctgctcggcctcccgcggctcgcctacctcgacctcagccagaacaacctcatcggcggcgacggcgtgtcgccgtctcctctcccgcggttcttgggctcgctctgcgacctccggtacctcaacctctccttcacggggctcgccggcgagataccgccgcagctcggcaacctcacgaggctgcggcagctcgacctgagctccaacgtcggcgggctctactccggtgacatctcgtggctgtccggcatgtcgtcgctggagtacctcgacatgagcgtcgtcaacctcaacgcctccgtcggctgggccggcgtcgtcagcaacctcccttccctgcgagtcctcgccttgtcggactgcggcctgacggcggcgccgtcgccgccagcacgcgcgaacctgacacggctgcagaagctcgacctgtccaccaacgtcatcaacacgtcgtcggcgaactcgtggttctgggacgtgccgacgctgacgtaccttgacctgtcgggaaacgcgctgtccggtgtatttcctgacgcgctcgggaatatgacaaatctccgtgtgcttaaccttcagggaaatgacatggtaggcatgatccctgcaaccttgcagcggctgtgcggcctgcaggtcgtcgacttgacggtgaacagcgtcaatggcgacatggcggagttcatgcggcggctgccgcgctgcgtgttcgggaagctgcaggtgctgcagctgtcggcggtgaacatgtctggccatctacccaaatggattggggagatgtctgaactcacaattcttgatctgtctttcaataagctttcaggggagataccgttggggattggtagtctatcaaacctgacaaggttgtttctgcataacaatctcctgaatggaagcttgtctgaagagcattttgctgatttggtgagtctggagtggatagatttgtctctgaacaatctgtcaatggagatcaagccaagctggaagcctccttgcaaattggtctatgcttattttccagatgttcagatgggtccccatttccctgcatggatcaagcaccagccaagcatcaagtaccttgatatctcaaatgcaggaatagtggatgaattgccaccatggttctggaaatcctattcagatgcagtctacctgaacatatctgtaaatcagatcagtggagtgctgccaccttctctgaagttcatgaggtctgcgctcgcgatatatctcggatcgaacaacctcactggcagtgtgccattgttgccagagaaattgcttgtcctggatctctccaggaactccttgtcagggccatttccacaggaatttggtgccccagagctagttgagctagatgtctcctccaatatgataagtggaatagtgccagagactctttgccggtttccaaatttgttgcatctggatctttcaaataacaatcttacaggacacctcccaaggtgcaggaacatatcatcagatggccttgggctcatcactctcatcttgtacagaaacaattttaccggagaatttccggtgttcttgaagcactgcaaatccatgacatttcttgatctggctcaaaacatgttttcggggatcgttcctgagtggattgggaggaagttgccatctttgacacatctgagaatgaaatcaaacaggttcagtggtagcatcccaactcagctaacagagcttcctgatctgcagttcttggaccttgctgacaacaggctatcaggctccatacccccttctctagcaaatatgacaggaatgacacagaatcaccttcctcttgctctgaatcctcttacaggctacggcgcatcaggcaacgatcggatcgtggatagtctgccaatggtgacaaaggggcaagatcgtagctacaccagtggagtcatctacatggtgagccttgatttgtctgacaatgttcttgatggaagtatccctgatgagctgtcatctctaactgggctagtcaacctgaacctgtccatgaaccgtcttaccgggacaattcctcggaaaattggagctttacaaaagctggaatctctcgacttgtcgattaacgtgctttctggtgaaatcccttcaagtttgtcagatttaacttcattgagtcaactgaacttgtcctacaataatctatcaggaagaataccttcagggaaccagcttcaggctcttgctaatccagcgtacatctacattggcaatgctggactttgtggccctcctctgcaaaaaaattgttcatccgaaaagaacagaactagccagcctgatcttcacgaaggcaaaggtttatctgacacaatgtcgttttaccttggtcttgctttgggatttgttgttgggctttggatggtgttctgcagcttgctgtttgtgaagacatggaggattgtttactttcaagctatcaacaaggcatatgacactctgtatgtgtttatcggtgtcagatgggcaaaattcagggtagacaaaacaactactacatccgtcccaaaataagtgcagccgtggatatccgtgcccaacgtttgaccgtccgtcttatttgaaaaatttgtgaaaaaattaaaaatatttaatcacacataaagtactattcatattttatcatctaatagcaataaaaatactaatcataaaaaaatttcaaataagacgaacggttaaacgttgaacgtgaatagtgcaaaactacactttaagacggagggagtacaagctaggtagatcagtcaagagacaataatataggccacaaatgaaagtttaactgtgttatctctcatggtctgtttgtgtattattcattgctttctaacatttgaatacatcaaacttatcagagtgagtgagtgagtgagtaaaatgctctgacttggttccaaaattccatttgttcatagtagtagatgggcacacacatcaccacaacgaacacattacatgatagactttacaccttacattgataatcaaagcaagacgttcgaacttgggtgagtcagattactgccttcccccttacgttttaagtgaaataaactgggaagctgagatgactattcggagagcatgcatattattttactacaagttaaaaaaacactgtaccatatacattttaatgtaacactggagtaaaaggctatcggccataaagttacagttttgtggcatccgaagccaacatttattactccgattgccatagcaacccagttcggaaaaccggaaaggccaaaatatccaaaagagattacatggtgaacactgctctgacctcctttttcaggtcccagatatgagggtcaactagggtgccgatgcacatcaagcaattattctgccatcagctgaaatagcatctcacatgcgtgacctcgacgaagcctgctgggttgcgtttggtgcgctctgcagagattgtaacatgattaattatcgaacaagctgatagagcatcacagaacactaaagcgagaagcacaatgaatgagcgtatgagcaggtgcagtaataatatcaaaatcgaactgtatgatcagggcccatggtcgtcccaccatgtaaccaattttgaaccaaggcggtcagtgctgacacagaggcttcgttcgttgcatgtactaataggattatttatactttctagtgagaacatcaaactactcaaatgtttgtaataatcatatgcactcgatacacatgcagatctataatatttgcctatagcatactaattcataattgcaaccgctatactcaacatatactaaaattaggaaggcaaggatcgggtactatccatcagaaacagactgcgttgtgtctttgtgtgtgagtgagagaggaagagagagagtaccaatggtaggcttcttttagctctatcttccaaataggatgatggtttgaagaaatcgccataaatttcagtccacttgctaagctttgaatgtatataaggtgctccaatagtgtcagcccaaaagacaagaccaccccttcataaaaaacatcaaaggttaaactaacactcagaataaccacaacactttatgcgcgacaaaaagaaaaaggaaagcaaaatatacatgtgaggactgacggctaacagtatcatggattgacaaaattatacagcttcacacgaatgcataataatataaaacttgagagttgtttggtattagacaatgatgtaacagaacttagcaataaacactcatttggaataccttatggtggaattccaagtgctaaagttaaacaccacgttataaagcaacataaatttattttgatatatacgccatgcagccctaccctacataaggattaaataaggttcatgtttagatatcagaagtgttctgataaaattttaagtccatatgttatatttgtgcacaaaccaaacatgcatctcaatccaagtatctaaatattgatacaactaaggcatacttcaagtgcatgctaattattagcatttagttacataagacgattatgcaagtgaacgtaaattgtcacctgctaataacataccacacaacttaagcttaagcaacagttgtttacctgaacttgggaaaacccatcccaaggatagaagcaatatcaagatcagaag

SEQ ID NO: 8562 - DNA, 17090 bp, Oryza sativa
tgtcaggtttgtacccgaaaaagcatgatattaatatttacaaggtttctaccactatttattatgttctttcttactatcctgcataggatctttactggaattatcttatagaatcgtgtttctataactcgtatgatcctatggtacagactataacattgacaacttcaatgcacggtctatcctctagataactctcttgcatcattgcatgatatctcatactgattttttctccgtaatttttcaggtttaagcattggtcttgtagtcagtggcggcacagttcttttgcttctggctctttgtgctcccctcgcaacacgtaagattaagctacggaagatgaagaaaacaaaagaaagatttttcaagcaaaatcatgggttgctattgcagcaattaatttcacaaaaggtggacattggggaaagaatgatcattaccttatcagatctagagaaggccacaaacaattttgataaaagtcgtgaggttggtgggggagggcatggcattgtgtacaagggaatacttgacctacatgttgtggccatcaagaaatcaaagatagtagtacaacgagaaattgaccaattcataaatgaggttgcagttctttcccaaatcaaccatagaaatgtagtgaagctcctaggatgctgccttgagacagaagttccattgttggtttatgagtttgtttcaaatggaacactttatgatcatcttcatgttgaagggccaatgtcagttccgtgggatgaccgactaaggattgcacttgaagttgctagagctgttgcgtatctgcattcagctagttctatgccaatattccatagagatattaaatcttccaatatacttcttgatgatagcttgacagcaaaggtgtcagactttggagcttcaaggtacattccaatcgatcaaacaggagtgacaacagctgttcagggaacatttggatatttagatccaatgtactattacactggaaggctaactgacaggagtgatgtttttagttttggtgttcttctcgtggaattgcttactagaaagaagccgtttgtacacacctctagcaacggcgatgctcttgttttacattttgtttcactacatacagaaaacaacttggtcgacatattagatcctcaagtcatggaagagggagatggagaagtccaagaagtagctgcactagcagcaacgtgtattaaattgaagggagatgaccggcctacaatgagagaagtggagatggcacttgaaaatatacgagttaagaagaagcatgctacacttggtacaacatcaaatagatgtgatggggaccaaattgtatgtgattatttgtcgactagaggaatcactgacgaatcaacaagacaatacactatggaagaggaaatattgtcgtctggtacctatcctcgatgatgtttgtctttggcctgaactagaattgctgtttgttatatgtacaacgtttgtaaagcatgtcagtagtgcaagaagtgatcttgctttattgttttggaaatgaagaattgtttctatcccgtcataaacaattcccgaaatcttttcgttggcagcgaatgtctggctcagttgaattcatacattctagataaatcaatgcatgtaaacataacaatggaaggcaattatatatttttctctatgctctgactgaaacgtatagagttattccttaccgagaaatatcatattcacacaagtcctcacgtatatacactgtgcacaccaatttataaatattaccgaaaaatatagaaaaaatgtacatgtactttcaataatattacatctacgtgtaaagtcacatcttcaaattcatcctacatagagactaacaaaaagataaaattctaatggatttatagcctcaagacttagattctattttttttgttacatctaagatataaggaatttaaggttaagattttacatgtaggaataatactattaaaagtatatacacaatttttactatatttttcggtaatatttatttgttggtgcgtacatgaaacttatatgcatatgatatgataaaatagcacatcacagatgaaagaaggctgaaaaaattaagataaaagtgtaataaaaaagataataggaggagaggaaggttagagaaataaaaaatagagagaaaagagaggtaatattatgatttttggccttatcaaaatacaatggattttttttgctaggatggttcttcataaaaaaatgcaaaatgtaataggttgcataaaaaattaactgtgtttcttttttgtcctatacggcttgaaaatgaaaaaaagcatagcaacaaaaatttaatttaaataagtggttcaaattaaaaacatgtataatttgtaaaaatcaaaccatccataatcatccatagattactatcataatttgattatgtccttagaaatactttaagttgtttgaatgtaggattttttttacgaatttttcagccttttttaatttgtaatgtagtatctcttctacactgccttatatctgttttataggttttatattctagattctatttttagttattttttccgcacacgcctattgccacatttcggccaagccatcggtccacgcacacaccctttcgccttatgttctcccttgtgaaacagtggaagcaccagcgaatgtaggtcatatgtttcaacgacccttaatatacaagagttcaccgataaatttaaaactattatttgtttgagtttaaatttttgtgaaaacgttgtgcagatttcatcaaatttatgtaaatttgatttataaatttgaaattatgttttatggtcaaatagttctgtccctttgtttttttttttacaaatgagggctcattcggaacacaaagattgaaaaaaagaataagaaaaactaggtgattccccgtactttgctgcagaaattactaactaaattttatttttttttaataatcgagctaaaaataaaaattatattactccctccgtcccaaaatataagtatttttggacttcgacatagccttcgatatgctattttgaccagtaatatctataaagtgagacattttaaataaaaagagttgcatactatgatagtttgtttaatgataaaaatctagtaacaacaattttacatgattgatctttttttttgcattaattgtcaaaattagaaatgtttgccttgacaatattctaaaaatgcttatattttggaacggagggagtagttattaacaacaaataaaattggtttgtcaaactatgttaagagagaaataaatttagtagactctgtatgaaattgtagatgaaatatgatatcccgcactttgctgttctcgtcttgcaggaattgtgtagtaacaggacggtcatcgtgcagtaacaagacaactttctcacagtaacaacgttaaaaagtagtcatgatggatctagtttcgttaagcgtttttttatgaacatcatggtgcaaacggattagaaaaacaagatatgatgtgagagatattgctctataaagattgagatttacctctttttagttcttgtctcactggaacagcgtagtaacacgatggccaatgtatagtaacacgactgcttttcgcagtaccgacattaaaaagtagttacgatggttctagttttgttaagaattttttttacgaacgccatgatgcaaacgggttagaaaaataaggcatggcatttacgttactgctatctaaagattgagatttaaaatattttagctctacaaaaaaattactacaatagtgccacccgttactctacatgttctctgttactgtaaatttcgtcatgttgttactgccaacattatagtaacaacctataaattttgtagtaacaaactataaattttgcagtaacgtatcatgttactacctttctgtgataatattactgccgaatcacagtaataaggtatgattcttgcagtaacataactgatttgttatcacacaatttaaacagacatacaaagcatgcaaacaatattttctattcacataacattagacggtgaattgcttagaaaagcttgccatgaaccatgagatcatgggttcaagtcttagtttcaccaatttatttttttctaaaaaaagaaaagaataggaggaaaaataagagatgtgagggagagaaaatggttggcagagagagatcgagagggggagggaatacgggaggggggatcggagggagggaagagagatcgagagggggagggggggaggagggtgcgccgggagtgagggagggagggatgggctggacctaggaggtgggaagggatgtagaatagttattctagggggaggtgtagaatagagctgtactatgtagggtatgtataaggtgtagaatagagctgtactatgtagggtatgtatatataggccctctttgtttaggcttaggcttattggcctaaacttttaagtcagtttattggcttatatgatttataagtcaatggatttaatgtcctaaatttagtggtggagtcatacatctatctcatataagccaaaaaagcttctctaatatagcttttggcttaacagtgttagagtggcttagtggcttcaaaaaagccaaataaaaaagctgcttgtttgttttggcttagacttttcgacttataagttggcttataagtctaaacaaagagggccatactctctctctctctctgttttttttatttgacgcaccagttcaatctcaaagcgttttttttatttgacgccagcagttcagtcccacctcttctgcacacgaatttccattcttgccccccacagatgcctcattctcctttcgacttcagcgggtggcgatggcgtctagggactcactccatcgctccaccgccaccgccgacctcctcctcggcgacgcgcactgggaccgcttccaggaggccgtcctcgagctcaggcatgacgtcaccgaggcgcaggcggtgctgcggaggggcaacgccgcaaggcgaggctcgcggccgccgtcaggtcccaatgctgggccgaaggagctctgccgcctcgcctccgccactgcggctgccaccaagcacttgtcgccgcgcctcagctttggctccatcgccgaggaaatcgagatggccgccgcggcatccattgctgtgttcatgacaaccatgttcatgttgtggccatggcatcctcatgcaagaagacgccagcatttgtggcctttgcatagaaggcctcgccagagacgcggaggtatctcttgacaagtttgaggagttggatcaatgcatcgatgagtccaagagcagctacccaaggtgttcagtagtgttcttcagacggaatggaagcattgtattcttacaagaagattttcttccaacccacagatgattggagttgcttcttactgatgattggagtatcagattatcagtaaatcacattatactggcaatttgagtaaattgaaatattgtgacttggaagaaatttaagatgagatgagagattttaacagtatcgcctttaaaggcaacaaatggaattttgcaattccatcatcatagagaaaagaaaggagtacatgtcattctcagacacatcccacattccatcattccagcatctttacaactcatgcataaaaatagagtttttactccagcaaaaatatctcaaatcattcttaaagtggagtttgcccaaattgagttctgaaacatgaatggccttttaattcttcttcttctggccacattggaaggaattcactgtcattcttagacagttatatcatgatgacaaagcataattttactaagattgttcaaccataatttggttataccacctgaactatgagcaggcgaataaaagcaagaagatgcagaggccatcaatcacgtcgtcatattgcatgaaaagtcaacagccaattgttgaagaaatgctatgtgtaatcatccacatggtaacagagtgctgaatttggtctgaacttatctctgaatttcaccaaatgttctttctgaatttagtctcagctcgatctcctctctagaccatatgtttagcatccatgtcaaatgtgcactaatctgcagcatacacgagagagagagagagagagagagagagagagagagagagagagagaaactgcgcacacattgttctcaggaacaatatcatctcaagattcacaaaccaggttcaggaacagtaccaacatcgttgacctgaaggctgaagcatggccgcccgggaaaccgaaggactcatccgaggaggcggggacggcgccgcggccaccgacgacaatctgcaactggcgtcgccttgctccatggccgcctgctccgccttgctccttggctgccatcccgcctcgctctatgtctgcttgccgccttgccctaccctgccttgccctgcttgatggctgtgtcgctgccgtcgtcagcctgctgtgtagcagttggagagtgctggtggagtgatagtccgccgccggactcatccgaggtgccaccggcagtgctcgtctcgccgccggcgcgcgtggaggaaacaccgtagcgcaaaggagataagaacgaagggcaaaagagtcaatttgcagcttccttaatttcctcaatcgtgtcggaaacatcaaataaaaaaacggagtatataatgaaaaataatgtgataatgtgaatgaaaatgattggatgttgattttgtaaaattcaatgaattatagatgatattgcaagcttgcataagttttgtatgtaattattgctagtggatgatgaggtggcatgtttgcatgttgagttttagaattagttatttataactttacagtaagatacgatacaggaatatgataggaatccaagtgtaaaatagatgattaaaaaacacaggaattttatatggataattgtttggatggatcaagggaaaaacatgggaatcttataataaaagcgagtgcaatgtaacatagcgtcacaaacagtgaagtaagcaatatcaatgaacactttgcttttatcatgctttgattggttgcttggcttgattttcctttttcccacgcgaagggatagaaaaaagaggttggtcgcagattgttctttttcctgtgatcttctagtgaacaatctttttcctgtgatcttctagtgaaatcgctaatataggaaaatttcctatgtatttcctatgaccgattccagtaatccgaacgatgctaaagtggcttaatctcgatccatacgaaaatgcttctcctcgaacgttcggactgaacaagaaaaatcgggcgggctgactctaacacacgtccttttaagcctacacacatatacctttaacgatatttaaaacaatttttctcgtaaattacttatccaatctacaatccgatcacaccattgtattcgttttacaataagatatcgcatgattatattctgattaaaattaatcatatgtttcaatccattaacactctttgtttcatacgcgatagtgatatgttttaatatatctcttcagcatgtttcacaaatttcgtgaaactacatttcactactctctcctctctctccacctcatacatgcacgcatgtatgcattttaacgagcttcaaaacaatttgtctcataaactaattatccaatatatgatccgatcacaccgttatatttgttgtaattaaatatttacaacaagatatcacataattatattttgatgaaagaaaaacatatgtttcaatccgttaacactagttgttttatatgtgatagcgatatgtttcaacgtgtatcttcatcatatttcataaaatttttaaatgtttcagttgctgattttttgtttcaccatatataatttgatgtttcactcattggtcaactagaacatttgacaaaccaattttctttaggacttgggacgtcggataggaagattcctcatgattgaggagtgaagaatgaagtgcaacaacatgcacatacacaatcgagctgggcgttcgatatttggtgatatattggacgtccgagccgtagtgctctcgcaatccataggaactgaaatccttcattttttcccttcatttaatctgaacgatgctgaagtggctcattcggattgagccctgaatgttttttcatgtcgagaattgtgttcttcttggtatgctagcatatcagcacataaatgtgagagagggcaataaaatcatttgaaaaataaactaacggtcaatttatgaaatgggtaagatgagatcgaaatgaaaaccaagtggatgcaaggaataagataaaatttagtggtatataagaaattgagaaaaactcaaggacacgaaagaaaattttcccttttcataatgctacgctgcaaggttggggaaaaatggaagcatcaagcatgccatgctagagccgtggtcattgatctaacgtgtttgcaaggatatataggacacttcagattgaccattttaaatcatatctttctttttataaaattgataaatatgtggatgtatttagtttattgtcaaacattggtaatagctagagatttgttttagaagaacagtacctttctttttataaaattgataaaaatgtggatgtatttagtttattaccaaacattggtaatacctagagatattttttagaaatacagcataaacggagtcaccactggcgcctcgctatcgatgaatacgtcgtctatcaccgaaagaataattaaccgtaatgcgagcatccgtgtcaaatttagaatttgatcctgtgtgggttggttccaccacaagtaacttaactagttgagctccgctcacttgcaaaatacctagagattttttttttttgcaataacacatttaacctatcatacaaaacaagataatgttgtcaacctatcaaaattttgtcattaccaaattttgaaaattttattttggcagtaatgtaaacagacccgtagcctacccatagcctcacgctgcatgtttttgtaaagttttttttaaaatattaaagtaaattgatttttgaaatgggaagaaagtggttaattattgtgctgttgaggtcaaccggaaaatataggagaatggtttacctcaaagggtaacatctctactgacaaaccatttcaatagtacgggtgctgccgtgccatgaaggcacgaagtatctggcttacccgattatctttgtgtttgcaatcctatgttcccaacccctctctctctctctcttcgcgcgtacgtttttcaaattgctaaacggtgtattttttaaaaaactttctatacgaaagttgcttaaaaaatcaaattaatctatttttttaaaaaatagcaaatacttaattaatcacacgctaatggaccgctccgtttttcgtgatcactgttccggatgggaaccgcttctagcgaacacagccgaatcctgactatttagtgaacaagtgcacgaagaagatgcacatgtagcttgttcatgttcaaaagagtataagcgtgcgtacacatgtgtaccttagaaatacgcgccaagtatgccgaccataagtaaggctgacactgatgtacgttgactcgatcagtcgatctcccctaaatgcaagctcgatggagtataattcaaacacggatgcttaattgatctcttcaaatgcacgtgacctccaacttgaacaccaacttactacggtggaaatatatattacatataatctaatagttattttttcagatttgttgtcatttagttgacataatagacaagaggaccgtttaaaaagaataagtgagtggactcccaatccgatgactaaaataattttccaacactaagccagatcctatcatctgtgacgggctctaaccctcacctttgatggatttggtcttggtcactgattagtggtcactgatgactacatctcatctcaaacgggtgaaagcccgtcaatgatgattggcacctttgacggaccgaataaaataaactcacacatgatgagtgaatcttttcagcccatcaaaggtaataaacacctctgacaggttcaactcaccacccgtcacaggtgtggaaaatcaacaaaaaaaaatttaaagccctcagcctctagctctcagctctcagctctcagccctcaggccatatctcatgacatgaagaacatctcaagatctcatgacacaataactttgcattttattgacagatatgttgacacatgaagcacatccacacaagtaatatacatcacaaatccacacaactttgagtaataaactacaaatccacagaagcaaccatgagtataacccaatctgaaatttggaaatgaaaatttgcacaacctataagagctggaaatggcggcggagctagtgggtgaaggagacggtggacgacgccggcggtcaggggtagaggccgccggatccaacggttggcggtgcggtggaggaggctgccgctggatcgggcaagcggcggtggggtggcggaggaggaggcgactggtggtcgggggagaggcgccagatctgcgtcccccaaacgtgttgaggctggcggtcgttaggcaggagaggcggcggcggctggcgatcgggacacggaggaggaagtggccgacggtgaggggagaggccgcggtggccggatccgtgccctgtaagtcatatccggcggccaacggtcggaaggcggtggaggcggcgccggccggtggtcgggagacggaggaggaagcggccatcggtggggggagaggccgtggtggtcggatccacgccctataggccagatccggcggccggcggtcgaaagacgggggaggcagcgccggctggcggtcgggaggcgaaggaggaagcggccggcggtggggggagagcccgtggtggccggatccgtgccccgtaggccagatccgacggctggcggtcagaaggcggctgagggaggcggcgcccgacggcggtcgagaagcggaggaggatgcggccggtggtggccgctactcgcgcgtggagttgaaggccgccaccggacccggtgttcggcgcgtgcaagcttggtgcgtgcggaggaggatgaaagaaagaaaaacgagagagagagagagagagagagagagagagagagagagagagagagggggatggataaggaagaactaagaaacgagagatgagtggtctcggactgtcggtgggtgatagataaggattgggttgggtggtttccacctgtgacggaaaaaaaaagaggacccgttagaaatggtttcataacatctttgacgggctggatctgtatggcccgttacaggtatctagtcacctgtgacgggccgtagccggatgccttaccgatggcggcatcccgtagaacctgtcaaaggtgatcctcatcactgaccaacacttatgcccatcacaggtatgtcgtcaaaggttgaggatatggcgtagtgcaagacgctttacgtgtattatttagtactaccttcatcccaaattaattgtaattctaagttatttaacatatattaagctttgaaaaacccttattgaatggtttgtaggtaagaatgaaagggtaaaatagaaagaaatttagatgagaagtgatttatgagatcgtgttgatgcaaaaaaaaacacacactggcctaagagatttgctttactctagtgcaggttctaaatttgctttcgggtttagagcgtgccagttggtttgatcctgcaaccaacaagaaaaaaagaaaccaaagttaaatctataaacgatagccgatcggctggattgccgatgacgtttcgtcagatatcaagccgatgcaatataacttggatcggcaataaagtatatagtagataaagaactaaattcactttatcggctgcagatattaacaatgtataatctatacttcaaaatatgtttaaactacgtgatcagggtagatcggatgttgccgagacagtataaataacatatgtttaaaagtacttcaaggtaaagattaaataagttcatgtcagccaataggtaaatctagcgtgtgttggctattgctccaatacttctttatactaagatattattatagattaaatatattaaacaagaatgataacctaagtagatcaatatcaagcgtaatatatttcaccttagtgagatcttaatataaagggtagatttagcatatcaagtaaatataagtgaagaacaagatagctaaaccgggtaagataggctgaaactccgatgctatctctgttagcaatcatgaagcaagttagatattatggttctagatattacttaatagatcaaacttaactgatgcagcattaagcataaagagaaacataagatctgatcaacaaaccaatgaaagccttttcgagatggtggatatactatataatctaacccgacagagttatctaattctatcggctgatctcgatgatggaggctagtcgacaagaccagatagtaatgtcaatctagattatatagcatatatgataactcgacgatttacataaacaagattagagtgtcataaagatgtaagcactaatcccgagaacgcaagtcgccataacaagctttacctctcgtcagagatcgtaaccgatgcagcccaactcgaaagcaagaactcgtcgaaacaatgaaagtagaaaaaggtggcgatgcgccgaaagtgttgttgaactggtgttaatcgtttacaaggtgtcgggcacatatttatacccaaaatatacaatatgtccacatcgaacacgactccacttctattacaactctaaaatacgaacaagtactttaggcagactcttaccgaaaatctatgaagaaactactagaatatcctaattaatagatacaattgccttcttcggactcaatccatgcttggcaatatttgtggaacatttaaatcaatcccgacaatgattctaagatcactttgccaaaattggctacatcggcttctccctatccgattcggtattagccggtgcaaacgatccgatgcgtactctgtttccgagaataacgaactccttccaaatccgcttcggttttgactccaaatccaatctatgatatattaaatttggtcgttaacacatcgttagtactctattatgataattattttgagacaaatttaaatcctaaaaatacaattgttatgggacatatgtagtacttagttagtacttacaagtactgatggcataaagctttaaccatcatatttgtaataaatgatcatagccttcaatgaattaatgtttgtcttgtgattttttttccttttatatcaatataaaaccttacactctcttatattattcatttcaaataaccaaattgttcaaattgattgtatggaccagcaaatgatttacaagttgttatagttattttcaccacactattagaaaacattttttttttacaaacgggccaaaatgatttttccagatggccatccaccccgcctgcacttcaagacctatgaaaatacatgatttttgcaagcggacattggctgattttgataggcggtatctccatcttcacaagcgttgtagccacctgcctgcgaaaatgttctcggcgaacaaaaaaaaaacgccaccgtcccatccttcgccgccccaccccctcctcctcccccaacccggccggaagatagattttcgtaggcagacggccatcttgcccccttcccatcttgcatgcggaatagtggtggtaaaattttcgtcctcctgtaggtatctcgtctgaaaaaatggtttttccaggagtgccaactaggccgtttgtgtaatagtatgtagatgcaatagtttgaatagatggtaatatatacagacatcggaagagatcgatgatgcagagggtagcaagcggccgagaagttatgacgtcgtcgtcgtcgttctgctgtttagcagcctcgctactgatgctgttgctaccgttctttgccatggcagcagcagctgcaggcgggagcagcagcagcagcagctgcaggcgggatcagcatcgagtacccgttctgcgtggagcctggctgctaccacccaggcttcaacctcacctgcaaccactcctacagcccgcccaggctattcctcggcgacggcacggtgcaggtgctcgagatcgccatcccccaagccaccgtgcgcatcaacagcggccgcatggtgttcaattctactggcaatcatgccgtcaacagatcattattggatcaggtgggaaggccgtacttcgtggcagcttcaaacaggatagctttgctaagctgcaacgcccgggttgacgtccgcgcggctgggagaaacaacaacaaaactagtactaagttgctcagttcctgcactgccatctgcccaacagacgatggaggtggtgctaccactatcctcgatattggtccagagggtccatgctcagggattggctgctgtgaaacaagcatgctactagcaggaagctcgactgctgcctacagcatccaggtccagaacttgcaggagcaggccgtcgtgctaaatcgaacggatgatctggtgtacttggtagatgagagatttaactataccttggacatgtctttcggctacagcagtcctgaagagctcccagcacggctagactggtacataaatagttcatcagcgtgtccgttgcccgcgtccgcccccgaatgtcgcagcgcgcacagctattgcgacagtacttacgacaacaaggcgtacatctgccgctgctccgaaggttacgaaggaaatccctacgttcctgatggatgccatggtaattaattaatataagcccttgctgctttaatttcttcatgttcttcaacaatcaacttctaattaactgatactcctatatccgttcaaaatgaagaaaaaaaaacaactcctaactgatatatacgcccttgctgtttgctagatacggatgaatgcagttctggatactgcagttacggcgagtgcaggaacacaccaggatcgttcatttgcaactgccctcgtggctacgagggcaatccatcgccaaaagatggatgcaaaggtgaactaaaactagctagctagttggattgcccacaaatctgtacaaggatagatttatttcaaagttttgcctctactttccttttgatcaaacttacaatgagacatttggttatttagtttctctcaattcttgtccattgcgacacgaatctattgaatatttgtttctatatctttataaatggagtatactccctccatacttataaaggaagtcgtttaggacaatgtttaagttaaatcttgggaatataaatcatgaataactctcaagttgtttagtttgaaaatataaaaattatatgaatagatttgttttgaaaaatactttcataaaagtatacatatatcacttttcaataaatatttttatagaaaatagaagtcaaagttgtgttttggagaccgtgtcgctgtccaaaacgacttcctttacaagtacggaagaagtatctaatagccagtatcacattacacacacaaccaagtgctattaatattaagggtaattttacaatccttgagaaagtaccaaaaggtatcgtattttttatataaaatttggtacttcaacatatggagtaccaaatttttttaataaatttaggtacctcaagatatattaactataaaatttctctatattaatatcactagagatgctaaatcattactctggttgtgtaaacctctatttctccatcctctcctcgtaacactagctctatattgaaataatcaaaaaaataaatctatccgctatttatcaatgcttctttctgacaaactttttgtacctaaagttttcacttttcaatactatagacaattgccttcatctttgtagtcatttactttggtggatagtatgatatgttatcattttttctccatttgaccgccacataatcatttccattataatatattgattctaatttagaatttgtatcaaactaaattaaatatttatatttctattacaaagtccaattgtttgtgtttgatgttgactttttttattttttactttttgttatattccaaatcataacacctaaagattctactttgaaatttgcatgcaatccaattactatttttaataaaaatatcatttactctcatggattgtatttggcatggactcttatgttaatatgtttggtcttacttttatttctattccaaaatttagttatatagggattttactatataatttgtaatgaaatgaaatatagttgatttttttatttgtttttattacgaataatattattttcatgtcattttacagtattgatattttaaatatttttagtcctataaattctactagtatttataaaatgtattttttaaaatggtctcttcttaatatgtatttgccaaggacacttctttacatatttattaattaatatttttgtttcattgggagttttacctgtcctttaatttcacttagatattcttattgaattaaatgatgattttattttattcttttactctaaaagtggtattgtgttccacatacgttcttattttaatattctatattctatattgtaaattccaaatttcagaatttttatagtgtatctctatgcgaattcgttggtttagtgtagactattataatctgtacccatactacaatcaacggtgtatgatcttccttttctatgattagcgtagtaatttctaaacctccaaagcattactatgaaatggctcatttttcttctatctgaacaatataatct

SEQ ID NO: 8563 - DNA, 25957 bp, Oryza sativa
tttgtcttcattagagttcacatgaaaaagttatgaattattttttgatataaagtttttaggccgtcctgtttagggaccagggtgacacaactaaacaagttggaggacctaaacgagtgatctgcaagtttagggaccgggatgacacagtcgaacaagtttgaggacctgaacggtcgatttgcgagtttagggaccgggatgatacagcggtacaagtttagggaccggtgatggactttactcattttctcaggttgtatactttttactcttggcatacatgtgtcaatagcttatgctttactcaaacaaaatcgtgaggatttttactgattaattgaataatataccacacttacaagcacaatagtgctatcgataagataaacatacaaattatgtttcagcgaacaaaagggtgcacaacagatcatataggtggtgacaacaaattattccaggtgagcgcaaagtagaataacctatcttactcacccattaaatcaattatttctccttattttctgtagttcattgtacaggaattaaaaaccaaggttgccagtaaagtggccaaatccatagcacaagaataactagtaagtggcaacatataggtataggaacgaaattgttggtatacatacattattgcaagatcagaattacgaagtatggtgcagttaaatccaattctgcagactaatggacaccagtgtttactattccgtaaaagaccgcaatttcgggaattccagaaaatattggtacgaaagtatctaaaatttaaacaagttttgactgaatttgaataaattttggccaaattcacaacggattgaaaaaatccagccgaaattctccaaatttcaatccctgatggacactaagttgtaaagacagaaaatccaaaatataagacctctttgaattaatgaaataaatccatagccagaattgtaaacagtttctataacttgacaagaaatgtttaatgaccagtataaatgttgggagcaaggttcaggaatttctaaatgcaggaactatatctgtttgctgtatataaaaattatccaagagcaaagaaaaggacgtgcaccttgcaatttcaccaccgttatcacataaagcacaaaccaaatcaacattagcagaactctcgccttcagcgttatcagtcatatcttcgagtttacaattgcaaattcttgcttcactcttatgccttttataaaacctgtttaagcatccaaacagtatattatttagcactgtaattgaaatttacaattatttctctttccgtagcatattctataacatatgttttgctttagtcaaattattctggctgaaacaataccaataaatcaaaagtaatgctgtatgatgagaccctcattaaagtaattaactacagaatgaaactaaatgttctacattgtttgttatagaaacaggattctttttttctcatagcaaagttaacaactgccaaaaatgaagtgcatttcatccaaataagcactataaacagtacaagtggcaacatgtaagtatatcttaaattaataggctgtagctatgcctgtcaaagttaaaactacaagtatgcagaatacaagaagttcccacttggctgcaaacaggagtataaatttaaagcagagaccagttgaccactccattggttatacagacaggctcaaggcattagcagttcattgtaggatgaaatgatccaaacaatcattttctttccaaagaaatagcaaatagaaagcaacaaccttacacccatggaccccacctagtaagtacgaagaaaagctcatctagttcctccggagcgcaatatccatgaagaatatgaacaaggtaacctgccttctccaccagagcgcaatatccatgaagaatatgaacaaggtaacctgccctctccaccagagcgcaatatccatgaagaatatgaacaaggtaatctgccttctcctatcagcctctagtttctttcctttgtttttttagtgcagcctctagtttcttactatttgtcatgcaaaaattatggcatggcataaacattccatcggaaagctacagactcggtttacagatgaacttgaaacagcacatctgcaaatggacgaaccaaaatccacccgacacatcccaaaattgagggaaactaccaaactgcaggatcaggatccaaaccgcttcaaatggaaaaatatattatacttgcttttttacgccatcgaccaggaaaaaaaaaaagaaacaccgtgcatgatgtctaacagggagaaccgctcgccgaagcaatcaggcatgccacaccacatggccacatttgtgcacagaaagtggatatgcgattattaagagtctacgacatccttatttccctcagctcatctaaactgaaaaatgcaggccagtgaagtcgggagtcgaacacgagccgcggaagccggaagtggagaaacgcgtcaatggcggaagccgcggagccacaaaacatttcggtgccagtgcgcctccgccgacgcgtcgcccacctcaccgctgctccaccgccggctgattccgagcgctcctctccggtgaggaggagacgaaccgtgaaaccaaccacggaggaagccaagagatcatccgacgaagctgtgcctcctcacctcaatcgatcagaaccttcctcaaccacacccagaaaaatctcctccccgaaaaaccgcaagcattccgcccaaaaatccctcccaaaaaaccggagccaaccgatcacccccaaaattcgccacgaacaacacggaaacgatcatcgagcacgcatacctcacgattcgagcagctcgcagcaggaaaccatcgggatgcgctcgctagggtttcgatcgccgcggagagacgaatccgaatcccctcctcctgcacaaaacccacaagccaaaaacccaaccacctctctctctctctctctctctctctctctcgcacagagatgaactgaacaccacgcacgctttgaacgaagtgggagagagagagaggagagagggtcacgtccaattcatgctcgcctctctctcctcctcacttaccgacccgcccacccaccacctcactgacagatgggccccacacccgtggggcccgggtggtcatgggctaagcgtagcctccatcgacgtggggaggagtcgcgggatcctccggtggggccgacctgtcagtgagggtggaacggctccggatgcatgggggtagggccgggcgacgtaggccgtaggataggccagccttccgggggcgtagagctcgcgtgggccgtcggatcgggatgggctctgacacgtgaggcggggaggctgcgttgcgggcaggtggccgtgccggtgaaaggaacggacggtggggattgggttggacgtgtttcgtggacggcgcggatggagccgtggaggaaggtgcagcgtcgggattctttttactgtgtgacccccttttttgtcccgtggaaacgaggccgagctgaagcttttttttttttactgctcccttttgcccctttctctctcgcagtaaggggctgtttggcaggactcctctccaagaaaatagctccatctccaagtttttttttgccaaacacgagtagtggagtagctccggctcttgaatcgcagctccatctccaggaatattctggagctcctcaaggggtactccaccaaaacctggagtcatatgtcctcatggagatggtaaaaaattacccaccattgccattggttacaaaaaaaacgattcgcttctattccacagtaccgtcccgttcccgttcctcattcgtgaaaaaaatgtttccaccagagcgccgcccgagtctgcaggcaaatcgccaccgccgccaaccctagagccgccgccaccgagatggccggatccgcctctgtccaagatggatccggcctagaggaggaagtcccggccgccgagatgaccatgggcgccggactggagcatggctatgggcgcggcttccctcctcccgcaaccggccaggggcgcggctgcccgcctcctgctgccggccagtggcgcggccaggggcgcggctgcccgcctcccgctgccggagccgccctgcacccgcctcccgctgccggagcagccctggggcacggctgcccgcctcccgctgttggagccgtcctggggcacggcagccctgccgccggagccgccgtggggcgcggctgctcacccgccggcgccgcactggggcgcgggtcccagccgaccggcgctgcccagtagcaagctcgtcccccgcgtactggatgatagaagagcttttccccatttcaaaggttgtattggtgctcttgatgaaactcatatccgtgtgtcattgtcacctgatgagcaaattagatatattggaaaaactggaattcccactcaaaatgtgcttgccgtttgtgactttgacatgcgttttacttatgttgcaacgggtcaaccgggagctatgcatgacacaagtgttttatacaatgcattaagagtggatgaaaaattcttccctcatcctccacaaggtaccacacttgtattatgctctctatttgtgctaactgtgcatgtgttactaaaatgtatcaataatcatactatgctatcttttgtaggcaaatactatgttgttgacgcaggatatcctaatcgtcctggttatcttgctccatacaagggtgagagataccatttactagagtggcacagaggtatggaacccaatactccaatggaaaaattcaatcgtgtgcactcttccatccgcaatgttattgagcgatcatttggattactaaaaatgaagtggcaaattctgtacaagatgccgtgctaccccatgtacaagcaaaaaatgattgttgaggctgctatggtccttcataattacattcgtgagcatggaggtgaggatcctgattttgctaggtttgatcgtgaccctaattttattccaacaataccagaacggtacaacaaatacgcagttcctcgaacggcatctgatgagtcaactcccgaaagaagtacaggaactatggatctcttccgtgatgaactagccaccgctttatcaatttcttggcgctagatttgtaagacataagatgataatgtatctttgttggacttcaattatgaacctttgattaaaatgtggtaccttgtgcggattttgctatgtgcggattttgctcccaactcgtttctcaattgtggcagatttgcatgtgttccattaagatgtaaaataaatattacgataaaaaaattagctactcggaggtgcaattccctagtacagtagcagcattgccatgcgtgttgctttgcactctgactgtgcgctctccggtctactgtgtagctcgatcgtggccgttttggcgttttgctgcaacattacctctcgcagcaggattgaaataggtgcttgcatcgtcttgaaaaaagtctattttataattttttttttattttttattataaaaaaattagctattcgagctaattttgtaccgttcttaaaatagctacttgcatcgtcttgcaacaagtctattttgtaatatattttattttttattattgttatggctgtgagaaatattaaacatcactatatattagtaatcaacatccatacaagatccatgggcaaaacagtcctttcactcatcctcctaccaaatctggagctggaccatatgtattattacccaaacaggtgctagctccaggagctccacggtggagaagatttcctggagaggagctcatttttttgtagaggagctctcccaaacagcccctaaataactccgtcggcttccgcttgacagaaagagccaagcattttattcttcgcactcgcagtacacaatggcatattaactgaattgcaaaatatattcatttggagaataaactgttgcatttggcatgttgggaatgaacttaacaagcagaccaaattaacactaatgagtctgtcagaacatattttctaccacatctgtaaattggcacgacttacagatatcacagtttaaaactcaaatttcaaacatgctgccagaatgaaacaacattactataaatatgagcttatttgccctaacatttctcctctttactccctggatctagtattcctgtttaaaaaatacaatcaatagcaatcatatttctaagttctataacataaccattaattcatgccaatcgatctaaaattgcccctaatagaggaacaggaaggaattcatgatctcaaccaaaaacttgccattgaggatgaaaatgaactcatcgctgcccacatcttctgtatcttagacaaaatccactccttgagcagggtactcgttagtctggctccaccaagtgtcccgccgcttatcgtggcggcaagcctgcaacagcgtgcgacactgcttctcacagccccacactccaaccctgggctaagccatcgtacctcaacacgtgcatttgagccacatccctctaacgccgatatagccatctaacttgcaaggacaacaccctccaagcccgctgccaccctagaatcacttatttcgacggttgccatatggttccggagaggaaggttgaaaggaaggagatgatggatcccttcacgaggaagggtggcaggaggagcgtcgcgccgcatcagcttgggaaggggaggtggtgaggggtatagtgttcgggcaccgacaaaagggagggaagaggtatagagcaccgagaggcgttgccattggtggagaaaggcagagcgggctggagaagtcggtggcacggccactactaggagggaggaagcggatctcaagcgccgcaaccaccgctaggaaggaggaggaggctcttgaatggcacagccaccgctaggagggaggagtgaggaccggcatcggcatcgctggtgctgtggtgtatgatacacaataggataacaagtgagaggctgggattttttttcctcgtatatttttccttttcggataaggggtggtggggactctatatttctatatgtttctttccgcatactacacgtgattttctctatggttcttttttcagatggaaacgggtgactactgatttctgctgtaccattgtctcgggataatactgatctctgttgtaccattctcttgggataaccaaaatcccttataatattggacaaaccaaagggtcatttatcccctgtagttgtggacagagggagtacttacataagcattttaaatttgcaatgcactcttcgcctaatcggtgcgagtaataaccaaagttaaccaacttagcacgagaggtgacgtgtcatccgaccaaccgctttggcctctaccgctagtacttctcttaccactccattcatcactgtttcggcctttcgagcaaaggcccagcttggaaaattatggttagacaaataggccgctgaacaagaaaaatgttcactttaggtctctcttctaataattagttttaaaagataagggatgttttatatccggttttatgattaacgaacacaatttaaactcgatgcttagctgagggatctaaaataaactttatctgccaaacaaccaacggtttgctaattgatggctaatcttgtggtatctgggccgggccattggctgatccaacgttggcccactaatcacactgcgccggcctcagcctcgccgccgccggcggccaccgaagatatcagccatgctccggcggtgaactgataagtagccaggttttggctcaaagatgaaaatgtgttccttgtctgtagcgtttttaccccccctgagaatattcttgaatcgccaaacaattttcattaatattaattagcattcgcactgtcaaaacgtttcaaggggcctacgtttaaccacacaccaatagtttttttttcgcaaacgcgcaaaatagatattacacatcagtatattagaagaaaatagagttgttgttacacaatgcagccgaccagactggtcgttgccagttacaaggaaaggatttcgaacccaaaaaagagtaaaaactaaaagctgttgcttctatctagcgggagggggtggcggaggaggaggagcttcctaatctccaaataggtccccaatgaagcggatggaccccagaactatcgagaccgatgaaacggaagaatcaaaaaccctggtgaaacgaaagaatcgaaaaccctaacgttccgctctttccaaagctacagtaaaccatgaggattagagagtcgaaaccttacgaagatgcgcaggaagactagccctagccgtcggccacccgaccattagtttttgtttttgtttttactaagggaccgcgagtgtgcaccgtagttatatcatctcgatatataattaaccaactttaatagaaaatcatatatattatcttaaaacaaaacagttttcgtttttagccgccggtttgtttctacagatcatgagcatgcatatcactgccgatgcagtataaaatagggttaatttaatccatgccactacaaatgtggtaaataaaaaaatgccactactattcgtgttatcgactgggtgccactgaaaatttttaaaattaaaatcatgccactcccgtcattatttccgtcctcctctctcacgccgccaacctcaccgtggttgccgccgacgaggtcgcgcgccgaacgcccatgggacgagggggctccgtgtaggacgttgccccgacctcgcagccctttgcaccaccttccacaccccacaaccgcagcgaggaggatgggcttccggcgagcactaggttccacaccgacggcaccgcggatgatgggcttccgccgctgctcctcccaatccccgtctcctcctccagctccgtcgccgccaaccccaccgacgagggctgtcgccgctactgctcccctcgatccccatctcctcctttagctcaagcgccgccgccgctcctcccgatccctgtctcctcctccagctccggtcggcgagggccgccgctacttctcctcccgcgcctcgcgtgcaccatgccaccgccaccgctactcccgctcccgctgctacttccactgctgctgctggtgacggtgaggatgctgacgtgaggaaggaggatggtaaaagtggcgggagtggcatggatccaattttaaaaattttcagtggcacttagccaataacgcgaatagtagtggtatttttttatttgccatatttagagtggcatggatcaaattaaccctataaaataccttgtgcaattcgcaacatgcatcggataaacaagtaatcatcgactaatcatacaagcatatgacggaaatactcccataaaacttaatcctaacacaatgcccctactatgtccaaagaataaaattatccagcaaccaacaatccatgcaaaaaaaaaaaagaattagaaaagtttcttagcatcaacacaggagcagcaatccagctgaggcagatgcagcaagagccaagaagtagccggcaatgccggcgccgcggcgcgacgacggcggcgacgacgagctcttcttctcgtccgccttcgccttggcgctcgacgacttcccggggagcgggctggcggcgtcggaggccggcttggcgtccggcgccggcgccggcgacggcgccatgggcgggtcggtcctgaagatctgcatcgggaggagcaccctgtccacctcgtagacggcgacggggcgggtggagtagacgctgctgctgatcttggggttggaccacatcgacccgacatggacggtgcccatgtcgtcggtgacgttgaccgtgtactcgccgccggcgagcgtgggcaccgggctggccgcgccgcccagcctgttgaactcggcgagggagtagtacctcggcagcgcgtggtacagcgccagcgacttgagctggtcggaggtgaggttcgccgtcgccgacctcgccagcgacgcgaacgccgcgtccttggggacgaacaccgtgatcccgtccttgctgccgttcgcctggctctggaacgtcctgagcacgtccgtcttctccaggaggtcgaggaacgtgtggaacggacccgccacgctcaggaggtcggcgaggtccacgtggcgcggcgccgccggggacggcgccggcgacggcgggaggctcacggccgccgcggcgggcggacccttgtgcttctgcgcgaacgccggtgagatggaggagcagcagagcaggatggtcaccatcatggctgctttggattccatcatcctcgaagtccctgatgtcacgcaagaacagtgaagtgaagcattcagcactgaattttttttgtcatgcgtttctggagcacaagtctgtaactgctgaatagaattactcttaatcttgtgaattctacagtgtttactgaacacatttagtagagtacttaagttcaaatcaacatacaagagatctgtaatgttgttctgtattctgaaatgccagaaaaccaacttcttgtgcttcagattactacagttcgtggtaattctgaacattgagaattttaaccaggctcattattgttcagatctttctagctcctagagcagagttttcagattactgaaatttagcacaaattaatggccctttccctgtcaccaagagagacaaatgcacaagatggggcactttcaagactcgatctagtccgaattgacaactgcattatactactacttcaactgttaggtgccaccaaccaaatcaggagaccacataatctaacacaagaacaaaaacagtactcctactactacatcctgcagatctcagcaccactggaagcatccaaatctctggaatttgggagccaagaacagttaagtgctaagctttgcattagcatttcccttcaacctgaaggaacataaacgcagagcaccaagaagagacgccaagctcaagagaggcgcaaagatctgttctttcctcgggccaagaactgcgaggaacagatccaaatgcgccctaaacaaatggctgcctccaagacgaccaacccatgaaacatcatactggaactcatggaaaccaaaaaattaagagaagagattctgagcatggcattgcagctgaaacaatgctgaggagactgacctgagctgctgagctgagcagggaagtgaaggcagtgaaggaatggaggagagtaggaggggagttaaggaggagagtggctatataaaatgtggggaaagtaaaaagataatgaaatcatgggtggcagctgttgatgaggattgagtagaggacagagagggctcactactgttttcaggctttcatctggagaaaataaaaagatagtaaatccaaaagaagaacagctaaataaaagctggccagataggagctgcccctttctgtcctggctctctgttgtttgttttctgggggagtaggagtagattgcatttgcttctggtggatgattagtgatggcattagcatccataaactgctggtacttttcagtggcattgcaatgcttacaagtaaggaagtttcttgcttttccaaaaaaaaaaaactgaattgtttgcttctttgatcatcctttgctttagtgtaaataacaaaagcaggagagctggaatgtggtgatccaaaaagggtgatgttgtaaagatgaacaatgcttgcttaacttattgctttatcaagttataaagatgatcaatgcaacaaaccacccagtgactcagtgagttcatgtgatgtactgacaaaagcactaatgtgcctcttttggccttctttataaaatctagatagcaggattcctcaaacttcctcaccagctcttttgtttggtcatcgtgttgtcagccgcagctaaaatttatctaattttaaacttgattgttatgtttttattgtaatttatttataagtaaaatgcaccaacggtctttaaactttccaggaggtttcacttaggtctacgaacttgcaaagcgcacatcgaagtctctaaacttggtttattgtatcatccagtaccaaagccgcgtttgaccgtggtcttgcctacatggcatgccacatggacgatgacatgtaattttttttatttttttctcactcctgtgcaaccgagccgccgccctctcctctcctctgtgggcgcgcgtgccaccgccatcgcacgccatgggcgccaccgctaccgcggtttcgccgagccaccatgtcggaggtgagcacgcaggggcaccctcccctcgggcgcagccggcgacacctccccccgcgtgcaccaagctcgccgatgcctccccccgcgcccgccgccgccctcttcgccccacaactccggcgctggcccccacgtgtccgttgtcggcaacccctccccctgggcgcggtcggttcaagctcgccctgccgccatcgagctcgcgcccgccctgctcgtggcatcgccgtcctttttttctttccgccgcacaccgccgatctctggccactcgtcgccacgggggcggcaacgtgaccagctgcctcccaaggccgaccgcgaacgcctccttgccgaggaggtcctctacctccactccctctggttctgcgccgcccttgctcccgcatcgaccggcggaggcacgagagagaaaaaaaaggaagaagggagaaaaaaataaaattattccatgtcatcgtacacgtggcatgccatgtaggcaagaccacggtcaaacgcggctttggaccgggatgatacaataagccaagtttagagacctcgatgtgcgctttgcaagttcgtggacctaactgaaacctcctgacaagtttaagaactgttgatacattttactctttattttttatagtggcttttaaactactaaggacacatataaaagttttatacataaataattttttgatcgttaataagtgttatgacataatataatctgttgtaggcgaaacatgtgctgaacagcaaagcactactgaattcattctatttgtttagggaaaggaagagtgtgacaaacacaccatcggcaattttcctgaaacagaccggacaccaccattaaaaaaatcgagggtagaagaaacctgctgctttttcagagttattgtctggagaattttagttctgaatagaaccttcagtcttctgaaggatgctcaactgcacatgcttaatacagccatataagtaacagcttatgcattgctgtataccactagaagtcatacaagcaaaatgtagtataagattaacatgtcttatgtctcctctctttcttgccttctcttctccttttcctttttttctttttttttttctttccacacgattgacagtgcatgacagtctgaaactctaaacattcctgaatctaaattctgaagttctgaactactacctctaactctaattcgacaagctccatgtaattaagctctaaactggatgtgattacgtgaggtcgcagcagattgtgtcggtggaggaccagctgcctgccctgacggtggctcgtatccggtgtagttaagtatagtacttaatcagacaaaatttgcagagtcattagctgtttccggcggtaggtgaggaaggcttgatcatgaaaggggacttagcatgcatttcttgagctgtcatgctcagctgggctctcaattctcaagcttaaaccaagcattactcctataacttactttgcaatcgacataatcaaatggcttggaaatgaggatcacatggtgtacaaaagcagaattagtgagaatgtaaagcccagcatgccgaaattaagcacaagttttttcttcatggacacaatcacatgctgtatcattccacattgtactcctactcaactcttgttttgctttcccttcagtttgaagaaaccagagcggcatctgtgttactgcactttaagactgccattaatgacccacagcaactttcaatttctttaacctctctcttaatcttggagtaggagtactagtactagtgttccaggttttgatgctctcttggaccacttgaagagcagagaccttggtccttgttcttggcctcttggggcctttcagtatgcctcctctgcttttcaccaactaccacaagagtacaaggtttacttgatctgcaaaatgcacacttctttatcttcatctttggtgttcttttccagattaagttttttacgtgggtgatattaacgtatgattgattgagttttaattattataaacttgaaaaatagattaatatgatattttagagcaattttcatatataaagttttcgcacgaaacacatcgtttagcagtttgaaaagcgtgccataaaaatctcaatcttcatccaacttttgttggagaagagaataggattggttgaatctcctgaagatatagatgaaggtaaagattaagtgttttacgtaaaacgatgtggtaatagcgtgtgattaattgagttttaatattacaaacttaaaaatggattaatctaatattttagaacacctttcacatataaagttttcgcacaaaacataccgtttagtagtttgaaaagtgtgccacgaatatgcaaaactttatcttactggaaatgaacaggacagtcctatcaaaattatcggtttgtgtgctacgaaaattatcggttctcctatcaaaatcacacagtttcggatgcattgcaactctatcaaaacttccagcaaattgaacaaattgtgaagcactgactgctcctaccacttcaggcttgtcgtaatagttgtagctcccatccatgtgatgcctgaagagcattcaaatgcgggtttgagacgtcccaagcataattaccggttcaattatttggccgctaatgaactagtagctctgtcccaaaatattgctgcatactaattggactattggttcatattcagattcattatactgtgatgtgtcacatccaatactatgtaacaacattttaaatcaggttagtactatttctgattttttttctctctctgtgtttttgctctcttccaagccatgccaaatcggcaatcagcggcgtccgtttcgtttgttgatcgcaacgtagtagtactacaactctagtacgtgtgggtacgacgagctaatcctgtgttgcttttggtactggactggacgccgtcatactggattggatgcgccgtagatgaggtaatgtgttgttcctcacggaccaagcaagagcaaccaactgagcaagagtgtgttctagacttggattggcccatttattggacaaagtttgcctatgggcctacgtcaatctggcccatctggatcaaagcaaaacctccacaaattcaggatgcgtctgccattataaagtccaaaattgtggtactgatggaaacttagagcaaagtataggacgtatgtggtaacttcaattttaagataaaaataagggtacgtttaaaataaagttaagttataacttttcctgacactactatagaaaacctaatagatgttgggaatctcacatagatatcggactctccaaccggtaacacgaagacggtacgatgaggggactcatcgcagccggattgggaatcggcatctatggggagttcatgactaaaaaagcatcgggcccgactcgattcatcaagacgagttgattgcttcgaaccaagatcaatattcagaaattgagcctcaaaatcatcgcaaatccaactgcaatgaatcagaatcatcccaaacattacaaacccataccattcatacaaaacaaaataacaaatcaatacatggaagcctaattgtcgtagcccaccaaaggccaaggccaccgccgccgccgcatctcactggaggctgaggtcgttaccgccgcccaccatcatcactgctcaaaaatccaataggccatgaccaaatctagtgggtggtgggagagatccgggagggggattttgggggataggacgaggtgtatctgtcgttgttgctcgaccgcaattaccaccattagatcgggtcggggaactatcgttgtcgagctcaccgtatcgcttcgatctcactgacctcgagcttgtggcaattagatctagcaaccctgaccttgtggggacgcagggccaaggggagggcaccgtgttgtggataggttgccacaaccatcgtgatgagggtgccactgatgaggcgcattcgtggtgagaccatgagagtggcgttgcccgagaggagggtgccaccaccgtggagaggtctccatcgccttgaggatggcgccgccgccgaggcgccgttgtggggaaggtgcctgccgctgaggagagaatcacgcgttgctgatgactcggtagagaaaagcgaggagaagctgaggagaaaagagcgaagagctgagagagagtgtggagagaaaagcgaggagatgccaaaaccggaaatgaggtgggtgatagataagtcagggcgaacggaccatggcttagctcagcttggtgatttaatgtttcgggctttttttttaaaaaaaacccaacacatataatatgacaaccttatatatacaggtttttaatacgaaccggcacatatagatacttatatgtgctggttttaaattttagccttatgtgagatgtcggatagacgggaaaagcttcatatgtgtcggttttaaatgaaccgatacatataagggtgtccctattaggggttttgtagttgtgcgatctttctttcttttttttaataaggaacaagggcatcttttctttcagaatttcccgtaattatttggttaatgtatatattttcatttagaaaagaaatccaaccatatgggccgaatcaaatggcggaatgcacaagcaagcaaccatgtacatacgcacattacagctgacagcgtacagcatgctcaatcgcgaacccctggtggttttctttcggcctaacataaaacgcagcggcagcccatcgttctcgttgcctcgtcggccgaaagttccatgcttgtcgccgggggcaacccggcaaagccaccgcatttcgctcccacgcggtcacactgccaaatgcaccgtgccgaccttgacacctctgccccgcttttttttgattcccaaccgccgtccaccacctccaaactccaaagccctttgctctagctatttctttttgtaataatgaaatataatctaggtcgttactcaaatagttacgatcaattattacaccaattcaatcgaacacaaacatatcttaacaagttataaaaaatacactcattattcttgcataatgacactcaaaaataaataaattatccatattttcttattattttaaactctcgagttaagctgttatgtgtttataactcgacatgatatcagagttcaatgtctcgagttcaaatcctgattgttttttaataaaagttacaacctatttatattcactaaaacctcgacatgatatcaggcttaaggattctcgcgtgagaaagaatgttggaatataagtgaattgcatgtcttttcacatccgcttaaatttctattcatggtagaggttttagtgacccacgcgtgaacaaaggcagtgtttgtcaaatgggaaagggaaataatttcccacccatttttaaatcctaaccattcattctcccttttccatttaacccaaacccttcattcattttcctatcttaatcccacccctcatttcccattatctaaacacacccaaaagtgttagaaaccatgacacccccaactgacactaactccgtgtctccgcacatccttcattcgcccacaaatctcacgccaaaaaaaaaaaagaaaaagaaaaacacggcgaatcccgtgaaatcttcgcttcaattcgctcccaagcacacacgccccggcggcggcgcccgtagcatctctgatctctctcagcctttcaaaaaccatacgcgcgcacaaacgcgccatctctccatctcgccggcgtcgctataaaacgcggcgatcacgcttgcatctcactcacacaacaaaccacccccaagatcaagaacaacaacaacaacaacaacatttgtcaagatgagcgtggagatcgtggacgggagcacggtgcggagcttcgtggacgacgaggccgccttcaacgcgtcggtggacgggcgcttcgcggcgctggacgccgaccgcgacggcgtcctctcctacgccgacatgtccggggagctcatggcgctccgcgtgctggacacccacttcggcgtcgacgacggccacggcggcgccgacgacgggctctaccgcggcctcttcgcccgcttcgaccgcgacggcgacggcaaggtcggcctccacgagttccgcgccgagatgaaggaggtcatgctcgtcgtcgccaatggcctcggcttcctccccgtccagatggtcgtcgaggatggcagcttcctcaaggtggccgtcgacagggagctcgccaaggccgcctaattcaataacctagctagctaattaaccacattgaactagcccacgacgattaatttgagtactttgtttggtaaattttattgaatttggtgttaatttggatttgaactactgcattgttacaatcttacggagcactgctccctctgtttcatattataagtcgttgacttttttctgagtcaaatttatttaggtttaaccaaatttataaaaaaaatatattagcagtatctataacaccaagttaatttcactaaatacaacataaaatatatttcgataatatgtttgttttgtattagaaatattattatatttttctataaatttgattaaatttaaaaggtttgattctgaaaaaaatcgaagcaactacagtataaaatggagtaagtacttttgttatgaagaagaagaagaaagaaacagatcagtcgatcgatctatatatagttaaaattaagaggcattagggaatgatgattaatttaactgttcactgttgtatacatcgaggttcaagattaattaagtaaaagctgcagtaccttcacaaaattatactccttactccttagcatagagctgatcgatggagcgtataaaaatttaactttacatacagagaccaaattatatgcaataggattaatttgccgctgttccgttctgccaaactgcaggcagaaccatcgctgctgagaattgctttccttccttcgttcgttgtgcttcagatcctggacgggatgagcggcgtcgaattcgacaggtacgccgccgccgccgccacgccggagccgagcttcaccgggtagccgatgtccttgagcaccatctccactccactcagggcacccatcaattgcagctgcagagttatggagatcaatgagatgagtcagatgttgctgcaataattttcatctgcaaatcgatctgcagagttgtgtgtgtactgacctcgttgaggtggccgaggtggccgatcctgaacaccttgccggcgaccttgttgaggccgaggccgaggctgaggttgtaccgcttccaggcgtgcttcacgatctcggcgctgtcgatgtacggcggcacgacgacggcggtgacggtgtcgctgaaccactcctccttctgcgtgcagttcttgagcccccacgcctccacggccagcctatatatgcacatcacgccgtcagaatctcacgttcaaaagtttgaccgaatcttgttctaaacgtcaaaatgttcttcctcggtgaccgacctggtggcggtgccgaggcggttgtgcctcttgatgacgttctcgaggccttcctcgaagatgaggtcgagggcggtgcggaggccgtagaggagctggatggatggggtgtagggccagtaggtgcccatcttgtagaacttgaggtagtccttccagtcgaagaagacccgcaccgacttggccgtcttgctcgcctccagcgccttggggctcgcgcacacgatgcccagacccgtcggcagcgagagcgccttctgcgaacccgtcagcgccacgtccactccccactcatccatgcggaagtccaacgcacatatcgatgacaccccgtccaccagtagtagcgccgggtgcctgtgcttgtctgcgcgtatcgtcgtccatcgttgccatggatgagcatgagtaattcatcaagagaaagaagacaagaaagtgataaaaagctcaagatgttaccgaggattttgcggacggcggaaaggtcgttggtgactccagtggcggtctcgttgtggacgatgcagatggccttgatggagtgggaggggtcctggcggagcttgtagtcgagggcggcgaggtcggcgccgtagccccagtcgctctccaccacgtccacgttgaagttgaggcgttgctgctggtcgatccacagcaggctgaactgcccgatcaggaacgacacgatcttgtcccccggcgacagcgtgttcgtcagcgcgctctcccacgcccccgtccctgcaagcaagcaatcaatcaatcttcgggcgccaccatagataaaaggtgtaaatggttaacctacgatcccacttatagattaaaataaaccgtaaacccatttattgacctgtaagcgggtttgcgggttagccagttaaaacccttagctatggacgtggtcgatcgatgaagctaggtaggtaggttggttgggttaccggtggtggggaagaggaagggggtgccggtggtggtcttgaagatctgcttgacgtcctcgaggagggtcttggtgagggcgggcaccgccggcgagcggtagtcctcgttctgacggctcatggcgcggatcacctggtccgggatgttcaccggcccaggcacgaacaggtggttccgccccggcccatacacgtagtccgccatctccctgcccacacacacacacacaaaggcccatcaggcccaaacaaaaaataattattcgtcccacagcaataaaaactcctgcctaatataaccttctgaaagtgttctttgaaaaatgactagtgataatctcatcttactatcttagttgtactatatacggtttgttaattgttttgctctaattatccgactatataacatagcaaacatataattaatacatggctttagttagacataacagtacactactatctcgaaagaaaaacaaaggcaggagtacttgctagtactagttgtcactaataacgcagaagacgttatcaatttggacagtttcacttatccaaggaaaccattagtcctttcttccttttttttaattaaagaaacgactattagtgcgtgctctgatcctacttggcagattaactcgtgcttatccagaagaaatcaattcatgcggctactggctctctgttttgaaaattcaagttgctagctctagacaataacaaagcaaaatttctctgaacttagtctaagtttcaatttcttcttgcacatacaaaatccaaccatatggctaaactgaatttactcatacacctacgatcattgaagatctaatagaagacgctaatggagatggatgtgtgtaccttgttcagataaagcctcctcgatcttgtgctgatgattttttttttcgcacgtaatacgtgcgaaggaggaggcagggaggatggatagggtgctgaagaaggctatatagggagccatggtgtcctttcgtggggcccacacccgtccgacgtggcagataaggggccttgccggtgccttctgttcgtgaggccctcgtagctcgcctcatggagtggtgcttagctgctacttagctctgctctagctctagctgcagccatcactggcatagcatgctaacaaagcgcacggattttgacagtgtgtaacgactactcatacacagtaatctggcttcgtcaatcccatgtatatgtcctgtttatcgtcccaattttatcagatgtctgcttaatttccctgtatctgataaggtgttagctgcaccagaaattatttttcttttttcttttttgttgaaagctttgcatcagagataattagttaagcaagctgcagaggtgatcctactgtttgagtagaaattggagctagaaaggggagagaaataataataatccggtttcgctttgcttgctggctggctgaggcgatagagctgtatggcctgtgagttagtgagtgagtgagaaaaatgacaggtttggttgagtccaagcagagccaatctgcaagccaagggcgcaggagcgtccacgtcggatgttatcccctaccatctcgctttgcggtgtccgtggaaacccagcaattttttttccttctcccttcgtttttattttcagaggtgaggtcaagacaaaagatgatgttaaattgtatcgccatatgcttggagaaggttgagagggagaggatgacggcgaggccacaaacgaacagatgggaggaaggtgatagctagtgtaggtggaaatggaatcgagctgtaccaacgagattttatcgtgagaaaaatcgggtaattcactttttactttgatatttatcgctttcgtatgaactttctcctttaaaacctgaaaaaaaatcaggcgattcacttatacgctttgatgtttttcgcctttgtatgaactatgttgtgtctaggttggctttagcatgtccgttgatgcagtgacttgagtgaggctgtagctgtagctgaagccgagaaaagattgaattctgaaatatgaaccttttgctcgttattctgatgagttcacggtatctgttccatatgttacagaacctgggctgtgtatatccattgtggatgtagaggccgcattttaatctattttctaaagaaaatgttacataacctgaaaagtgggctactgggctttttttcttaattagacgcatagcgcatgttcagacatacgaagtctgaatactgatcatatgtactctcaaggaagaaccacatgcaagtgatacccaattgggtattaaagttgtgtttacagctaaaaggcttaaagaaagaaaagttcaatttttatgccagaacgaaaaaatggagactttcaaactgtagccttcaaaaataagccctcccaaccgggcatgaagtttctttcggttctatcggtcattcggttggctaagagttattaggggaagaaaaaaaaatttgtgtgtaaagacaatgttaaaaaagaaacacgttgacaatatcgtaaaaataattctaaagttaacttttcaaattcaaattttgggctgattcgttgtagagaaaaaaacaatgaggccctttctgtcttaaaactagtcctttctttcctcagcctctccatttggtaaccaagaaagctactacaacggtcggccagggagcaattcatagtctctgaattttgaacatggactaaaaaccttgctccccatgaacaaattcttcaccttcaaatcccaaccagcttccaagtttgtttcgttggaccccaaaaaggcagaaacaaatttcgtctccgacgggtccattttcgcaggaggaaacatctgcatttctttgtggctcaatgattgcgtcgacaaatcctacgcccaaattccagaactggtcaccttggaacatgcaaaaaaagagcaagggagagagaaagaaagaaagaaagaacgagaaagcaaaagggtggtatagtgcagagtgcagaggagaccgtggaccaagaagattctgcatgccatgcggatatacggatgttctccttttcctacatatagacaacgtattagcagcactatcactgcacatgaacaaatccatcaagaattgaaacaggatcaagaactgaatcaggatcatgccttgatcatgcaggattcaccggactgaaaaagatggatttttttttgaatgcgacttaacgaaaaactctctaacttttctttcaatgatggaaatggtttatatttctggtctctgctaacggtcacgcgtcgaagaaaacctctcaacatgactatgtttacatacttctattaggcttccttgcaaacacatgattgaaaaaaaaatcatatgaagaaatgtaggattttggtaagaacacaagtgcaaaacagatgattgcaaaacatacatggaaaaaaatagaatgatcatttgaatagaccacgggaaaaatataagaatcagatgagacatatagacttgaatggaaattttccaaagagattagagctcttgctaaccctcttttaaaatctctatggaattgttcatttcatatgaatttcaaataagagatgtgattcaatcatttatttcaaaagcttccttagcattttgcctttgaaatccctgaaatttcgtatgtttttaccgggagtactgcaaatgaaaggggccgatttcagcagcaatgctgctggcctgctgcgcgcgcgcagcactgaaccgagcacacgcatcattatgatctcttctactacagatcaggagcacaacatcacaaatatattcagaactgataatccagcttctgctgctactatgatcaaaaggtgtttgtgctgttgttctactatgctcgcttggcatcggatgcctgccctgcggcccctgcctgcctctcgtcgcgagacagacaggcatgatggcgctgcaagctgcaagcttagggctggtttagtccccaaaaatttttcttaaaaaatatcacatcaaatcttttaacacatacataaaacattaaatatagattaaaaatactaattgcgcaattaggaggaaatcgcgagatgaatcttttaagcctaattagtactccctccattccaaattgatctacatatagtttttttaggttattcctaaatgatctacatatttgtgttcatttattaagtctactcgttatttgtgcattggagtaaatggacattgatgcatgcatccatgcacacaagtatttataacccacatgcaatatcttgatttgctattggctggaaaatattagggatggtgcatgtatcgagtttgttgctagagtaaatatagtatgagagagttattagcctttcttggtcttggtgtatctataaaatatgtagatcaatttagaattgagggagtacatgattagccataagtgctacaataacccacatgtgctaatgacggattaattaggcttaaaggattcgtctcgcattttccaagcgagttatgaaattagttttttcattcgtgtctgaaaactccttccgacatccggtcaaacatccgatataatacctaaaaaattttcttttcgcgaactaaacaggccctgactgatactaccatactactcctacacaaaaatatggattttttctttttattttgtgaaattttttatttttaattttaaaaataaaatcttcaaaaacttattttgagattctaaacttatttcgagatcacattagtccgtctgacgtgaaaaaaaaatattgacactgcacacaattcagctgacgtggcctaaagattcatgtcttgaaaataagttttaaaagagtttattcttaaaatttaaaattaaaaaggtaaaaaaaatccaacagcatggccatgcaatgtaggcagggaaaatatgtaatgcaaaccacgtatatagtgaaaacttagaaactaccgttggatcgagaaa

SEQ ID NO: 8564 - DNA, 21910 bp, Oryza sativa
  unsure (1)..(21910): unsure at all n locations
gtgcactattcaactactaaaagtattttggtaggacatgttttggcatatcaacaaaataatttagccaattgcaacacacggggacacagacaaccaaacgagatcagaatgcagacgtggtaatatatcaattcaaattcatgaacaaaaacttatatttcaatgtatggacttgcagaattgcacaaacgcaaaaggaaacaaaaaaaggggcaaggaattgtgctttgcttcactgcttggcaattggcaaggcgacggaatcaatcccggggaccataggctgaagggccagaaaagagggcacaagatgtcaagcttgttccgacttccgagaggaacttcgtacaacaaaatggaagtatatacgcctatcatgtacacatggatctatgaggtatatacagcacatactctgcctgttctaaaataagctaatttttatacataaaattaaacatagcatgtgtagattcgtgtgaaaaggttaatttatgagggtgtttagatccagaggtgtaaaactttagcgtgtcatatcggatgttatatagggtgtcgcatgtggtatttggacactaataaaaaactaattacagaatccgttagcaaaccacgagatgaatttattaagcataattaatatgtcattaacaaatgtttactgtagcaccacattatcaaataatggagcaattaggcttaaaagattcgtctcgtaaattagttacaatctatgcaattagttatttttctaagactatgtttaatactttatgtaggtgttcaaatgtttgatgtgatatggtgtaaaatttttgtgtaggatttaaacagggccttattctaaaatggagggagtaaaatggtgaaattttctgttgtactttgttagtgtcatcggtcagctcgggcgttgacctagtaatatgggaactgtggtgtgtaattccttcgaaatgaagctggtcacttcatctctccagtccatggctctgcaagtctcgcaagtcgttagatttgtttggtccttcatctgctttgcattcagattcagtcagcccaaacttactagaatcctgatgatcatcagtgtcaccactttgggatgtgaaaaatggtagtttctgtccaatgtgtggtgaaggagggagtgctgcaagattaatcaagaaaacaagggattacaaagcatggaattaagtatggtttaatgatgtggataggaccgtttggtgtccaaaattttgagggtatcaactaaacatatccagaacaaagatgatacttggggtacaaattaaagtcctcggtaataatatatcttctctggatgtctcccagtttcaacttgaatctgtttgcagtagaagtgccttcctcgctatgctgttctatactactccctccgtcccataatataagattttgagtttttacttgcactgtttgaccactcgtcttatttaaaaaaatttggaattattatttattttttttgacttactttattatccaaagtactttaagcgcaacttttcattttttatatttgcacaaattttttgaataagacgagtggtcaaacagtgtaagcaaaaacttaaaatctcttatattataggacgaagggagtatatgttacccatattactccatcaaaattcacctggtattgcaagttaataatcacagcagtcacaacctacaattgtggaaatcgttatttggtgagcatatgtgacattttgctacaaaggtaatttttcatgcgataaatttaacactgaacatcaaatcatatatttatattcgtaggccacaactaggctgcattatccaataaaagaaacaataacactctcaaccatcaaatactagtatatgagcaaagatgctgtacacatatgaaacttttggaatactacacagaaaccaaatgtgcggcttcattttaagcttatatattttgagtttttacttacaatgcttgaccattcgtcttatttaaatttattttacaaatataaaaaacaaaaagttatgcttaaagtactgtagataataaagtaagtcacaaataaaataaataataattttaaatttttttaataaaacgagtggttaaacattgaaagcaaaaactcaaaatcccttatattatgagatggagggagtacttattagtcaaaatttaaattttcaattttaaatttgaaattgattttaaagtttttttttatcaaagtttatttttagcatttacttttaattcgttaaaaacacgcatataaaagttttattcacaaatgactttttctttgcagatatgccgatgggcacccttatcatcgactcatcgtagtattagaatttattagagaaaacaaattgcggtaaaagaagggtaagatggacggcgtcagctatatttcccaagtctaaaacgtccagccgtcagctattacgcaatcaccaggagacggacggcgtttataaaccttcctccgtgcatagaatcgtcgtcccttccctccgagtgccgtacggccgctgccgccttctggaacattcgcttgcctccgccaaaaaaaaaaaaaaaaaatccctcctcccctctcccctcgagtggggcgcagccgcctcgctcgtcttccttcctcctccaccgccgcgcgtgcgcgagtgcgcagccgccatcgccgtgcgcttctctgcctcccgatctgcggtgcgaccggtgtgatcgcggagcggcggccgacgagaaggatttttttgagggaggggggcgagtggtgcgacgccgctgacctccttcaattccacctgccccaatctcggttgggaatcgaatcgaaaggtattcccatcccctcctgcttggctgagccatacggggctctgattgattcatatttgactcatattaagcatccagttttattctggatttttttttggcgcgtggtgtagtactactggagtagcaacttgtgtcccaaaataaaattgagggtttagccgccccctgctcattagatgcagtggccttatactttcatattgatatagcaagatagggtagtaattttttttcttccctgtcttgttgataacttcttggtaggtgccactatgatcttctgttataacatcatcatactatgaaattagtttgatggcataacgtgtttttttttcttatcaggaataagatggaagagaagagaatagctcggatttcggtcacttggagaggcagacagctcgatgtcgatgcagacccgagctgtacggtgaaggaattcgggcaacttttgcaggatttgactagtgttaacccagagacattgaagcttattgttccgcagtctacaaacaaaggctccaagctgatcacaccgttttccgaccctcattcagttttgacattgaaagaagctgctattagtgatgtaagatgcacaagagttgtacttgctcagcaatatgttgctacgttatggatattataatggagaatggaataatttatattcaatcattgtttgctacaggggaagcctattagaatgatgggtgtttttaatgatgaaatcgaggaagtatcggacaatggcaaaagaacagatctacggataattggatttgaggaggaagaacaacggctgaggcaacgaacatcaggcaggccccaagttccactcaaacttccacagggccaatacatcttctgtgattttcggacacttcacttacctgggattgaggttagttagcctctactccctacgtgctttctgaaatctataagaaacagttcatgtaggcatgtcaatccgccccttccatactccacatatcatttgtctcctcacggattatcataaaccttagcgcgcacattttcctctgaagtctgaactcttgcaatttcctgcttgaattaggatgcaagcagcgcacgaagtgttccatttgaacagtatgcacactataaattgtggattaaatagtttgaaggaattggaccattgtgcagtttgcactggtttctgtccaaaactttgtgaaaagacaacgttaaacaatgtggtgtgctcattttatttatcatagttaacaccttctcatttcatgacatgacttcactataataattataatgaaatcagtatatgtatgaaatgaatgggttcactatgacaattgtaatgaaatcagtatatgattcctgtaacttgctatagattatatatagtacattagatttgaacactagacattattttcatatatacctcattctttcgtaaaaaaaatacatgcatgctagtagaaaaacagatatacctgatttgtatgataacaaataggccaatcacaacatcttgaactatcgagttttgcttacgtgccttttgtttgatgccagttgaatcccccaccttcagaagctctgaaaagaatgcacatgctagcatgtgacccaggcataattgcgatcatgaacaaggtagcaatattttcaagtggtgtttctgttttttatgtttgtgtacattcgttattttacagttatcctgttggccttttcagcatagatggcgagtgggaatcatgactgaaatggcaccagtagggtatgtaggcgtcagtccaaaatgcattctaggcttcaataaggttagtataactgtataagctttttactactgcacatatggatacttgtcacacaacaatttctgaggttatatcatcatgtcttcctcattgttaatacagaacatgggagaggaaatatcccttcgcctacgaactgatgacttgaaaggatttaggaaatatgaaagtatcaagagaactctactccatgaacttgtatgcctccttggttttctgctttcatgaaatggagatttcttatgcagatcttccgtttgtcctctgtaatcatgcctattgtatattaaacttgcacttggtgatttcaggcacacatggtgcactccgagcatgatgcaaatttttttgctcttaataagcaggtgattttttttcctagacaatcctttcatgattggctactgtctctttatgtttttgagttaatctgttctttaatacaatgtcaatttcagttgaatgatgaagcagcttccttggactggaccaagtcaagaggtcatgtgctgagtggtcgcaaaatcttcgattcctatgaagacgaatttgttctggagccagacagtgttgttgttggccacaaacttggaggaggatccagttcactggcaagtgctcgtgtgttgtctgggtctgctgcttataagcgttttttgaatgcatcagcggatttagagagttctaaagacagcgttactatacctggaaatgaaattcttgtgcctaacacaaaatttgagcctgatccagatgatgttggtcaagatttttctcaggacaacactaaggtggagccagacccagatgataatgatgacatgaacgtggatgtagggactggggcatcttggtcctcagtttctagatcatttacagaacaagataccatcagtcactcagagcctgaccctgatgatattcaccagcaaagcactgctggttgcctagaacctgaccctgatgattcctcaaatgttgatattcttagccaggagttgacgattgatgggaagcagaatggagaacctgatcctgacgataatggtactagcaaatttattcccgaacctgtaaacaagatggaagtagagactgaattgggaagtaacttcgcagttcagaattctgaacctgatcctgatgattcctcaaatgctattctgaataagaagctgggaactgacaggtctgatgaaactacatgcgaagctgttgtagaagaatgtgtaaacaagatggaagtggagactgaacagagcagaaactcgacaatgtcaaaatctgagcctgatcctgatgatcatgctgctaattcaaacatcagtgagctccagaggatcgaagaaccagtggcagccctctgtgcacgccttcagaaggccattgaaatgcttcgctcacaagcaacacctacagaggcaacttctgctcttcaaacactctttaagatcatcaagaatgtgatagagcacccacatgatatcaagtacaggagactgcgtaaggtatgcttggctgttcttatgctcttttattaggttcaattggtccactaaaaaaattcttacttactaatcctcatttttcaaatatgcagtccaatccacagttccaaaggagtgtggcgaactacaaaggtatctatttgctttatagactcccctctttttttttcttcaggtcttcaaaaatcaactgtaactaacttcctcatttttttcgcctccctgaaaacagctgcaatggaggtccttgaactgattggtttctgtgaggatgtcgtctcggatgagattggtcgtgcagagacttacttggtattgaaaaggaacgatcctggcttgctgtggcttgcaaaggcctctcttgaagtttccatggcctgaattgtttcaccaagcaatctcctattgcttctgtatacctgtaaatcattttcattactgttgtggggatgctcatatgctgctcttaggcaaatgatgtagtatggtcttcctacacgatgattgtttgtatatggaaacaccaaaatggtctatactgtctgtcaacacacttcatgatttctcatcaaatatacaaactatagataaattacctggcaaaatggacacatcttcccttttgtgtggactctgatagaaattgattccagatgctcacaaatgccagccaaccgtatccacgaataaagtctcgactagacggtgtattccattatcatcacaaagatgttaattttggaactgaagtatataaaaccaaatttaatcaccaaaggtctaatgtttgggaactgatttttttttaaaaaatcaaatcttaaatctttgccctttttgttctgtattgggcctttccaacctcgatcccaacaaattccgggctgtaaattcggtgggcttggtgtctaacaacagcagaaggcccacatgcgtcccatcgcaatatcccatcggccgctcgctttcgacgcgtagcggcagtaacacacactctctcccttccgatcgtcgccggcggccatcggcggcgctagggttcatcgggttacgcaggcaactgcgnnnnaaaaaacgggggggcccccgggaaaaaaggggcggggggccccccgggccccggggggggggngggaatctcgcgatggaggcggccgtcgcttccaccggctccggcctgcgctgctcgcccaatccgatgcctaagcagcagcacgagcggcgaagtgctcgggtgggcttcgtctcccagccgcgacctcgcgctgtccgctgcgagcggtcgccccatccggatgctcgagcctacgcggcggtggcggtgggggtggtggcgaaggggcgtgaggttgggggcgtcggggtggagagaaggaggctcgcggtgttcgtttccggtgggggatccaacttccgggcgatccacgacgccgctctgggtggggaggtgaatggtgatgtggttgcgttggttaccgataaaccaggtgacgatgacgacgatgctttgcttccttgagctctttgggtggcgatgtgggtggaattgttgggatttattggggatttttgatgtggcttgcaggctgtggaggagcggagcatgcgaggggtaatgggataccggtggttgtgttcccgaagtcgaagtctgctccagagggggtttctattgatgagttgttgaatgctctgaggttgggttggttgctttgatctcaccttcaggctttgacattcgatgttctagctttagtagttcatctgttaggttttagataagtggatttgtagaaaaaaatggtcgatatgagatttttcacacttgcctttagtcttgtttgcaaaatgcatacatgatacattgctgtgtgctgataaaagttttctaatccatttatctgtcttatgtgtgcgagtagcgtttaaatgattttaaacgaagatgaattggtaactatttaaatgattttagtgtttacttattgaatgtgtgccactaccttgttttgccagatgaactttgatatcagttttatgctctgggttgacgtttagtccggaacctgttggagtgtgttcttcatcagttgtacagtgtgcccacacagtcagtcagattagcttccattttgttattgcctagctgatatactgtaatgtaccactgttgattttttcacgaatagccactgcatgttttacggtgtttgtagttcccacttcacttatatcctcttctacaagactggcttgcctactgcggatatttgttttggtcacttgcaataggtctcaagattctcaatctatccttaatttcttatgtgaaacagggaactcagggtagacttcattctacttgctggttacctgaaacttatacctgttgagctagttcaggaatatccaaaatccattttgaatattcacccttcactactcccagcatttggaggcaaaggttattatggtttgaaggtgcataaagcagtcatctcatcaggggccaggtacttcacaatctctctatcacccatcacaagcaactgctgtgcagtttgcatatctactcaatgctatttccatggaaagcaatatcttggcaatcaatttgagctgatatctcacattgtagaacaaaactaaagctcaactatacataggtactcgggtccaactgtgcactttgtggatgagcactatggcacaggaagtactctagcccaaagggttgtgcctgtgctagccaatgatactccagagcaattggctgcaagagtccttcatgaggcaacatatcttatgctcggctaatatttctttgatggaaatggccatgacaattcacttagctgcaaatgcaattgatgatatacgttcttttgctcatttattaaccttatttttcaggaacatcaggtttatgttgaggcagttgctgccctatgtgatgaccgaattgtgtggagagaagatggtgttccacttattagaagtcatataaaccctgaggagtacacttaactcatagtactacctcaaggattgctgtgcagcatgcacgtaatgaggcttctagaatgcctgcattgttttttcccaaggcatgaaggtcactcgtactaattgagataaataacttgtctggtgctgttactgaaacaaaatatcttgtgccgttcaactcaccgcttgttgtgtgactttgctccaacaatgacatgcgcataggccgatacttagaaacctcagtgtttgctggtgtgacttgcggaagcatactggttgctgcatgcaccaagttttttttttttttgtgtgtgtgacagagcggggtggggggggggggagggggtccattgtaccctttagtcttggaattgttgtaatcggctgaagtcaagtcgatcaaagagggagtaaaaactggtcagatcacacaggttttcaatgtgtaatctgattaccatgcttcccatatgttccatccttgtttggtctgaaggtgttaatatttaacccaactgaagttttctttgagattttaaaagttctcttgcaaatttcagtatgcgagagggatagaagaaggggatggtgcaaatgacagccattcttagagaaccctctccgacagaaaggttcctgccaactcttcctccattttgtttttaggtactacatttttgtattgagtttgggttagatgattcttgaagcaattaaggttgtttcttgtgttgatctcccctctcaatttgctctatgttctgaggaagatgggcaggtggttaatataccgtcaagctgcgtttctttcatatatatgcagattgcggttgtggaaacctacatttttagagttcccgacttaagacgactatattttagagtcaccatgcgtgaatatacgcaaccatgaggtccatgactagagagaacaatgcagtttcattattgcagtagaacagcgacactgtgatgctcagctgcagttcctaatatccctcaacaccatgattgagtaaatcaatcacactcattagataatgaaacaggaagaagctaactagtcgcttatgtaaagcaaactcaatcaacccaaaccggattgcaagtacttgagttatgacttgcaattttattatgcattattgtctcaaagcaaaatatcttaggaattacttagcacagaacattagcaatatacgtccatacataaattattgggtccttggcaagcttgctagtgtcctagctaacgctagactgctagatcataattatcgaggaaacgatagcatttcctcttccatggattgactacttgcttctgtggcaactccttcaattgacatgtatagtgctgaaatttgatttttactgggtctacttgattccctatttcccttatggaaggggcccttttttgataatatgttttccagtgccatctctacttctctcattgaaggccgttctcctcctttcaatttagtacacagtgcagctacttcatggacttctccatcttcctcctccttgacttgaggatctattatgttaataaggtttccttctgagagcagcaaaataaaatgtgaaacaaggccatcaccatcgaacgtgtcaacaacaggtttctttcgagtaagcaactccacaagaagaactccaaaactaaaaacatcgctcttgtcagttagtcgaccaatataatagtacatgggatctaagtagccaattgttccttgaacagttgtagttatttcagatcgatctatcggggtgtactttgaagccccaaaatctgataccttcgctgttaaactatcatcaagaagtatattggaggacttaatatctctatgataaattggcattgaagaagctgagtgtagataggacaaagctctagcaacctcaagtgaaatccttaatcgatcatcccatgacagtgagattggaccatcgacatgaagatgatgataaagggccccatgtgaaatgaattcataaccaacaatggaacttctgtctcaaggcaacatcctaggagcttcaccacatttctatggttaatttgagaaagtattgcgacctcatttatgaattcacctatttctctttgaactataatctttgatttttttatggccacaacattcaggtctagaatccccttgaacacgactccatgccctccatctccgacttggcaagatctatcaaaattgtttgtggccttttggagctcctctaaggtaattatcattcgctcaccaaaatctgtgtttcttgatattaactgctgcagtagcaatccatgattttgcttaaagaacttttctttcagttttttctccctgcgttgcttgaccacacgtgctactaggggagtagcaagtaccagaataagaacaattgatccaccagaaactattagagctatgcttagccctgaaaaggaagatccatgaagaggcaaatctagtgaataaatttttgagatatgttggactaagaaagatctaagctataaattttggaatgattatcaaactaccatagactcgctatataaaccgagtttgtattatcatgcaaagataaggatacataaatttggtaagatatacttcatccgtctaaaaaaaaaaccgaatctaggactggatgtgacacattctagtacaatgaatttggataaatgtgtcacatccagtacattggtttcttatgggacggagggagtatgctctttagtgaattgtcacctgtcaaagaattcttggatgtgatgcatcccccctttttaaagggatccccatatccattttgacatcgacaatgaaatgacccatgcgtatttatgcagattccatagcatgaatgcgccggtctgcacactcatcaatgtctacataaacaatacaacttactgaaagtacacacctagaaaggagatctaaaacaatgttgagaaatcaagagatatattagctagttgtgcgtttctctggtagtgtggattatatataaaattttgaagctattaatttcagttttttagactattaataaattaaattgtttttgttcttgagtgcttaaaacaaatttatataacttttaactaaaaaatggtgcaaaagtatgtaatgtaaattgcttgtgcgaatatatgggggttaccaattattgtactcaattatgtatcaatctaaggaagtaacttgttttgttatacatatgtcgttatgttgaaacactcgtatttatctacataccttcgcatccgtttggttgagtagcgttgccctttaagccatctcggcaccgacagttatatcctccttgcgtgttagtgcaatcgccaaaacatggatatatatcgggagaatgacactcatcgatgtctagatatgcaaaattgtattggtcaggagagggaaaagtctgatcgttttagataatgaagaaggaaaagtctaggttggaaaattaattgtgattagaactaaagttatctttgcaaaacgaccacaaaaccatacttggaagaaaacatataaggaaatgcacaaatctacccttttcaaaaagggacaatatccacatatatggggccacttctagcatcatcggtcactattaggaatttcttttgtacgttggtaattataaatcttatagttcatttgtgtaagagtatatatgaaaaataaaatcatttgatggttgattgcacatgatttttaatatgattctttatataaacaatgatccatgtgaatgcaaagtttaaggacccgtgttcataacgtatacctttgcatccatcaatgatgtatggattgccttgataaccataagagtacttgcaccgatacccgttgtttgcccaagcatcagtgtcttggcaagagctatgggcactgcgacactcgggggcagatgaatttctaggacaataacttgtcgaattactgattacccattccagcaaggctgggagcgcttgcggatctctgtcggaatcaaaaataatgagatcgacattggaattaatgaaattggtatagttgaatccctggtccaccatgtagatatttaaaaagtttgcatcaccgtgaatctggatgagataggatgagtagcctaaaatgatgtttgtttgacaacaacaaatgcccgagcacgcacttatcccgaaaattgctgatgggatccttgggcagatgacactgcaggaggcgatcgggttgtcccctcccagcccccagacgtcgacctggctatcgtggcccatcaacactaggctactccccgactccgacaggaagaacggcccgccatctgggaggccaccgccccatgtcccgtttgcgcttccacggccatcgtactccagattgattcggccgctgttgatgcgcacggttccattggggatggagatgtcgagcacctgcaccgtgccatcaccgaggaacagcctgggcgggtggtatgagtggtcgcaggtgaggttgaagccgactgtgtggtagcagccgggctccaccccgaacgggtactcgatgctgatgttaccgcagctggtggtgcagctcttgattttcttcgcggttggcaccgcgggttcttccgccgcagccaccatcgcggccagcagctgcagaatcagcaactgaacatgcactctcctgctgcccactaccaccctgaccatctctgtatatactccctccattttaaaatggttgacaccgttgactttttagtacgcgtttgaccattcgtcttattcaaaaaatttaagtaattatttattcttttaatatcatttgattcattgttaaatatagtttcatgtacatatatagttttacgtatctcacaagttttttttaataagacgaacggttaaacatgtgttaaaaagtcaacggtgtcaaatattttgaaacggagggagtatgttttatcgcaacagattatgtatcgaacgttctatcaatgctgatcctgatatggatttgctggtttgtaattaatctctggtttgtaattaatctccggtgtaactaactatatatacagatgtactctagacgactgaagtagtccctatcgtgcggccgtgcctaactaacgaaattaactactagtatgtagtaagatgaatggattgtgtcgtcagtcaatgacaatcatatatacgttccattctacacggaggtctcagataatatatagtataatgatgatataaaggaaatataaatttgttaattatacttgggtgcgtatgcatcgtgtatcacgcagtgtctcggcatgcagcttgctgcttttgcttttcagcgagtgggtcatgtcgtctcctttaattccctctgtatggtcctgtttagttggtgaaactctatatgggcctgtttagttgatgaaataaaaatttttaggtgttacatcggacgtttgttcggatgtcggaagggatttttggacacgaatgaaaaaactaatttcataacttgcctagaaaccgcgagatgaatcttttaagcctaattaaacagtaattagcatatgtgggttactgtagcagtacttatggctaatcatgaattaattaggctcaaaagatccgtctcgcgatttatatgcaaactgtccaattagtttttctttttatctatatttaatgctctatacatgtgtccaaagattcgatgtaatgtttttgggaaaagtttggggaactaaacagcccctatggtgagaaattagtccatgtgaaatttcccacatgtacaacagcagtatgccagtatatatggcttcgtaagctggcttgaaacaacattaattggccgtacaagaaccaaacaaattggcagtaacaaagcctctctgcgcccatcaatggcaacatgaagatacgtacgtactctctagtcaacagcgtgtagagacttacagtagcggtacgaggaaacaaaggcgcaaatgtctcttttcccttgaagaaatgatcaaatgaatcaaggcaagcaaactctatacgttttcatttcagggtttcaaagcttaatcatcgccttcattttctatatatgtttatatcaacttttcttttacaaaaagagagtactgaaatcaaccgggtcagacacgcgctgctataccaaaaggattccaaagaattgcttgtgtgttgacgacgctaggatctttgatggcgtcaacaagaccccgatagaggtcgcttaattggggtattgccatggaaaaatggtgcgcgtgacgaacggccggtcggaggcattgtaatcgaagagatcttggacgagctgtgaatccggctgatgttgccaggcacatttcatgtgtgataccggcttcaagggcaacaacatccttaaatataatgaacgggtgggttcgaaaggtagggtttttggatggccctaccactaggctggctgccttctttcggatgggaagcaggccgggcctgatgggcgagctgttggaaatttggtcataattcgacatattttaattcaaaataacaagataataaatatgatatttacaatgggatttgatccagtgatagtggtgaatgtaatcaacatgagcatgcttaatgtagaataagcatcaacaatcacataataacataatgttgacattgggatgaacattaacagtaaaacttctaattgaaatattgtaagaatgttataccccaagaattgtcctccgctggagtttgaggcagtattgcctccgttggtgttgacgggagcctccttctccttgtatccagtgttgccgttgtctccagtgttcgacatattggtgaaggtgaagtagatgttgacgaacagtgagtagtcgcgccttgcactccccaaaaacctgatcgcccgcccgtccgtgcaaacgtcgcagcagcgcgtggtttcggaggcctactctcccaaagcgtgtgcacacactcgtcgggatgggattaccgtagcagcaacagcgttggaaaatggatgaaagtgtgtctcactgttctcgcgggagatcaaatccattctcattttataagaggaatggaagatgaaaagtaagagtcatggaataggaagaggaatagagcaactaattgtcatcaactagccatgaatcatcctccactacacaaccatcaaccaataatcaattaggagtaattgatgtaagttaccaatggaataggaagaggaatagagcaactaattgtcatcaactagccatgaaccatcctccactacacaaccatcaaccaataatcaattaggagtaattgatgtaagttaccaatggaataggaagaggaatagagcaactaattatcatcaactagccatgaaccatcctccactacacaaccatcaaccatccatcaattaggactaattgatataagttatcaattccctaatcaaatggattaattctcaaaactcttcatcccattgatatcccataaaagaatgaatacacatgaattactagcataatgagccttggaatttatttgatttaattgatttaaatggatcaattacccaattaaatctaacaatccccaccaaatttcaaggctcatgagaatgctctctattccatagcagcttttatataccagtgtttcggtgaagactgttaagttgaactttcacctagaaaaggagctacacctgaccacaactgaacaatggactatgccttgaattgtcagtcttgtgcagttaggtttcactcaattccataactgatactaggcaaccgttagtattccctcgggttggagcttataagtcatactccaggcctttcatgagtatctagagatcatccaaatctcatagactgtgactagcagtcgaactcatataggtgtgttccttctaagatgttctgcaggtcaacatctctgcttaatgaaagccactcggaacacattgaggcataaagccatgctaccatacagaatagaagagaagtacatcatgaaaatgagcccatttaagggtctcttctctcggttacacaatagtttatttcgccatccaaattcacgggatctccgatcacaatggacaggtttccactattgtgcaactctaagtgggtctcaagcccatttccctcgatgcactgtctatcacattacgtggtagccccttggtaaactgatctgccagatttttagctgtctggacatagtccagtgctatcactccggagtttttctgctttctgacagatttcagtcttctctttacatgcctagatgacttcatgttgtccttcgaactgttcaccttaataatcactgtttgattatcacagttcattagtatagctggcactggtttttcaaccaccggcaaatccattaggagttcacgaagccactcggcctttactgtggcagtatctagtgctgtcagttctgcttccattgttgacctcgttaagatggtctgcttgcaagacttccaggaaacagcgccacctccaagtgtgaacacatatccacttgtggcctttatctcatcagcatcagatatccagtttgagtcactatacccttccaatatttttgggtaaccagtatagtgaattccatagcttattgtaccctttagatagcgcatgaccctttccagagcttgacaatgatcatctcccggatttgaaacaaaccggctcagcttgctcacagcaaatgagatgtcaggcctcgttgcactagccaagtacatcaatgaaccaatgatttgggagtatctcaattgatcccttgctattcttccatttttccttaatagcacattggagtcataaggagttggagctggcttgcagtcactataaccaaagcgactcaaaaccttgtccacatagtgagattgcacgagtgtaatcccaccctcatctcctctcagtagcttaatgttaagaataacatcagccacttccaaatcctttatttcaaagcttttggacaaaaagtccttaacctcctcaatcacattgaggctggttccaaaaatcaatgtcatcgacatataaacacaagatcactccatctcccccaccatagcgatagtacacacatttgtcagcttcgttcacaacaaagccagcagatgtaagtgttgtgtcaaacttctcatgccattgcttaggtgcttgcttaaggccatataaggatttcaacagtttacacaccattccctcctgaccttctagtacatatccgtctggttgatccatgtagatctcctcttctagctctttgtttaggaaagctgtcttaacatccatctgatggacgagaagaccatgagagactgctagagcaagtagtactcgaatcgtggtcaagcgggcaactggtgagtaggtgtcgaaaaaaatcctcgccttctttttgggtataacccttggccacaagccttgccttatacttttcaattgtaccatcaggcctaagttttttcttgaaaacccatttgcatcctacaggtttgcacccatatggacgctcaacgacttcccaagtaccattagacataattgagtccatctcactgcgtaccgcttccttccaatagtcagcgtcaggagatgaatatgcctcttctatggttcttggagtgtcatccacgaggtatacaatgtagtcatctccaaaagactttgcagtcctttgtctcttactctttcgagttgctacaatgttaacctcctcaggattttcctcaggcgtttgatcattgtgttttatcggtgcaaggtgctcatggggtaaaacaggttcttgactagatgtgctaggtgtatttttcatgggaaattcattctaaaaaaatgtggcatctctggactcagtaattgtaccaacacgcatgtcgggtactccagagtttactattaagaacctatagcccatactgtggatagcataaccaaggaacacacagtctacggtctttggtccaattttacgctttttggctataggtacatttaccttggccaagcagccccatgtgcgtaggtatgagagatttaatttcttcctttcccattctttgaatagtgttacttccttatgcttcactggaattttatttaggacatgacaagcagtaaaaattgcctcaccccaccattccttggaaagtcccgcagtgtctaacatggcattcaccatctcagttagagtgcggttctttttttcggctacccctttgattggggtgaatagggaggcgttctctcatgaataattccaaactcttcgcaaaaggacgtaaactcattggaaaaatactctctacccctatcagacctcaaccgtttgattttcctttcaagttggttttctacctcagctttatagatcttaaagtaatgcaatgcctcatcctttgttttcaataggtacacatagcaatatctagtgcaatcatctatcagtgtcatgaaatatttctttccccctttagtcaacacgccgttcatttcgcacagatcggaatgaactagttctagtggtgccaaatttctcgcctcagatgccttgtgaggcttgcgaggttgtttcgattgaacacaagtatggcacttggaacctttgaccaaagtgaattttggaattaaactcatgttagccaagcgcgtcatacaactgaaattcacatgacaaagtcgcgaatgccacacattggactcatcattctcgctaatatggttcacaacattattattattattattattattattattattattattattattattattacacatgtcatccaaagaaaaacggaacagaccttcgctgtcataaccttttccaataaaagttccatatttagatacgacacatttattggattcaaacacaagtctaaaaccatctctacatagtagagagccgctaactagattcttctttattgaagggacatgctgcacattcttcagctgcacagtctttcccgaagtaaacttcagatcgaccgtaccaacaccatgaacagccgcaagcgactcgtttcccatcaacaaggaggaacctctcccgacctgataagaagaaaacagggaaatatcagcacacacatgaatattagcaccagtatcaacccaccaatcaggtgaatgaaaaacagagagaactgtaggtaaaaaattaccgtaccccgatgttcctccgccctcgctaataaccatgttggcagacttcttgtccttgcgatcaggacaattcttcgcccaatgcccaggcttatcgcacacaaagcagtcgcccttgccctttcccttgtctttcttcttaaaattggttgtagcctttggtttgacatcaggctagactttcttgttgttgttgttgtgggatgcgtgagggttcttcttttgcaccaaattggcgctagaatttccctcgatatttttgccccagttgtcctttgctctcgccttctcctcaacacccaaagagccaatgagatcagtaacattaaactcttgcctcttgtgttttagagaaatagtaaagtccgaccaagaaggtggcaatttggcaataatgccacccgccacaaacttgtccggcaactcacagttgttgttctcaagttcctttgccagcatctgaatctcatgagcctgttccactacagaacggtcatcgaccatcttgtagtcatagaactgctccatgacatacagctcgctgccggcgtcggaaactctgaacttggcctcaagtgcatcccacatgtccttccctaaaggcatgtgaatgtacacgtccactatattgtcagcgagtacactgatcaatgctccacggaacaggcaatccgaagcctcgaacttagcctcctcctcaggagagagaggcggttcacttcgtttgccccgtgaaacatagaagcattgcatcgctgtcaaccatagtagtgcacgtgctttccatctcttataattagaaccatcaaaagcatgtggtttcagtgttgcagcaaagccaactactgaaaatgacctatcaggtttttggattgttggaaatttggtcataattcggcatattttaatccaaaataacaagataataaacatgatatttacaatgggatttgatccagtgatagtggtgaatgtaatcaacatgagcatgcttaatatagaataagcatcaacaatcacataataacacaatgttgacattgcgatgaacattaacagtaaaacttctaattgaaataatgtaagaaggttataccccaagaatggtcctccgctggagtttgaggcagtattgcctccgttggtattgacgggagcctccgtctccttgtatccagtgttgccgttgtctccagtgttcgacatattggtgaatgtgaagtagatgttgacgaacagtgagtagtcgcgccttgcgctccccaaaaacctgatcgcccgcccgtccgtgcaaacgtcgcagcagcgcgtggtttcggaggcctactctcccaacgcgtgtgcacacactcgtcgggatgggattaccgtagcaacaacaacattggaaaatggatgaaagtgtgtctgactgttctcgcgggagatcaaat

SEQ ID NO: 8565 - DNA, 25943 bp, Oryza sativa
catataacgtaaaagttgcagttttgtgataatttttcacgataatgttgcagcaaattgatagttttgtcactaaagttgcagtctgaaatttactctttaaaatctatacctgcaaaattatttttcgatcgctaataaatattatggcttatagcctaactactttttttttcttttgttgctggttaggcgtctccaaggggtgttcatcacaggccaccagacgtaccgaactcacctgtctgtagttaataagacgacgaacttgccggccagtcgtcaccaccgccaagatcgctggcttgctgaattttagctgatggcgacaagaattaactcaaccactccccattcacatcgagcagagccttgagcagcaaaccagatttaatttgctttactgatcagatgtgtttgtatatgttcaggttcagagacgtttacagctcaatcatggagtgtttggccgtttattatacggctctgaattttcactgtctcaaccacaagcttcaaactgtttcaaagaataacatgtcgaaataaaggatactgatctctctggtcacaaaaaaattgtgcccttttaatgttgcgaagatgttttcgtcactgatccatatcacaccgcattactattaagtttcaaccaaaatacaaattatcgagtagattgctaaaacggattatttgctccatgttttgggaaaaaataaaaaaaaagtcttctgttatattatttagaccacttgtatttaaattaattattgtttatttaccaaaatatttaatttatctccataactaaataaataatctttagtaatagtcagctcaatatttgttttgaattgagcttggtttggagtcaaatcaatatgtatgacctttgtgcatcaaatgtaaatattttaaaaaataatactcgaagtttttttaaaacgttttttttgggaggcaacgatcccattcattctccatgattgcaaccaactacaaaccagtcatgcacgctagcccattcagcccactacatatttgcatagccatttggctgaactccctacttctcaaggcatagctacttccgcattagctcggcttctcaatcctatatgtgtaccgatgtttgcactttgcagctcaatcttggagtgttcggttgtttatacagttttaaatttcaatgtttagatatcagccaaataacaacttgtggaaataaagtgaaactctctctggttataaaaaggcccaatcaatttaatttagacgttggtatggtatttaaaacatattttttcccactattttgtgtcagtattagcaagctttagtaaaatcataacattagtgtaaaagtaggtttcgtatcaaatcaatatcaatatgtgactttcgtatctactaaccattgggcattagcccattcaggcattcagctcagtacatatataatgctttcttgcatatttgactatctaaatcatgtgaatcctggtctaatggtggctaattttatagtggaattttagtaaagaaccaccttgcgataatgtttgcttttacctttttatccaacccaatcgatgcccaatatgcatttgcaccatttgctatccaccaccattctcttgctagtctcctaaaggcctatgccaatgtcaagcaccatgctaaaaaaggtgtctccaactgacttggcaactgtgtggcattgatcatgccttgagagctggacaagcaacaaaagaagcgagataaatgagtgaatagggaaacacatgtggtcattaataggatagaaaggcaagtatgtaaaaccactctccaacaatgaagaattgggtcagggcaaggtcaatagaagagtcagggccataactagaaatcagaggcccccggtgcgaatatacatattgggtcctaaaatttgaaagccatggtggccgatggcgggtagtcataatcatgcacggtgcacactgtcatggctggcggcatatagtcgtaggcacatagaagtcagaaacaaaaaggggcaattgcaaatttaccactgttttgaatcgttattgcaaaactgtcactagataattgaaaaaatgccactggaactgccattcgagtggcatccttgcaaaattgaaaaaaccagtggcaaatttgcaaatgccccaaacaaaaaccagcaagtgtggcggcggttgggagcatgttcatttgtgacgtctgttcgtgcccattgcctagccttatgtagcgttaattgtttgaaaaaaggggtaaatttgtagtggtgatgggaatcagaggagccaagaaggcgagtaagtgcagtgtgcggtgcatgttggtttgatcaaacgaggtaatgagagaatttagcttgttgtttggactttatcatggatgctagaatagcttgttgggctttttcatacttgcaatagtgtttattagattggataactaattagtactagtacttatagatttgggagccctaaattttgaagaccttgaacagatttacgctttacacgaaaaacgtccagggtcttccggctagctccacaaggtgatgaactagacaacctaggttcgaagcctcaccccttctaattatttgatattaggtccttctctaatattcacgtcttttagatttacgctttatacatatggatgtacggccttgagaagagtaagcaactatctttaaagcatacctgttagctgcattgttaccttgcattcttttttctattgagcacgtgtataactagtgactaatcatttctacttattttcttaatctccgttctctaacttatcactaaaggagaggtgattgtactactgtcggttaatgtacatgctcttatttgaattactagtgcatatatctttccatgtttagtttttcatcgagaaataacaatcagttctaagatttgctcttgaaataacttctatttgctataaaattgtctccacttctttcttaaataactttgatttgctacgaagttatcttggattgcttcaattagctcttagagtaaattgattttgctctccaagatccaatatattacatgttactgaacaaaggttacccttgatgtagaaaaacaatcgaaaacacatgggatcacgtggaatggccaagagaaacaaagatatgcatttcttacaaaaatgagtttcacgccacagctgcacatggtaaaaccgaattttacatgcaaagtttgtaatcatgtgctaactatattggtaccactagttcaaactctcaaaatttaaagttcgaccgatttgtttctttatggtggaacccatctatctgagccaaagtcctagatttaatataggccatcgtatttttcaaaacgaatattatgaggtaaaaaaaaagaactatcattgaccgggccagggctcacaatatcaattgtttttttgcgaaaaccgctcgtttttttatgaaatcgccggcgaacggtttgtgaaaacagatcaattattttagcttggcgttgaccgaaagtcattggtttaatcaatttttggacagttttttgggtaaactgggtaagaacccttttttcctaaaaacttaaataaatctaccataaacatgcaatggtgaaactggctagtgccactagtttgtgaaaaaatggtttagatccaatagcaaaatatctcagcacaaatcttagcacgggatccacgggccaaaaagaaatttaacagtcctgagaactgcccacaactagctagaaaaaaaaaagcggccgtaaccttgacttgtgagagcactgagcaaaaaaagagagagagagagagagagatggtgaggagaggactgaggccgtaactttgacttgtgagagcactgagcaaaaaaaaaaaagagatggtgaggagaggactgaaacaaaagaggcgcttttttttttttcaggtcgtgtcgcccgcgtgttctccgctgctggagatggcaagcaagggaagacctctcgcactcgcagtcgctgccaaaatggaagcaagcacacccctctcgctgccactgccactgccactgccaagcaaacagcgcggcgccacagtagcagtagccaccacgcacgcacgcgtcggtgcgtgttccccccccccccccctcccccccgcgacaaattcctcctcgcctttcccctcctcctccctctcctcgccgccgatccgccgccgccgccgcagccggtgagtgatcccctttccttcctctgttgccttaccgaattccgcgccgtgggacgattcgatcgacggatcgatcggtggttgggtgggtactgggtactagggttggggtcagcgccgaggggttgcggattggttggggtacatgtatgttggtggtggtggtacccgtggtttacctcgtgcttggctccggcgcgtggagcggcggcgctgactttcggtgaatcgcgatgccccccgattcggtggggtggtgtggtttgtatggggattttgagtttttttgtttttgttttgggggtttggtttggcgtgaaattggggcgaataggtgtgtgattctcgcggagtagccgctcctgggtaagaaatgggcgagtttttgtggtgatccgtgatcgtgagaatttgttgataaatttgcggtgtgttttactgttgaaaaacccttgctttgagaatgcctagcatttttagcttgtctcagactgtcagacatgatgtctatatggtggtgctattcgcaagcggaagcatttctgatttatgtgtaatcagtttggttactggactagacaatgctgccctcccagttataagttgtaacatactagtgcttaccaacaaccagtatatctctgtgctgctaaatggaaattgagatgacacccaatgttttaaacaaataaaggccagtatagcattctatttccaggaattatttaggcttggctctgcaatgtatttccttccagcctacttggtgcatgaggtcatgaaatatggtcttcaaattgaattatagatgaattgtgatgctgatattccttgtttttcttttcctttttcttcacagggatcttccgtcggatagtatggtattgtgctggacacactgttgactttcgtctctatgattatctctgataccgatcggagcattgcacctcttccttcgatcaatgggcattgtgaaggtagcaagttgtgcgcctacagaagagcgggcttacagctgtggagacgaggacattacacaagaggagaaaatgctgcttcagagatttcctattcatgaatccgatgactatgaacatgaagaggtcaattgtgagcttgcaaagtctggagatcagatctgtagtgtcccttatgggctttatgatttgcctgaattgaatgatattctttctttggagacatggaacttatgtctaacagaagatgatagattccgtctagcagcctatctcccagacatggaccaacatgatttctttgtaacaatgaaggagctgtttagtggcagtgacctgttctttgggagtccagtgaagagcttcttccacagattgaatggtgggttttattctccagaagtttcccaggctagagaattactgatgatctttgaaagacgaagatattatcattttctgaagtcccatcatgatggcatgattttcaagtttgcatccatggacaaggtaggaggacgatgtggggcgagtactggtcttcagggtaaggttaacagttggaatgacagaagacatgaagatcccctcacaggtgttgacataagcggttctcctttcaatagaagtctatcaattgccaatgaggttaaagatgcaacccttccacctttgaagcgaaccaaacgtatggatgggacagtaaccactcattgttcagccaagcgcaagggaatagtctacagagacaaatcaatggaaatgagctcattgaagagtcctgtctttcatgttcctggtgagcttactacatgtattagattgcccaaaggtgtgctgaaaataaagaccgattgtgcttccctcattgatcacaatgaaggaattcatcgtacaccagaaccgatgctagcagaccaactgggaatacaggtctccagcttaccttgcgcttctgcactggatgttcatggttttgcgatgaattcagcttattactaccacataaacacaagcaagagtactttgagaaatctacatgtgcgtccctaccaaagagaaggcacacttgatacttaccctcactcagttgaaagtccgtttggagtgcaaattatggttccagaggagcttaaaaggggttactattctcgaatgccgaattccttccatcagtcaacaaccaaacatagtccggaatattgcaatgaagcaccccacgagaagaaccttttgaagaactttggtcaacaaaatgccgtaattcctgaaagttctcctgatccatttacaaggaatactgattgtcatcaaacaaatggatacatgacgcatggtctgaaaactgctgaaagtatttctgaggtgttgacccttggtacagacaccgctggcccttacaaacacctattggagcagtctgaaacaatgcgttacccagaaggattgaagctgaagactcctgccagccagtcagttacagaagttgaagaaggtcataggtaccctttcacatacaaaaggaggaagctgcagaagaggcttgaccttgttgatcctgtcaagaaatcaactatggtggattcagagcctctgagcgcactggctagcgtggcaaatgtaaaaatcaaaggcaatcaagctttgaagattggcagctgagaacaaggatagctgaacatagaaattggagcatggcttatgaacatctagctaacatagtaaataaaatgttctcttttgttttgggttctggttcgaagtcaggtggagtgcattcattgttaaatttgatagtagacaaaatgacatgaatctctagtgcaaagcattcagattctctgctttctatcatgcacatccctccctgaatacctcgtcttccagatgagccgcagtttacttagatatatacattgtgttaatgtttttcttttaaaatagtgctgttgacttgcaatgtacttcctccgtttcatcatactaaaaagccattttagctttgtaccaagtcaaatattttcaagattgatcatgtttatagaaaaatatagcatcatttaaaaaaaccctatatatatacccatttgaattaggtatatactcaatttcaacaatggtgcccgggcaccatggagcaccaaacaaatttactatatatatatatatataatgatgatttaatgaaactaatttgatattgtagatgttaccatattttcatataaacatgatcaaatttatatatatatatatatatatatatatatatatatatatatatatatatatatatatatatatatattgatgatttaatgaaactaatttgatattgtagatgttaccatattttcatataaacatgatcaaatttaaataggtttgacttaggataagcctaactctgtactaatgaaagttctgcacataaaatgtgtacaattttccactcatacagtagtatagaaaaaccagtagctagtgataaatgtttctttttctccagctttatctgatctcagccatccgatgcgcatccaacggctcacgttaatcacaagctttcaaatattcaaataaagccttctcccctccacgcggcgagaaaaaaaaaaagaagataaaaatggcgccgccgcctcacctcctcccgctcctcctcggccgcctcgtcgtctccggcgacctccgccggagccccgcccacctccgccgcatcgtcccgctcctcccttcccacccccacctcgccgccgccctgtgcgccgtccatttcccgctcttcccctcctcctccgccaccttcctccacaacatcctcatccgcgcctccgcctcctccgcgtccccgcgcctctccttcgccgccttctcctccctcctccggtgcgggctcgtccctgacaggttcaccttgccgcccctcctcggttcggcgggtaagctcccggccttcccgcgcacgggcgcgcaggtgcacgcgcaggccgtccggcgcgggttcttggcggatgtcttcgtcgtcaacgcgctcctcgcgatgtacggcgcgctccgggacgcggcgtcgatgcgggaggtgttcgggtcgtgcgccggggtcgcggacgtggtgtcgtggaacacggtgatcggtggctacgtgaagtgcggggagatggagagtgccaagagggtgttcgacgaaatgccacggaggaatggggtgtcctggagcaccatggtggggggctatgccgcggccggggagctggatgtggcaagggagatgttcgatcggatgccagctattgggaggaatgtcgtgacatggaactccatggtgacaggattcgcgcgccacgggctgctgccgttagcgaggaagatgttcgatgagatgccagtcaggaatctggtgtcatggaatgcaatgctccggggttattcagtgaacagcgacatggatggcgcgagggagttgttcgatgtcatgccagagaaggatgtggtttcctggacatgcatgatttcagggtatgctcaggctggacgctatcaggatacccttgagctgtttcgcgcaatgcagactgagagcaatgtacagccgaatgaggtgaccatggtgagtgtgctttcagcatgcgcaaatttaacagcactggaagaaggaagatgggtccatgccttcatcgacaagcacaaaatggtgctcaacaacgagtacaatcttggtgctgctcttattgacatgtatgccaagtgcgggagaactgacattgctgtcaaaattttcaactccctggaccgaaagaacgtctcggcctggaacgcgctcatcaccaggttggcaatgaacggcaatgctcgggattccgtagacgcattcgaacagatgaagagaacgggtgaaaagccgaacgacataacgtttgtcggtgtgctcacagcttgttcccacggtgggctggtggatgaaggtcgacggtgcttccagagcatggcgtctacctgcggagtgcagccggaggtgaagcactatggttgcatggttgacatgttaggccgagcagggcttcttgaagaggcagaggagttgatccggagcatgccgatggcacccgatgtcatggttttcggcgctctactgggtgcctgtcgaatgcacaagagatttgatgtggctgaaagagttcagagtgagatccatagcctcaatctcaacgcccagcagtctggctgccatgttttgatttctgacatttatgctgctgctggtaaatggttcgatgttctggaggcgaggcaagttgtgcagaggtctggcatcaggaaatggacacgataggtttaagattcttgcagaagcctgatattgactttacgcttttgagcaatggaagtggtggcactggtgggtatattgcttaatgcttacaagttatcggaaatgtggttagaacatcacaactcataagccccagatagcaaaatactatgctcgttatgcttcagagctgattgaaattgccataacgccaaagatggattatgtcacagcatctgtctttacaggccaaaacttaaaattcatcagaatttattcagttggtcttgtttccttgaccatcaatttccttgagcatcaaaacataggcaaaacttatttaaatcatcagaattttttcagcggtcgtgtttccttgacccttatagaagatccaatgacaatatgctatacgtgcataagcgtagacataatcccacttcatggtcttcgagactcgtctgttagcagtgtttgttactctctgtttcatattgtaatttgttttgattttttttctagtcaagctttttaaatttaaccaattttatggaaaaatagtttcattaaatctaacattgaataattgtaatgatatgtttattttgtgttatagatgctactatgttttttctactatgtgatttataatatgatgaagaggaagtataaaatttagctgatgtgaatatgaacgaggaccgagtgttatgttgttttttggtttttgtcaggtacctactagtcctaattgtgtttttgtcaggtaatccggagtgagctgctctgaagaaacagtcgattgtttgctctgaagaaaaagttgattgttattgctaacagaaaacagatatatttaattgttatcgtgagctgaagaaattttcatcaggtgctccaaggataccaaagaaatcagctgcaaggattggacgccaacgggcaatcgccaacaaacaccagagcgagcaaaccaccaacaaagcacagtataaattgccaagggcattcgctgcaaggaactcctcccgttgctgttgatcaatttgatcagcgtgacaagatctcccattcacactacgcaatcatatgtttctgtaactgtaaattgcaaagctggtgctcgaaggtggaattgaggcagaagaatattcgcaaaattaattgatacatctaacttgcagaggaaaaaatagacaactcatgaggacactaatataatactcatatttagcaatataattaacgtacgcagttcgagaacccatagcacaatctagccccatgcattgcaggctaggtaaaggtaaagcaaatcgcacaaaataaaccgaaccgacccaacaacgcgatgttcaaaaggtaaaacagataagctagctccaatgctccatggtgtactttcgctgcgaaggatttgacgaggggaaaaaaaaggaaacccgcttagtcgacctcctccatcttgctctcgccggcgtcgtcctcgagcggcggcatgtcggtgtcggcctccgccgtctcgtcctcgtcgatgctcaggccgagcttgagcatgcggtggatcctgctgccgaaggtgttggggtcgtcgaggctgaagccggaggtgaggagggccgtctcgaagaggagcaagacgaggtccttgacggacttgtcgttcttgtcggcgtcggcgcgcttgcggagctcctccatgatggcgttctccgggttgatctccatcgtcttcttgctcgacatgtacccggccatgctcgagtccctcagcgcctgggccttcatgatcctctccatgttggccgtccagccatactcgccggtgacgaggcagcacggggagtccaccacacggtccgagaccaccaccttctcgaccttgtctccgagcacctccttgatgaccttgcagagaccctcgaatttctccttgagctcctccttccgcttcttctcgtcctcgctctcatcaagcttgagtccctccttggtggcagagacgagcttcttgccctcaaactccttgagctggccaacagcatactcgtcgatggcatcaaccatgtagaggacctcgtaacccttcttcttcagcttctccaagaagggggagttctccacggccttcttgctctcgccggtgatgtagtatatgtcgttctggccttccttcatcctcgtcacgtaatccttgaggctggtcagctcatcgccgctcttggtggagtggtacctcaggagctcggcaatcttgtttctgttggtggagtcctcgtggataccgagcttgaggttcttggagaaggcttcatagaacttgttgtagtcttccttgttctcagcaatctcgaagaagagctcaacgcacttcttgacaaggttcttcctgatgaccttgagaatcttgttctgctgcagcatctcacgggagatgttgaggggaagatcctcggagtcaacaatgcccttgacaaagctcagccactcagggatcagctcctcacagttgtccatgatgaagactcggcggacgtagagcttgatgttgttgagcttcttcctcgtatcaaagaggtcgaatggtgccctcttgggaacaaagagaacagctttgaattccagctgaccctccacagagaagtgcttgacagcaagatgctcctcccagtcgtttgtcagggacttgtagaaagcagcatactcctccttagtgatctcctcaggcttcctcatccagataggcttctgtttgttgaccagggaccactcatgagaaacctccttgatcttcttctttttcttctccttttcttccttctcttcatcaacatcctcaaccttgccctcctcagcatccttcttctcttcctcatcttcatcatcagaaatttccttctcagtggtcttctcagtccatagagagatagggtagctgataaactcagagtgcttcttgatcaggtccttgaggcggcgctcttcaaggtattccaactgcaggaagcatgagcaagttgtcaataacaaatgaacacattagagccaggacaccttatagcacatttcacagttcaacttaggagttcaggtgattctaaaaattcacaacagtagaacagtaatacttgttactaattaattcatagtactccctccgtttcacaatgtaagtcattttaacatttcctatattcatattaatgttaatgaatctagatagagagatatgtctaaactcattaatatcactatgaatatgggaaatgctagaatgacttacattgtgaaacggaggaagtattagacaaccacacgcaatcaaactgacacaaaaccagacccaaagaaaaaaaatgcatacacaatcagtttatgagctcaacaataagcttatagatcctaagtacatgtgtaacatgattactcataacatccaaggcagaaacatactaacataattttcacagcaggagttcgaaatgttaaggcatctatctagattatcacaatgtcaacagtgtgtgaaatatgttcattctgttcaatcaattcaccaaatgcccctacatagagacattttttatgtcttaaacagaccgattaagcacctggctcaagcatgcctatggtgaaaacttgaggcacatcaacatgttctttctaaaagtggctataaaatcaagtaccaacaatattcgtaataatcctacgaggacagaattactagttgatgcatttatcaatagcaagccacattcatgaactataagggcattcagcaatacaagcagcacaaattgaacaagaattcaatgaaattctgttagtacctgatcatccttgaggtagagggtgatcttagtacccctcccaagctgctccccagatgtgtcacgtgtgacagtgaaggacccaccagcctgagactcccacacatactgctcgtcatcgttgtgcttggtggtcacaactactctctcggcaacaaggtaggcagagtagaatccaacaccgaactgaccaatcatggacacatcagcaccagcagccagtgcctccataaactccttagtccctgacctggcaatggtacccaggttgttcacaagatctgacttggtcataccaataccactgtcaatgatcgacagtgtgttggaggccttgtcaggaacaatatggatgaacagctctggctgagcatccagcttgctcttgtccgtcaagctctcgaacctgatcttgtccaacgcctgcagaacacaaaagcataagataagtggccggttttgtatgaaagcagctagcaattccaattcactatccgacaataatttaataatgtttccacaccaaaagttcagctatccccatctattctcacagctcaatcttgacaccaaatgggacatctctaccctgcccaaatttagcaactccaaagatttcaggatttaccacatttttggcaggatagagaaccagaccaatcctcagttcataggggcaattttaacaatgaatcagcagagtaaagcactggttgggtgtttttgttccatagggtcaattttaacaatgaatcagcaaagtaaagcactggttgggtgtttttgtttcatagaggcaattttaacaatgaatcagcaaaataaagcactagtcgggtgtttttgtcttatatatggtcaaaccctcctatcaatttagaatgtgacataactagcaaaataaatgacaaataaatgataactagcaaaataacaaccctctatgtttataggggatatgttttacaacatttaaacatcaacactcaaagcatgtgagacttttcagatgcgactttatcagagcaatcgtaaataatgctacgagattaattagcagaacaacgacagataatgctgcctatgcctgcagttatgtttataacattctaatcagcagcaaaattcaggactcttaacaaaattaaggaccgcatgatccacagattattacactaacaaaattaagtactgcgagcatgatccacagattgatacactgagaaacgtaattaacgtcggaatcgaaacataatcttaaaaaatggggagtgaaacaccacatcgcagatttatgttgggatgatgtctcagtaaccagtaaccagtgctgcagtgcaaactccctcacacacccacacacataacaacacacacgagtcagctcgaaccagattgggtgaacaaaccgatctaccaatcggaccaaaaaaaagcccttctaacgcgcgcgcgtgcagatctgaaccagtaaaccgagggcacttacatcggaggagttggagatgagctcgcggaggaagatctccttgttggagtagaacgtgttgatgatgagcgacagcagctggttgatctccgcctggaaggcgaacgtctccgtctccgaggccatggcgctgcggcggcggcggaggccggaagcttccggaggacgacgacttggaggctagggttagggctttaggagagggagctcgcgtggcgtgtgcgattcgattggagaaagatggggaagaagggggcgatatataagggggagatgggggttctcgaacgttctaccaggggctcgaaccagcgggggagttgggagatggacgacttgacgagtcgtcgggcccacatgtcagtcggttggttatggtttttatattttggaaggttctggaggagtggagaggcttggagtcggtttaaattaagaaaaccatcatctctatggtctagtactgtatgggaatagtgaatactataattcttgtaaggggcaattataaatttaccactgctttaaatcgttattgtaaaactgccactgaaaaattacaaaaatatcactaaaactgtcattcgaatagcatctttgcaaaatagaaaaaatcgcaaattagatgcaagaaggttcaacttaattacaggatgaattttggaaggttcaactgcacatcgcagattagatgcaagaaggttctggaagcgaatgaagacttgtggtctttatctttagggttatgttatttggttaaggttggaagcctttcctcgtaacacgcaaaacaaaacaacctattgacacgattaattaagtatcaattaaaaaacttatatatatatatatatatacatattaatatgatttttaaaacaatatttttataaaacttcatagaaacaaattacgtttgatagtttgagaaatgtgcgtgtgacaaatgagttattgaagttggaatagtattgcaaagaacacggcctaggttcgttggtcagcaaaactaatttggaaccaaacatttagtacaatctagaaactatcaaattggaaattggcaatgccaatgatttggttgcaaaccaaaaccacatgtgcactattcaactactaaaagtattttggtaggacatgttttggcatatcaacaaaataatttagccaattgcaacacacggggacacagacaaccaaacgagatcagaatgcagacgtggtaatatatcaattcaaattcatgaacaaaaacttatatttcaatgtatggacttgcagaattgcacaaacgcaaaaggaaacaaaaaaaggggcaaggaattgtgctttgcttcactgcttggcaattggcaaggcgacggaatcaatcccggggaccataggctgaagggccagaaaagagggcacaagatgtcaagcttgttccgacttccgagaggaacttcgtacaacaaaatggaagtatatacgcctatcatgtacacatggatctatgaggtatatacagcacatactctgcctgttctaaaataagctaatttttatacataaaattaaacatagcatgtgtagattcgtgtgaaaaggttaatttatgagggtgtttagatccagaggtgtaaaactttagcgtgtcatatcggatgttatatagggtgtcgcatgtggtatttggacactaataaaaaactaattacagaatccgttagcaaaccacgagatgaatttattaagcataattaatatgtcattaacaaatgtttactgtagcaccacattatcaaataatggagcaattaggcttaaaagattcgtctcgtaaattagttacaatctatgcaattagttatttttctaagactatgtttaatactttatgtaggtgttcaaatgtttgatgtgatatggtgtaaaatttttgtgtaggatttaaacagggccttattctaaaatggagggagtaaaatggtgaaattttctgttgtactttgttagtgtcatcggtcagctcgggcgttgacctagtaatatgggaactgtggtgtgtaattccttcgaaatgaagctggtcacttcatctctccagtccatggctctgcaagtctcgcaagtcgttagatttgtttggtccttcatctgctttgcattcagattcagtcagcccaaacttactagaatcctgatgatcatcagtgtcaccactttgggatgtgaaaaatggtagtttctgtccaatgtgtggtgaaggagggagtgctgcaagattaatcaagaaaacaagggattacaaagcatggaattaagtatggtttaatgatgtggataggaccgtttggtgtccaaaattttgagggtatcaactaaacatatccagaacaaagatgatacttggggtacaaattaaagtcctcggtaataatatatcttctctggatgtctcccagtttcaacttgaatctgtttgcagtagaagtgccttcctcgctatgctgttctatactactccctccgtcccataatataagattttgagtttttacttgcactgtttgaccactcgtcttatttaaaaaaatttggaattattatttattttttttgacttactttattatccaaagtactttaagcgcaacttttcattttttatatttgcacaaattttttgaataagacgagtggtcaaacagtgtaagcaaaaacttaaaatctcttatattataggacgaagggagtatatgttacccatattactccatcaaaattcacctggtattgcaagttaataatcacagcagtcacaacctacaattgtggaaatcgttatttggtgagcatatgtgacattttgctacaaaggtaatttttcatgcgataaatttaacactgaacatcaaatcatatatttatattcgtaggccacaactaggctgcattatccaataaaagaaacaataacactctcaaccatcaaatactagtatatgagcaaagatgctgtacacatatgaaacttttggaatactacacagaaaccaaatgtgcggcttcattttaagcttatatattttgagtttttacttacaatgcttgaccattcgtcttatttaaatttattttacaaatataaaaaacaaaaagttatgcttaaagtactgtagataataaagtaagtcacaaataaaataaataataattttaaatttttttaataaaacgagtggttaaacattgaaagcaaaaactcaaaatcccttatattatgagatggagggagtacttattagtcaaaatttaaattttcaattttaaatttgaaattgattttaaagtttttttttatcaaagtttatttttagcatttacttttaattcgttaaaaacacgcatataaaagttttattcacaaatgactttttctttgcagatatgccgatgggcacccttatcatcgactcatcgtagtattagaatttattagagaaaacaaattgcggtaaaagaagggtaagatggacggcgtcagctatatttcccaagtctaaaacgtccagccgtcagctattacgcaatcaccaggagacggacggcgtttataaaccttcctccgtgcatagaatcgtcgtcccttccctccgagtgccgtacggccgctgccgccttctggaacattcgcttgcctccgccaaaaaaaaaaaaaaaaaatccctcctcccctctcccctcgagtggggcgcagccgcctcgctcgtcttccttcctcctccaccgccgcgcgtgcgcgagtgcgcagccgccatcgccgtgcgcttctctgcctcccgatctgcggtgcgaccggtgtgatcgcggagcggcggccgacgagaaggatttttttgagggaggggggcgagtggtgcgacgccgctgacctccttcaattccacctgccccaatctcggttgggaatcgaatcgaaaggtattcccatcccctcctgcttggctgagccatacggggctctgattgattcatatttgactcatattaagcatccagttttattctggatttttttttggcgcgtggtgtagtactactggagtagcaacttgtgtcccaaaataaaattgagggtttagccgccccctgctcattagatgcagtggccttatactttcatattgatatagcaagatagggtagtaattttttttcttccctgtcttgttgataacttcttggtaggtgccactatgatcttctgttataacatcatcatactatgaaattagtttgatggcataacgtgtttttttttcttatcaggaataagatggaagagaagagaatagctcggatttcggtcacttggagaggcagacagctcgatgtcgatgcagacccgagctgtacggtgaaggaattcgggcaacttttgcaggatttgactagtgttaacccagagacattgaagcttattgttccgcagtctacaaacaaaggctccaagctgatcacaccgttttccgaccctcattcagttttgacattgaaagaagctgctattagtgatgtaagatgcacaagagttgtacttgctcagcaatatgttgctacgttatggatattataatggagaatggaataatttatattcaatcattgtttgctacaggggaagcctattagaatgatgggtgtttttaatgatgaaatcgaggaagtatcggacaatggcaaaagaacagatctacggataattggatttgaggaggaagaacaacggctgaggcaacgaacatcaggcaggccccaagttccactcaaacttccacagggccaatacatcttctgtgattttcggacacttcacttacctgggattgaggttagttagcctctactccctacgtgctttctgaaatctataagaaacagttcatgtaggcatgtcaatccgccccttccatactccacatatcatttgtctcctcacggattatcataaaccttagcgcgcacattttcctctgaagtctgaactcttgcaatttcctgcttgaattaggatgcaagcagcgcacgaagtgttccatttgaacagtatgcacactataaattgtggattaaatagtttgaaggaattggaccattgtgcagtttgcactggtttctgtccaaaactttgtgaaaagacaacgttaaacaatgtggtgtgctcattttatttatcatagttaacaccttctcatttcatgacatgacttcactataataattataatgaaatcagtatatgtatgaaatgaatgggttcactatgacaattgtaatgaaatcagtatatgattcctgtaacttgctatagattatatatagtacattagatttgaacactagacattattttcatatatacctcattctttcgtaaaaaaaatacatgcatgctagtagaaaaacagatatacctgatttgtatgataacaaataggccaatcacaacatcttgaactatcgagttttgcttacgtgccttttgtttgatgccagttgaatcccccaccttcagaagctctgaaaagaatgcacatgctagcatgtgacccaggcataattgcgatcatgaacaaggtagcaatattttcaagtggtgtttctgttttttatgtttgtgtacattcgttattttacagttatcctgttggccttttcagcatagatggcgagtgggaatcatgactgaaatggcaccagtagggtatgtaggcgtcagtccaaaatgcattctaggcttcaataaggttagtataactgtataagctttttactactgcacatatggatacttgtcacacaacaatttctgaggttatatcatcatgtcttcctcattgttaatacagaacatgggagaggaaatatcccttcgcctacgaactgatgacttgaaaggatttaggaaatatgaaagtatcaagagaactctactccatgaacttgtatgcctccttggttttctgctttcatgaaatggagatttcttatgcagatcttccgtttgtcctctgtaatcatgcctattgtatattaaacttgcacttggtgatttcaggcacacatggtgcactccgagcatgatgcaaatttttttgctcttaataagcaggtgattttttttcctagacaatcctttcatgattggctactgtctctttatgtttttgagttaatctgttctttaatacaatgtcaatttcagttgaatgatgaagcagcttccttggactggaccaagtcaagaggtcatgtgctgagtggtcgcaaaatcttcgattcctatgaagacgaatttgttctggagccagacagtgttgttgttggccacaaacttggaggaggatccagttcactggcaagtgctcgtgtgttgtctgggtctgctgcttataagcgttttttgaatgcatcagcggatttagagagttctaaagacagcgttactatacctggaaatgaaattcttgtgcctaacacaaaatttgagcctgatccagatgatgttggtcaagatttttctcaggacaacactaaggtggagccagacccagatgataatgatgacatgaacgtggatgtagggactggggcatcttggtcctcagtttctagatcatttacagaacaagataccatcagtcactcagagcctgaccctgatgatattcaccagcaaagcactgctggttgcctagaacctgaccctgatgattcctcaaatgttgatattcttagccaggagttgacgattgatgggaagcagaatggagaacctgatcctgacgataatggtactagcaaatttattcccgaacctgtaaacaagatggaagtagagactgaattgggaagtaacttcgcagttcagaattctgaacctgatcctgatgattcctcaaatgctattctgaataagaagctgggaactgacaggtctgatgaaactacatgcgaagctgttgtagaagaatgtgtaaacaagatggaagtggagactgaacagagcagaaactcgacaatgtcaaaatctgagcctgatcctgatgatcatgctgctaattcaaacatcagtgagctccagaggatcgaagaaccagtggcagccctctgtgcacgccttcagaaggccattgaaatgcttcgctcacaagcaacacctacagaggcaacttctgctcttcaaacactctttaagatcatcaagaatgtgatagagcacccacatgatatcaagtacaggagactgcgtaaggtatgcttggctgttcttatgctcttttattaggttcaattggtccactaaaaaaattcttacttactaatcctcatttttcaaatatgcagtccaatccacagttccaaaggagtgtggcgaactacaaaggtatctatttgctttatagactcccctctttttttttcttcaggtcttcaaaaatcaactgtaactaacttcctcatttttttcgcctccctgaaaacagctgcaatggaggtccttgaactgattggtttctgtgaggatgtcgtctcggatgagattggtcgtgcagagacttacttggtattgaaaaggaacgatcctggcttgctgtggcttgcaaaggcctctcttgaagtttccatggcctgaattgtttcaccaagcaatctcctattgcttctgtatacctgtaaatcattttcattactgttgtggggatgctcatatgctgctcttaggcaaatgatgtagtatggtcttcctacacgatgattgtttgtatatggaaacaccaaaatggtctatactgtctgtcaacacacttcatgatttctcatcaaatatacaaactatagataaattacctggcaaaatggacacatcttcccttttgtgtggactctgatagaaattgattccagatgctcacaaatgccagccaaccgtatccacgaataaagtctcgactagacggtgtattccattatcatcacaaagatgttaattttggaactgaagtatataaaaccaaatttaatcaccaaaggtctaatgtttgggaactgatttttttttaaaaaatcaaatcttaaatctttgccctttttgttctgtattgggcctttccaacctcgatcccaacaaattccgggctgtaaattcggtgggcttggtgtctaacaacagcagaaggcccacatgcgtcccatcgcaatatcccatcggccgctcgctttcgacgcgtagcggcagtaacacacactctctcccttccgatcgtcgccggcggccatcggcggcgctagggttcatcgggttacgcaggacaaactgcgtaggcgaggcgcgggggaatctcgcgatggaggcggccgtcgcttccaccggctccggcctgcgctgctcgcccaatccgatgcctaagcagcagcacgagcggcgaagtgctcgggtgggcttcgtctcccagccgcgacctcgcgctgtccgctgcgagcggtcgccccatccggatgctcgagcctacgcggcggtggcggtgggggtggtggcgaaggggcgtgaggttgggggcgtcggggtggagagaaggaggctcgcggtgttcgtttccggtgggggatccaacttccgggcgatccacgacgccgctctgggtggggaggtgaatggtgatgtggttgcgttggttaccgataaaccaggtgacgatgacgacgatgctttgcttccttgagctctttgggtggcgatgtgggtggaattgttgggatttattggggatttttgatgtggcttgcaggctgtggaggagcggagcatgcgaggggtaatgggataccggtggttgtgttcccgaagtcgaagtctgctccagagggggtttctattgatgagttgttgaatgctctgaggttgggttggttgctttgatctcaccttcaggctttgacattcgatgttctagctttagtagttcatctgttaggttttagataagtggatttgtagaaaaaaatggtcgatatgagatttttcacacttgcctttagtcttgtttgcaaaatgcatacatgatacattgctgtgtgctgataaaagttttctaatccatttatctgtcttatgtgtgcgagtagcgtttaaatgattttaaacgaagatgaattggtaactatttaaatgattttagtgtttacttattgaatgtgtgccactaccttgttttgccagatgaactttgatatcagttttatgctctgggttgacgtttagtccggaacctgttggagtgtgttcttcatcagttgtacagtgtgcccacacagtcagtcagattagcttccattttgttattgcctagctgatatactgtaatgtaccactgttgattttttcacgaatagccactgcatgttttacggtgtttgtagttcccacttcacttatatcctcttctacaagactggcttgcctactgcggatatttgttttggtcacttgcaataggtctcaagattctcaatctatccttaatttcttatgtgaaacagggaactcagggtagacttcattctacttgctggttacctgaaacttatacctgttgagctagttcaggaatatccaaaatccattttgaatattcacccttcactactcccagcatttggaggcaaaggttattatggtttgaaggtgcataaagcagtcatcgcatcaggggccaggtacttcacaatctctctatcacccatcacaagcaactgctgtgcagtttgcatatctactcaatgctatttccatggaaagcaatatcttggcaatcaatttgagctgatacctcacattgtagaagaaaattaaatcttgattattaacttaattggagaatgatctttgtttgtactctaactgttaagtgtcaactatacacaggtattcgggtccaactgtgcactttgtggatgagcactatgacacaggaaggactctagcccaaagggttgtacctgtgctagccaatgatactccagagcaattggctgcaagagtccttcatgaggtaacatatcttatgctccgctaagatttctttgatgatacatggctatgacatattcacttagctgcaactgaaattgatgatacacgttcttttgctcatttattaaccttatttttcaggaacatcaggtttatgttgaggcagttgctgccctatgtgatgaccgaattgtgtggagagaagatggtgttccacttattagaagtcatacaaaccctgacgagtacacttaactcatagtactacctcaaggattgctgcgcagcatgcacgtaatgaggcttctagaatgcctgcattgttttttcccaaggcatgaaggtcactcgtactaattgagataaataacttgtctggtgctgttactgaaacaaaatatcttgtgccgttcaactcaccgcttgttgtgtgactttgctccaacaatgacatgcgcataggccgatacttagaaacctcagtgtttgctggtgtgacttgcggaagcatactggttgctgcatgcaccaagttttttttttttttgtgtgtgtgacagagcggggtggggtgggggggagggggtccattgtaccctttagtcttggaattgttgtaatcggctgaagtcaagtcgatcaaagagggagtaaaaactggtcagatcacacaggttttcaatgtgtaatctgattaccatgcttcccatatgttccatccttgtttggtctgaaggtgttaatatttaacccaactgaagttttctttgagattttaaaagttctcttgcaaatttcagtatgcgagagggatagaagaaggggatggtgcaaatgacagccattcttagagaaccctctccgacagaaaggttcctgccaactcttcctccattttgtttttaggtactacatttttgtattgagtttgggttagatgattcttgaagcaattaaggttgtttcttgtgttgagggctgcaggaat

SEQ ID NO: 8566 - DNA, 57258 bp, Oryza sativa
ggactctcatttccttttctaattttggattttattttatttttatttctaattttgattaatcggggtatgggggttcttatatggaaacttctttcaatattgcttgtttttaattccgaatttcaactatttttaaattgtattcctacttggactctcccttccttttctaattttggatttattttatttttattttgaattttgattaatctcgtattgggttcttacatggaaatatctttcaatattgcttatttttaattccaaatttcatctatttttaaattgtatttctacttggactctctttttttcctaattttagattttattttatttttatttcgaattttgattaatctcgtattgggttcttatatggaaacttcttttaatattgcttatttttaattccgaatttcagctacttttagattgtatttctacttggactctccttttcttttttttctttttctctgattaatgagggaatttctaacccccacagcgaacgtggtgcctccttttaaagttgttttaatcatataatagatagattcagctatttctaaattgtatttctatatggactctgccttttctttttctccgattaatgtgagaatttctagaccatgagagcgaaggtggaggcttctttttctattcctttaataatataatagatacgtgtactcctatactgctaaattaaaacgatgtgctaatgatatttagtactactcacgtagaacattctggaaagtcaggaaagtatcccgtgctctgtaaagttactttagttaaaggatgtgaacgggggtgccagcagttgataattagcgcttagcggccgtgttgcacatgtaaaaagggattagtaatatctgatatgatctgagccccctggtgaacttgtgcatgggtgcagaagttctgcgcatacagcccattggtggctttattgcaaggcagggttgttgaggatttgcataaataatagattgaacccaagctaggcgttctgaaggaagtagatttcatgataaaaactcttcatgtttcttagcagaaggtaccaaataattcaaaggtgcaataatgcgcattggaggatcaattaagctaaacgaacaaaatttagaatacacttttttttaataatttacgcttatatatggggaggaattgtataaatatacgtgtgtcatagatcgatcacgcgggtgcgctcacaaatccgcaccgcggtgtgagcgtctccacttcaagtgtatatttctactattattttccatgcatgtatataaacatgaattattaaaaaaagtatattctaaaaaaataaactgcactactataattaggagtataaagaaagaaaaaatgtgatcatattgcacgcccatatatttctgagtcccttttttccgtgtaaaagatcctccattttgatgtccgcttgtagtgtaactgtgtaagccatattctgaactagaggtagtataattagagcagtaaacatgccaagaaactaggcgtcaaaaatgaagaaatgcaatatacagtgccgtctgcaatccggactgcatggggtctaacaaagactattgtcttcatcgaagcccctgttgagctgagctgtggtgctgtttctacaggaagaaatgcataacggaatgacggtcacagggggacacagaggactagaggagcttcctagaaatgtaactgtaaatgcagtagaacttcttaagaattcagtaaatcatcgtcatcggcgtgtgcccaatgcaagaaataattccttgtcgtctgccttctgtccacactccatccgtcgatgcctgatgatgtagagcattcgagccaccgaataaatggcttaatctctgataaattaatcagcatggatgctaactagtcatcagtgggtatgatctacaatgcgatgcaatgatgggcactaataccccacaaattaagccgagtcttttcagtactttttttgccatagtggaattactctaccagagcatcaccggccgataatgaattgaagttgccagaattccatgggaaacgcggtgctaaggactacagagtttgaagagaaacttaaccatcgcaatcttccaccgaactgcttactcatattcgatcatcgatatgttttcctgtttgctgatcgatcagaacttcagaagaccacattatatccgaagcttctgaatctgcaagggatgagtagccaaacccgacatggccatgctcacagctccatgaaaactacatctgctcgaatctactaactcatgtcgcttcagcaagcaactagatcagagaaagagatggttccgatcatgacatgtacggtggatgcaacctagctcgtcaaatgtacgcccaccgatcgagttgccggttatgtagcacgatcgatcgacgcgagctatcaatcaattcaaccgggcacatgctctgggccacctgcagagtgtaagattgtgcctgaacttattctaaactgctgttcttgatcaggcctcgacatgagcctcgccgtgttgctcgatctcgcatggcccctctgacggagctagggtccagagttttgagttatttccaagaggaaaaatccatggcgaagtgtgggggttcagaatattagtgtagcttagtacgcagcaatgggatgatgacaagcgccggaggagggagaggggtgctccatgatttcattctgcagcttagtagttgcttgctttatcgagattgatagaggcacgtggcagaataagcctatttgctttgggatttccgtcttttgaagctgattagctacgaattgtgcatgtattatcatcatcctgacatcctttgctacgctacgcatgattaccgatcacatcttcggtacttgatcaggaatatatgtaacagatattttcacgcgagtagcacaagctggttgagaagggatttgaaaattccaggatagttcagccattcttgacagaatcacagaatcacgctttgtatcgtgtactgtatagctgaagaatgaggacccgacccacatgtgagcagcttcgactgactcttttgccatgtctgattcagtgaactttggggcagtccacatccaatagatttggtcgaggctctggcggttctggactacattgcgtccaattcagactctcttttttttttttcgacatggtccaattaagacttctgcgtacataaaagctgattaaagaaaaacttgtatcaactttttaagagaaagcccatagcagttaaaaagcccgttgaacccaacacctaagcagcccatatgctcacaccaaggccttaaaacaatagtcccatattacaaagctgggtataagttcactttcactccctaaaatataggtttaatgtgtttcttatccctcaaccgtaataccatatatcttgaccctaactattaaaactagtataatttgactctctcaacaatattaacggcaattttcgatgaccaagacacccacatggcaacccaattatcaaatacacttttaaaagagtagggcccacatgtcatcccaacactctatcccttctctacccactctctctccccatatcgtcttctcagcagtagcaatgcgttagcggggaggcggggcattggcaatagagcggcggtgacggaggaactccagggaggtgtggcatggtgcgccggctaagggcgaagggagtcccctttgccacctccaacttcccattttccctcctctcttgccctcccgactcatgcgttcctaggcagtggccgacccatgcatagctctaggcggtggcggtgagtcgagacctggagccacctgggagtcaggaggtgtgacaccacgtggtggccatgagcgcagcttggcaagcacaccctgaacgccctgggagccaaatcctggatgatgacgacgcccaggagagcctcttcatcgagcatgtcgcggcggcgtgcgtgggagcatgagatggcgccacggggagagcccgatcggtgctcattgcaatcgtccctctctgacgtcatcgctaaggagaggagacaaaagtaccttccccacggcaaaagctggtgtgaaagggagcctacgtgttgcatgccagggtgggagagagaagaggagcgctcactgccagccgccgctgctcccgttcttcgtcccgccgttgatccttctcgtcgtcccgtcactgctcccgcttgtagtcccaccgcgaccgccgccgctgtggagaagagggacaagaggagacagccatgggaggaagggccaaagggggaagagagagagagagagaagggggaaagagaggaatggggaagaacggaaggggagtgagaatgatatgcgggtctcacatgctgactcagttggatagaccaagctaattagccacatcaatgaaagccaccgtcaatactgtcgagagaatcaaattgtacctgttttaatagttggagggagatgaatcatattagacatatattgaaggagttgaactggacttattcccaaagctggccaaccacatagtcctacgcaactaatgggcttaccgggccatcaattttatcaccctaaccatccccattttgcaatgtaaaaacgcaatgtcatatgctgtgctaggaatgaggaatctatccatcaataccttccactccgtattctatcccaataagtcgctctgataaattaagttcccacttcaaaaagatataacaattaattaaatggatcttattgtcatgacgatcgatcatactaagaatatatgttaattaaaacatgcctttggaaataccaatgactctttagtttttagctttggtttcccttaaaactaaataaagtcagtgttgtggataatgaaatacagttgtcggactgagaggatacaaacaatcaatggaataccgattaatcataattatatggaaatttggtcttgacagatatatggtttcccatttacttcacttgttaattgatttacatattaaataaattatataaataaattattaaatgatttttaaagttctaaaagaaaatcagggcgtgacacccatttatctacactactattgatgcaaaaaaaacacactggcctaggagatctgcttagctccagtgcatgtccaagattttaatgagatgcgggcgtgccagtcagtttgatcatgcagctgacaagatatgtaaacagcagatcggctgacaagccaatggagtaatatcagccgatagccgatattagtcgatgctgattctagccgatgtcgatagggttttaagcaatcagctatatgttcaatgtagacaatgatataaagacaatcgtctgatgataataagatataaaaataatataatccaatagaaatcaatcggctaataataatatgataggataagtactgatccgatggttaaagcatatacatcggctaaaagtccgatgccataaaatccaatcgatttagataaacagtgagacctttgttgcaatcggctaaatccaacttgtatgtaatctttgtaagccgatgcaacgtccagataacttatcggctagtaccgcgataaaacactaggtcggacctaaccgatgcagcatgagattatatatgataatctaatacttgatgagccgatagatctgtctaatgtgatggatataacaagtctatttataacagcattgtgattgtagagatatatcggctaagacagaagatcagacataaccaagacagtcccaactaaactgatgcttttctaaacacaatgcaattagagatagaattgagatataaggtaggcaaatatatcaaccaaactagagtgatccaagagatcgaagcgatacagctttgaacaacaccaatgtagctgatagattcaccagggccgatggaacgtaagacttaccccttcgtcggagatcgaactgaatcgatgcaggcccgcgtcaagtgccaaattccgccggttgataagtaaaacctcagaaaagaaggtagcgatgcgccgagagtagtattgatcgagagatcaattacaataaccccgggtgtatatatgtatacccatgggtagatactaatccttgtaggataagaaagaaactttcctaaagataaaaggaaaacataaagtccttatcgaacactaaacatacttccctaaagataaaaggaaactaatagactattcttaattaatagataaattgacatgccgcatcctccttgaactcggtcacttctagataaacttcatttagtagattaattttcataaccgaatctactaagaatccgactattggcgacttgataattcccatcggccgattccatggctctgaagtcgatactgactctaggccgatgatgactttggagcttaccaaatttcactattaacaactactacataaagtgtttttacattctcggccaaaacctattttcgcagtcgaatggcagcccgccttcccacaagtgtctacgaaaatagagattatcgtaggtccatccagccgcatgggtgaatcgattatccaacatgaccggttaagacggccaactgcgataatgttttttgggtgaaaaaataaaatcaaaatatccccaaatcccttctcctctcacaaaccctagctctagatccagatccaaaagttcatcacgacaacaacagaatccattaatccattacttgaaattgaaattgaaacagaaccaaaaaccaaatgcgaacaaacataaacttcatccacatccacaaacatgaactccatccacaaacaaacataaaacaaatgaagatctggccacctccaccgtcttcttcgccgccggatccggccgacgccaccaccatcgtgcggatgcgccacctccactgccatcgccgccaccgagacaggctgaagagagaggcacgatgcgaccctcttcactactccccgcccctcccaaggtcaccgcactagatctgttgatggcaacggggtgcctgatcttccgtcaagtagagaaaactatcaatttggtggaaacttgacacattatcgtgcttctgatcaacactatccgaaccctataattgcagcaccacgtcttctctggttatcaaccatgtcgaaaccgattgaccttgttgctgcaaattgaaaacataagcaagaacaagaaaggttgcaacacaaatgcagatgattgattaataactcgaagttggggttccacaaatcaatgaacgacgaaactggaatggtataaataatctaagtaaacccaaccctaacttgatagtggctacaatatatataggttctaaggtcgaccaaggaggcaaggacacctggatgcatccttatttgattccaacacgatacacggcccaacagcccaaaagacggtgatgcaacacccgtacatattctagacgccacgtgtttcaacaattccatttgactttgaaggaatgatgtgagaccaggtccattggaaaggcggtcttgttacctttccatacataggtagaacgtcgaagatggagtccgaatgtgacttgtgcgacattttttgcacagactgctcagggagcccgaggtagactcgaacatggtatgatttgggcctccatattgacttgaatgcccttgatgatcttgtccatcttctagcttctctccttgttcttctccatagttcctaatcataataaaattattaggtaacaatctttcctaaaaatcacatgaagaagtacttaggaacaagctcacctataaatgcaattgtcgggtgtgagctctagtgattggaccttgtacgaaaacatgagaagtattttgcgtatccaaaggagtaatgtcctcatcatccatcctcatgtggctgcgctcaacctccctgccgcctcctctttgccatgccatcgccggatccacccctctcaaggccagtcagcggtgggtctacaagagaggcaaagaaatcgtcgtcgatccgttgcctccatgctcagtcaccatcggagcggagggggaaaggtgatgggagagcaggagaaggaaggctgaccttcgccgccctctgccattgcacgctgagagagagagagagagagagagagagagagaggacgggatagctagagagagggaggtggagagagggtgtcagtggctcggtgcgggtcattgcacaataagaggtccacttgcgataatacattaccgcagactggccttgaaccgccccccaggggagcgattttttgcatgcggggtcagttatggtccatttatagcctgggggaggcctcgtatggaaaaatcaaatctgtagttgtgctaatacccgattaatttcaaggctctttttatccagcaaattgattccctgatcctttccataaagaaaatcgttttccattaccttatgatgaaaagaatccattttgatcatatttgttgctacctgctacgagtacatcaatagtacaatcatcaactacaaatgccacacatataaagttactcgctgactagttggcatccatgaagaaataaaatctgcacaaacattgaaactttttcaaattggacacccatgaatgaatgtatgattatggtgaccaaatactccaagtgacctttacaacaaatgagcttgttcatctcagtttggtcctcacttctcagctgagaatcccgtttatgtacctacacaagattagcacaattgcataaactagaagacaatcctctttaataaatattgacttcttccttatttgtggttccaaatgattgttagcctatgtggtgaaagctttctagctgaaattgtttaatcttgtacacgttttggcccttctaaaaggcttccgtgtactaagggcctgtttggcacagctccagctccagcttttttggagctaaagcccagccaaatagtttctgctccacctaaaatgggagcggagctaggtgaagcgctctcatagaatgaactagagaggtgtagttgggtttaggcagctccacaactccactccatactcaactcctgaagctaaattttgggagttggagctctacaaaacaggccctaagaaagcttgtgtaaaacgttatgttgtgtaacactgattacctagggttaatggtagttagtaagttaaagatgtcacggctcaagctgctactgtactaatcatttgtggtaagtagttaatcatatacgtttaagcattctccttggaaagtacaaggagcaaatgaagtaattggatgaagtaatcaggaggcgtgccattacggcgccccaacgtctagttttcttatatacttatcaatcagtctttgaacaaccgctcccatttggatatgactcatgaggaccaattagctccattggtcattcttcatccaatggctatggttcctttatctctattttgtctttttggtatcagatggctgccgctcaattgcttacatggatgaacctagctagtacgaattggtgttggcgtttcacttagagagaatgggacaatcgacatcaaaatgccaaaaatttaaggataaacccgttactttagagcatatatatgatgtattatcccatagatagtagttatcatgcaccatttatcatttgttttttcttcggtacctcgactaattaccggttattctgctagatatgtaacggcattgaatatatatccctatttagacatgtcggttttagtatgcagtttcactaatacgacaaatctttgtcgtatgtgaaatcaaaacgccagatttctaaaagcttaaatccgcgggtagttaacattcagtatttttatagtttaattcttgatacttctgaagataacaaattctaaatttgtgatgacaataagattaacctgtttaaatactttggtgaacattggccggactcttgaaacagccgtccatcctattgatgcattacagcattgcttatggtatcttgatcagtactactggattaaatgctcaaggactgtagccaaatcaaccatggtggtagacacacactcaacgttcatattcatgcctggcatgggatgtacactagagtgctttgcatggcatgcagatacagccatatacctttgctcaatgcctatcctactggcagctcattgccactactgatatgaattttatattgacaacacccttttgtctgccagctcacctcttcaaacgttgcatgcacttggtgtacacaacctcctgggctatacggacagcttaaaagagacctggaaggttataatctagctctatttgtgaccattggatcacttcacagatgaacggctgatgcattccctcttctcctatataaagagaggactcaggtctccatcacactattctatccccttattgactttctctcaatcgacctcattctgtctttcctagaaaatcctccacccacaatcaaaaatctatgcttccaacctcaaagaacaagttgatggcggctgcaggtaactccttcctcaaccaagatccgacgatgatgggatctgggatgccgcatatgtactttgcaagctctagccatggcaccggtgcccactaccaaagtcctggtggtgctcccatcaccatggcagtcccggacatggggtttcttgttgcagggataggcatagctccatctagctttgtgatgccagagggggccctagcagctagctatagcgccatggctaccgttccagtaggggttgttgttcctcaacagcagtcgtcacgatttgggggcaacaatggtaaccctgggtcgttcaaaggagcatggacaaggcaagaagatgagtaagtaatagatcaatcgacttctagtgagattttatttttctcactaacaagattttttatatctatgtgttaacttgttttcagagttctcaaacaaatggtgatactccatggagatcgtaagtgggcaacgattgcaaagagcctcccaggtcggatcgggaagcagtgtcgcgaaagatggaccaatcatttgcgcccagacatcaaggttttactcttaacttcttgattcctatattattatgtagatctaagggggtttcttcatccatgtgattttgaggggtgatttctttttagatttacattaaaatcatgctaagcagtattctagcatagggattatcgaaataattcattttgttgcggttgttgtgtatgctaatcttaatgttctaggcaccgagtaatccaaagcctccgttttatatgatgtttttaggactagaaaatcagtagatcttgggctacaagatcaaagattcagactcatcatgtccctgcaggaaaaaaaaacaaaggcaaatctgtccaaaattgtacctacttcaattaatgcgtattacattttataaggttaaatctcttcttgatttataactacggagtaaacaacaacagtgttatacaacaccctgcatgaatatggtagccgttaatgatcatatatagatatatttttctatccttaataaatgtactgcttagatttaaattattccaactatctaccgatcttagaaggttcgagggcatattttcttgtgttgtgtcgccgattgcgtggatgaaattagtattcaaaaactgtacaatttatactgcagaaggacgtctggactgaggaggacgacaggatgctgatcgaagcacacaagacttatgggaaccgttggtcagtaatcgcaagatgcctccctggccggtcggagaatgctgtcaagaaccattggaacgcgactaagcggagcctgaagtcgaagcgtcggatgaagaagaagagcgtgcaagtggtgaattcaccgccggggcagctctccccccttgaagagtacatccgcagccagtacccgtcggccgttgagaccacaccgccgccaccggccgtgcctgcaccgccttccgacgtcattgtgcacggtgccggatcggtcagcgcaggtccaaccgttgccacacaggagcccaccggcaccaacccatcggaaatggggatctaccttggcctgggtaacccggctggaccgaccacccagcagctagcggcgatgaacctgaacatgtcactggcgccggacctcaacgcctacaacgatcagcgagaggggtactacctcccgttcgtcccgcagggcaacctgcactatgggatgcatgtgccggcaccgccggtgcagcagcagcagcagcaagggattagcgttgatcagggcctgcattcttcttgcctgagcctgtaccacccgttcccgggaacccacccggttagcctggatttcggttgccaatccagcaaccatgccaacgcaggtggctactacagtgaagctggcccaagcagcggcagtggcagcggcgaccctgacgacgtcgacgtcatccagatggcctccaggcagttcctgatgccgtccgaggctgaggtcactctcgacctgaccaggttcaagtgaggttcgcagtgccagtgccaatgccatatcaccgctcggttaataaatttatcttttgttttagcagctcctgttacctttctccaagtacaatgcatacctgactgtatgactgcagtgcgcgtttaagcttttcttgtatttctgtttggtacattcggtgatcattcgagctttgcattgtccatgtggtgtactggtgtgggaactttaacttgttgtactagtaccttttatgcatggatcaatgtgtggatttcatagttttccccctaaaattagtactcctattcctcgaaaagatgcttttaattttgtagtttactactgttgaggtattggagcgtggaaagtggtagcacctggtacgtctactccatgtactacagtctttgcttgcttccgcggatggtgcgcagctatctgggctttaaatgttggctcgcagacaaaaagagcgcaagagtttgacgtgcagcaaagctgttcagttcctctccccgaaccactcaaacggctgcctgcgcgcgtgatgcgccagccaaggatgcatgcattgcatgcagctagctgcctcggcgtacttcactgctggaagtagcccgggaataaaggcgaataattgtagtaccttaattaactattattactactctgctactggagttaagttgtaacatttgtcgtattaacttcaagtgccaaatgtgtcattcagcatctttcacaccaatacaccatggtagtaaccagtaggcagtagccagccactccatagtccatgacaccgtctgattccgaactctgactgatatgacagatttttcctgagttcagtgcaatgtcctatgtgggaggcccaaaccacgtggggacggcccaatccttgccggaaagttggtttcacgggaaacgggcctcctgaatcggccctaaatgtatcttaactgggccgaagcccgatcctttagatcagatgcttcaatttcgaaacaagttcattctagatacctcaatttgtcgccaaatatgatccttagtcttgaaaaccggatacaacacatccttcaacttatcaaaccgtgcaatcgaggtccctcgatagtatttatctccggttttgactgacgtggtgcctatgtggatcgtttgaccaggtcttcgtccgacgtgcgctggcgtggcgcttacgtggcaatgtgatccaaatataataataaaaccatggggcccacatgtcagtttcacacaaaataataaaatatagtggatcccatgtgaccccacatatcatctctatcctctctgtttctccctacttatctgtttctcccttcttcggccggcagagcaggggcggtggtgccgttgtggtcggagcaagccggcggcaagaaggccccctctccctccttgcccaacgatgacgactacgagagccgcgcaccgccacctcatcaggagatgacgaggatggagatgagatagcggagagggaggatgcggggaggccgacgagtgtggcggagaggcctcccggcgctcaccgccaagctcaaggccgtcggcgccgccgtcgcgctcgagtaatcccgagcagaagaaggggttcgcccttttttttggttcctattcattatccttagatcgaagatgctacgcttgtggatgccttgatttgtttggattgaaattagatgcaattggggcaactgagctgggatgaaggtcttgattgcattgttgtagcttgcctagttactgatttatcatgttgcctagttaccgccttctgcagcagcgccgaggctggacagcatgcatccgcgcgccatgctaagcgccggcggcaagagcgggtttctcgtggcggccatcggagagaagggcgatgatcgacaggaaggagctaggcgacctcgtgtcccctcccgacatccttcctccctcctcgagctccttggcctaccagcgagcgcgcgtaagagagagatgtcttgtggccgctcttctctatctggggcccattcccagcgtaagggagacgaagagaggggagaggaggaagaagatgaggggtgagtagactagcatgtggggtccatgtggtccccatcattttttattagtttgtgtgtgaaactggcatgtgagtcccattggttttattattttttcggatcaaactgccacgtaagtgtcacgtcaacgccactttagatgaagaccgagtcaaactagccacgtcagccaaaaccgctgtaaaccaccgagggatctcatttgcaccggttttgatagttgaggatctgttatatctggttttctggttgaaggatgaaaatcggattcattgacaagttaagggacttcagatgaacttattccttcaatttcgtcggcatcgtgagtcatgatgttgctgttggacatgctggcatgtaggcccaataaattaggccttaccgtcagaaatggcccatatgcccttttgatctcctttccttcgtactaggcctttttggttcatcaaagatggcagggagatttctaaaagtaatactatatgacagagggatgaaaggtgcttcgttctacacacgtagatacgtttaaggttggcgacgacgcttgcggagagtttttgggagtaccttgaaatgaatgggcgcatgttgatggtgtgtttgcaagtgtgccttttatgcagtaattgagaaaagaaaaggttataatcctttgaatgttgatatagtgttttgctttttcttttttttttacgaccactacatgaatagacaactcatgttgtatttgtatgcccatttgcatgctgatggtgttcatctccctttccggctagtgcaatccgaggaattatacccagctgcgcagatacaatggatttgcgtgcaatcgcccactggtttagccatttgggtcgtcctaccgaggaactcagactgcctctgactgggaggcatgtgctggtgacgcggtctcgacgaatacatgttgcccagtgcacctgccgggatgatctggacaaaatggtggtctagctagttcatatctagttggacttggaccggttctttgaacgtaaggaacggcgaaattgtgtctaacacgtctagattctagaagcagcctacttaatttgaaccttccttaacccttcctgtagtagttggcatgttagtcagttagataagctgtaaaaatgcggttgtatagcttcagtacaatgatctttggctgaatgctgtttttttcctctatggtctaccttatcggttttgtgatgtccggattagtcgctggaatttcttcctttttttttctctgttgatgagggggtaattgattgttcttccaaatctgtcatgtgcaagtattacataaacagctcggtcgttacttttagttgcatactctaactcatgtccatatataccaagtccgctcaaatcttctattaggacatggtcagcttaagtctcaaaagatggcctgagccacatcctcttgatttgattcatcaccaggattacatttatagagcattgctgtaactaggtatataaacatatataaaaaatactactatctgattaggaaataatttttcctttgaaacaattcgtagtacatcaaacattatcaatatcggacacataatccattgaaacatatttacagagcattatatacatcatcagtactctaattgaaatatatgatcctagatcattttcccgttaccatctagtaatcaaatctaaaccaaaatgtctcccaataaaacatttactcgaactgaaagatgaacgcgaccactaccctacagaaataaatcataaatgtattaaatgtatcatcaaccttgaaagactgcaaaattcagggtccggcggcatccatccgccactatttccgccgctcagcttcgcctggacgaagcagagtcaccgtcaccggccatccgccgtacccagtagtcggccaagaacgtcttggcggcgtcgaggctggggaagtagggcggctcgaggaacatctgcgccagggggtccatctcctccgccggcgagaacagcgcgcggttggtcgacgactccgcggtgcccatcaccgccgccacgagctgccggtacgcgaagaagaacctcctcaccgccgcctccacggcctggaacgcctgcagcagctccaccttgccggcctcctcgccctcgccgcgccgccggctgtggaacagcctcatggctgcctcctgcaccctcggcccgccgttggggtccacctcgacgccaagcacacatggcacacgcttcttgaggtccctcgtggcgttagcgacgtgcagcagcgccctggagcggaagcaggaggacgcgtcggagcccggtgccgcccgtattgcgagctggctcttgagccgcaggaagtcgtccgggtccatcagcaggtgcaggtcctcgacgtcggcgagcagcttccagacgcgttccaggatccagcagtcgctcgccgcggcctcccagtttcttgcttcgatccggttgtttaggcgggtgagaagctgtgaggccgcgcacagccaggactcgagtatctggtggatagtgaacagcgcctcgttctccttgttgcggtagccggtcttgggctccggcgcgatcttcgccttgagggcgtgcagctcgtgcggcctcacgacgcggtcgtactcgagcaccggcttgccggcgaggttgggctcgccgaggccgagggtgaacacgcagccctgcatctggctctcgatggcgtacttgatcctggccgccacggtctcggacttgtcccaagcggcgagccgcgggagcaggctggcctcgctgacctggcacaccaccgcggcggcgctaccgggaatcttccacacctcagacgcgctccgctcccgcgggagcacgcctttggacgcgctcagctcggccagcggcgggcactgctcgccctcgcagagcgcggccaccagctccacctcccttgccgcgagcgcctccagccgccgcgcgagctcgcggcggctggcgtagccccgcgggtcggagagcgcgacggagatgaagcggaaggtgatctccagcgcctgcagcgccggcttgacgaggccctcgtcggcccactccggacagcacctatccttccacagccttgcgagctccggaagccgcaggtactgctcgtactcctcgaccgccgtatcgtcctgcaccctcagaggcgcagccaccgcccccgacgacgacgaggaggacgcgcgctgcttatcttccggccgcaccggcgatacaggggacagcttgggcgttgccatctccgcgctccagttgagttgaactctccctcgatatgatcagcgtctagtttgaattttccaactgtatactccctccagttatcgatcgctaatcctcgcttgtctttgagtttggcctcgagaattagcagatgagtcgtctttatatactgctgcgctaggtggaagtggagtattacagctgtacaaggggagcgtgccagcatggcgtgtgggccacgctgctgcagcgtgattcgaaattcaattttggaaaccgcgggtgggccgggccctgtgcctgtggctggcgttcgcagagaaaggcaataaataatcgtgcaaagtgagaaaagaaagagatcttgagcttatccggatgaaggagaggtgacctctagttgtgtgaactgtgaacggcggatgcgctcgtggcctcgtgatgtccaggtcgtcgtgaatcgcgatgttctcttgcgttggggcagctcacgccgacgttgtattcgatgtaatgcttaacgcggacatctctatccgttgcgcacttgcgttgcccaccctaggtaggccggcacgaacgaggttcgctgaatggataaacggcgtctctgtttctctcgctagtctcgtaaaagaatactatcaaatgaaaacttcgttcgcttgccctactttgcttgtggtttatacttgtggatgattctatattggaatactagttcccgaagcgaacggcgcagcatgtatgatgattttgggtcggcaatatcgtcaatgaacgacgtcgtagctctgttattttcctatatgttattccatatcgtgagcgtacgtaactttcatcgaaaggcttttgcagtttcgccccgcccggctttcggtagtgatagatatctaggataggcagttgacctcaactgagttttccctcttcggtttatttagcaccaaacgttcttgtcaaccaattttgtaatatgtagtgagcgtttaaagttgtctttctgagctttctccttatcttctcgggttgttgagcacgtaagaatacaaatacaaccaatctagactgcatgctatggccttctttacactatactcaaaacgactgtgtgataccacttatagacggggtcgacagttctaaaccataaattaagcacggtcggtggaaataatcccatatgcactacacaattactacttcacttactgtgaactttcggttatactgacgcctaagtatctctctcctaattatctcagcaaaaaagttgtcttgtcgtaacgcactaaaccaagcccaagtaggcagcagctcgtgtagtcgtgtgtctattggctagtgcgaaacaaccggatcaatttcagtagggcgtcgcaatgcaatgctgatacgacgtgcacctagcccatcacccacgctcaaattccaccgtcacccacgctcaaattccaccagcgggtcgatcgccgccgcgaccgaaaattcagcggtcgtggcgtggatttgccggacgaccgcccgcccggccgtccgcgagcgctgccgaactttgacggcgtacgcgccgagacaccgcgcggccctgctccccagcctcctactagtcagaaccggcagtagccgaagcaaccaagaaggttgggtggatatgcgtaatgcgttgatttgggagggaagcgccgtgttttgccatgtgtcgccttgctattcgcggtgcttatcgctcgagtggattttcatattggttgacctagtatattccacgacgacctgtgctgtttagttagtggcgtaaattaattcaattttggaggattggtattttcgcgataagtacgaatgcgtttttttttttaagttgaccggaggaatgggaggttgagaataggtttttgtgcatatccaggagagatggagatcgatacaggctagctggggacgggttgaggctttttagctgaagaagacgtgctcgtacgcgagatgaaaagcatgtaaggtcggcagattacctgcctaagttaccctgtgcgacagagcatatgacgtgcaccgactgattttgttcagttacgcaacgtttcagtatacataactgtgcatgcgagttcaaatgattacctcaaacgtatagagacatcatatggtatttgttttcaagggattagtttactcaatgaaggaaacgggcatgcgaaaaattcagatcggtttctctctgactccgagagtactcgcctctcaacccatgaaccgcgaacagccgctacaactgcattgtggataacattgacccctctttataccgagggtggtgcatgatcccaactggcaacgagcgtgctcgtgcatgtgcatgaacccgccattaaaacccgtcacggtcgtttcgtcgagggccataattcgtgcatcaacggctgggctccggcgcgtgagtcgtgacgtctgggaagggaggccgggtccatgccgatacggggccaagattatggccaccaataacatctcatcatgatttccggataagagcttacgaaggtagtagtagctgaccagccggcctccgacgcctcccttccttgccgcctgcgcgctagtacgaataacgaatggacaaggacgaccggccggtaaacgtccacgacccgatccgagtatctgaccaatccgtcaccaggattagctcgttaagtttctaggcggacaagactttcacgcaaacgcacgtccgtcgctgtcgtgaaaaagagctctcgatctcccaagaaaaccgatccgatcgcggccccggtgtcccgtacgtcgatcactcgatcaccgatcgagggcgacgtgtctaggctgaggggagacagggacgccccgccacgagcgaggaggcgcgcgcctcgccggttaacccgctgttgccggacgcgacgcacgccggcacacgcgggtgacagctagcggttggcgagcgttctcacgagtttaccccggtccgcgactccgagggtgcgtgctgtgcatgagccgatgcgcgtcggctgcacagcgcagcgtagtggtgcggtgtgaccgactggcgtacttgtgctggcgacggcggcaactggggttgggattggattgcgccggtgcaaacgcgacattcgttttctccgttccgtcccctagccgacgcgccttctcgtgatgcgggatctgggtcggacgaaggaaagaaggctaacgacagaagttcggcggtgtgtgtgtggggcacaagggctttcagttttcggcgttccagataaggggaggcctcgtcgcacatggcgtgccgcacgggccgcggcgcactacgggattagacgaggcccatcatgtgcgatgcccagctcggccatatgctgcgagggggcatcggtcatcggtgcgcgccggctgagatgaccaagccgacgagctggcaaccgtttcaccgtacatggcagctcatgatcttatctggtttgatttgaagactagtccaattcgcacggtactgtattgcgtagggtactatgaaaatcattggtttatgcttccaagcagacattacgtcgagtatctacccttagtttcagacatcactgaagccatttttactacaccaaggttcacaatttcgtttagggtcaaaatacaagcccattgatatgaagaatttcgataaaggattttataaaaccaagtggttccgggagcttcgaattacggaagaaattcaaatagaattgtgcaccctagctcaagctaaaaagtcaggtttgagcctagtcccaacctaaaagaccaagccgaagctaagtccaaacacctttttttttaataagttcactttgagtcccttaactagtgatcaaatctaattcgtatccttaaaccacaatatcttgacctccaactattaaaaccggtgtaacttgactccctcgacgattttggagggtggtttcgctgacgtggtgttgacatgatcttcgtcctacgtggtgttgacatgacgcttatgtggtcaccacatggcgctacgtatgacgaggaccaagtcaacaccgccatatagtcgccacgtcagtaaaaggtgattacctttgatgttgtatgccacatgctcacgtgactaaggcgttgtgtttgcacctaaatgacaaagtttgggacgtgcaatacaccctgcctctaaacatttttctaagaactttttttttctaaacctgtttatataggttggaagcatctaagattaatttaaacatcgagatttctaagtccaaacaaatagtcatgaaaatgtttgaaaatatttttgagctttagtaatagtgtcatcgttggcttaaaaaaatacaactcaaaaatcaacatgaaaagaagatacaaagagtaaaaaatctactaagcagtaaaatggatcatattttatagtttactggtaatgaggaaaaaacagtttataaatagataatttctcaaatcaaatagttcaagagagtaaaattaactattatttccttctatgaataactagcaaaactgcccgtgcattgccacggaaagaaaaaaaagagaaaattgaattacaacatattaaattataattaaatgaaatacaaattttctggaatattttgggtattttttaagtaggtaggtatataattaaattaatttacaagtaaaataagtgtgagaaataaaatgatatggttggatttaattttcattaaattctccatattaattacactttttgaaattttcttggaatttactgagcttaattgctaattttgataatacaaacatcatttaagcatttatttaaataaaaatcattctttctctatgagccattttcagcctatttttttcttcagcctgcaagcgaccaaagtctacataatatccccacactcctcacttgccgtgcgggccgtaaccaaaaatgtgttggaccatcggcccacgtgtggcccaaatggtgcggtccggtgatgtaggccagcccaacgctcgatcaatccgagccgtttgttttgatggatggctcagatcagttccaatcaatcaaaaccctaaccctaaccctccctctccccctccccgatcggctcagccatcccccatcccccctcccaccgccggccgcctccccgcacgacgcggcctctccccctcccctcaccggcgccgactctcccttcacccctccagcggcgccgcttcccttcccctcccttctccactccggcggcgccactccctctccccctctccctcctgtctcgctggcaaggcgcggcgacagcggggtacggcggtgataacgcacggtgacactcgtccctccccctctccctttccctctcctcattgcctcaatgcccgtccctccctctcggtgatgacgccttctccaccctcaagatccggcgacgtcgacggcgacgacgatgtcgtcagcctccgcgggtggatctgtcggtggtggcggctaccgcttgcggatctggcagcgacagctccctccgtcgcctctcttcttcctctggcgacggtggtggcgtcggcggtggtcgtggatgaatccggcagtagtggcgacggccgaggggatccgacgacgccccgtggtcggattcggtggcgacgacggcgttggtggcttctcggtgatgtttttatttttcttccctttttttttctcaatcgcttgttgtccgattgaattttgtatgaattttttttttgctttttttttgccttattatgatgcaaccggatttgattttttttcaccttttttttttttttgccctttttcacggacggacgacggaaacaccttttaatttttagacgatggaaacaccttttaattttttaaatagtagagatgtagttgacagagttgccaggcctataaaaacacgattccaactggcccaacggtcttccctagccaactggcccacggcccacggcccactagcagcacatctgatgctcatctttgtaacctaggtcacatagccaacttgacagttgacactcgggcccgcgagcccccgactcgcccgccgccggccgccaggccgatgtccgacgacgctccagcctcctgcgctcctcacctcctgttcgtgcttgcttgacgtcgacgctggcctggcctcgctcggtcctgaccgagcctcgaggagacgtcgccgccgaccgccggggctgacctctcctccgattgcccgacgcccgctccagcgctcctactccatctccggcctccgactcccagccacaggggcgcaggcggctgatccccaggctgctatccgcggcggcggcggcgcgtgcggcacaactcgccatttcgaagggagtagccgctctttgatgagcgggcgaatgggtacaggtatgaacccgtacactgtaaccgtctcactgagaggagggagcgcatcgtctgccgtcgtaactataacggcacggtcatgccgttggcaaatcctgatcgttccttttctttggacgattaggatttagaaggatccaaataccaggcctgcaagttcattcaagcccactaaccaatcggctggtgcggcaatataggcgccgcaaccttctgacgcgagagaagtcccgatgcttttttttatcgatttcactttccccatcttcatctctcacctctgtctctctctccacgcatctctcaatcactgcaaagcaggagcgccgattcagtggcttcaaccataaatttttgctgccaataacagcaataagctccctgatattacccaggtttgcttcccatcatttttgtcaattaatttggctcctgttgctagcagcaatcagtcctggaagcattggcaacagtacgcagctatggttgctgtaatcagagaagtcaagcacgcatgcatgagcagaaaatggaagagacgaagctagagggtttgggactgattccagaatcatcggccaattcaatttcagtagcttgtgctttagaaatcttccgttgtgaagacattagatgacttgtctctggtagttggagcatgtggttgtgttcaatagataaatcatgcaaggtgtaaagaccagaatccctatctaaggtaattcccattcgggcatcacaacctgttcttgtctcagctcggggaagttttgtcaagtgatctctcttgtcctgtgctcggtagccctgattggaacatacaaatctacatgatgtaactaccttgtcaattttacttgtgttctcatacttcttcctagcattgaatcctacttgacctccatagaatacccaaaagttccaagcctcatcagcacaactaaaattcatgcctattcgaggtatccaagaaggtgtgttatttgtgctgcaaaacatggcatcgcttcttattttaccaaacatgattaatgtaagatatgaaatgaaatggtcggactggatttagatggtacatatggaactatgaatcagatcctgatatggcactcacaagtttgatgactcagaaggagcaggtttttcttgcagcgattgctttcgtactagcgtctgatctccctcaatctcattgcttcaatcaattgtaatattgttttaatcataggagaactaattatatgtattacagatgaagatgataatatgacttacttatttggagtctctgttgttgttggggtacctcgatcttcagaattatccagtgaagacatttctttaactcagatcttgcttgcatatactttggcctcttgaaactctcgatcaagagatggcatcagaccctttggagagaaaggtgaaaactgatttctataggtttctatcctctaaaatgaatgggtgaaattggcgccaagttatctgcttgccgcgcgccatttctctcgcgtcagaaggttgcaacgcctatattgccacaccagccgattggttagtgggctgaaatggacttgcaggcctggtatttggatccttctaaatcctaatcgtccaaagaaaaggaacgatcaggatttgccaacggcatggccgtgccgttatagttacgacggcagacgtgccgttatagttacgacggcagacgatgcgcttccgggggacccatacccgcgaagcattaagcggtccccaaaattttcaacgcgccctttcacactttcgtgtcgttcccgcgcgagggtgggaaaccctttggcgggcttggctctcgcgccactctccaccaccgcgccctttttcttgtcgcccacctctcgccccatcccccacaaacaattcctccccaatttccctcccaaatctctcccgcctccgatcccacagtctctctctctctctctctctctctctctcgatgccgacgcttcgcagcgccacagcgagcgcgtcaacggcgggcacggcctcgccgacggcaatcgccaccccacgaagcgccaagcggcgcctcacgagccctcgccgagccgcagggtcacccgacgcgtctcagttcacatccccccacaaatcccccaatgtcggaatcgtaagtcccccacctcccctcgatctctagtgcaggactatgcagatgctggcgtgctgctgctgctgctgcatattacctggtattctgttgcaatgaggagcaattgctcgatcttgcaggttggcaccccgaagctgctctcggcgtcgcccaggtcatctaggaagcggctttacggcgacttcgtcgcggccgagaagcccaagtggaatcctcgaggcaagtctccagaatcccatttcagtagggctcagagttctgattgggatctgacgaaagaattcatctgttctgcagatcccgctcagatgcaggtggtcaaggaggcgcttcacgtggctacggtgccctcttgcggattggtctgccgagatgatgagcagagtcgcgtgcttgagttctgcaagggttgcgtggagcaggagcgttcagggagcctgtatgtgtgcgggtgccctggtacagggaagaccttgtcgattaacaaggttaaggagagcgtggcgcgttgggcagacgaggtaaattcaatttctcatggttctgtaagattcctgaaataggagtgtgtagttgttgatatggttgtttgtcctcgtagaccggaatggagacacctgatgccttatcgatcaattgtacaagcctagcaaagacgcatgaaatttttagtaaggtatttactgttgcctaattattgactcgatatatctatgcaatgctgacaggcactgacaagttcttgatgcagatacttgcgaagtttcagactcggaagaaggcaacctgcaaactgtcaccacttcagcaacttcaaaccatgttttcccacaaggaatcagccccaagaaggatgttgtaaggactgcttgagcccagtacccatcctcacaacctggcctttttcgtgccatttagttcctggcatcacaattttcatattactgctcctctgtaggttggtcgttgtggatgagatggactacttaataacaagagaccgggctgtgctacatgatcttttcatgcttacgacttaccaattctcaagatgcatactgataggttagatgtcaaaggatgcttcttgtacttttgtaattatgttaatatcaaaatactgttttgccaatcgacaattggtgctattttttcaggtattgcaaatgctatagacctagcggatcggtttcttccaaagcttgagtccttaaattgtaagcatttaccaaatactagcaagaaaagtgttaacataaattgtatgaaagaaattaacatgtctttggcattataacactaatttacaggcaaaccacttgttgtgactttccgtgcttattccaaggatcaaatatctgacataattaagcataggctgaaggtaattcgtttatcatgtgaccaactgtggctcgtgcacatctgtgttcaattacttgacttaaataggttgcttaccttttgtgatactacacataggttctcgagtatgatgtttttgaaccactggcccttgaattttgtgctagggtaagtccaattactacccaagtactcatttgtagctagttcattttgaaatatgtcagttcacaaggcagcataggtattttttttgttaaggagaacatcatggtgcagttagcatgaaattgacgtgttcacttattaacaatgtttgcttaatattcttataccagaaagtcgctgcagcctctggagacatgagaaaagctcttggtgtttgcaggtaacccacttctcttgcagtgacaactattacgtttttgcactaacatgttgttccatcataaggtaagccagtccataacttaatttttatttattccaggagcgctgtagaggtttttgaagcaaggttacaagagtcttctgatcaagaatttggacttgtaagtcatgccgtcttttgatagcttttttttttcttttgagggaaatcatcttttgataggtaacatgtataaccaacaaagtggttcctgtaaaggaaatcacctttgttcatgtctacattgatgtaagtcaagttcacagtagttgcttcaactgtaaagcttccttgcggttgggtccatctgtgtctctttgcctgacttcttctggccggtagtcggtagaccactagaacatgattctagtgtagtacttaccaccaaacagaaatttgtatgtgcatgactgttgtactactaaacaagcgattgacagtgtatttcatgcttttagttgcctggatctaacgctggtcgccaaaataaatttatcttttgtttggatgatgaaacattgccacattgtatttctttcacaagatcagtaatttactttcctgttccagtgtcctgttgtctaatataagtattacaggtgacatttgaccacatggacattgctttgtcaaaggctttcaagtcacctgtagtagatagcattctctgtcttccccaacatcagcaggtaaattcagatttaccatctcctgttcccctcgattctttttccaaatttgctgtattcattttcctcgaatgacattccgcagatggtattgtgtgcattggcaaatacttttcatcattgcaagaaaaaggcaacgactctaggagaggtaatattcaatatttattcacagacattctgatagatcacgctcgttagccacatgttgtaatattctaaccaatctattttaatgcccttttgcagctcaataaatcatacatagaaatttgtagatcaacccaagtcccagcagttggaatgcttgaattttcaaacatgtgcatggttttgagtgatcaggtatgcaaacatgaagtaaggccaatccaaagaaatggaaagaaattcaaaacatatcaagtatttatggaatttacattgtagggattcatgaagcttgggcaatccaaagaagataagctcaggagagtgatgcttcaaattgacagttcagatatcacttttgcatttaaggtatggataaagtggttctgactattgtaaattcttcgcatcattgtatgttttgtttccagatgtactcattagcctaattcatactacagggtaaccggttctttcagaaatgtttggagcaccaaaaattttagttagtcactcaattcagcaacgacgtctatacacagtttgcattgtatcttataccaagtgccagcaaatcaaaagcaataatgcccaaaagttcaggtgaaattctatctctattactgtaccagtcactttcatactgcagcatgttatccaaaaaaacatttcatactgtaccagtcactttctcagcatcgagactactacaactttatgaactatacttagatctttttccttgtttcaggattttgcattctattggatcaaaccaacgtaaattttgaccccgtcctcaatgtttatcaatatttatgatttatggcgaaaccctttgctgagaaaactgtacatgcgggatgagttatgattgtttttcttacagttcttctgaaagattcctaactgtatttgtaattctaaaaggtagttgattgtagttctgatttttccccctagtcttattttccttcaacacagtctacattgattatgatttaatccattgacataaaagataatttatgacggttgagatctgtaatgcagacctctctctctctctctctcttttactttaccaaaggttatgtataatttcactttatttataatcaagctacaaggctcgaagcactttatttgttctgtatgcagttttatctcagacctggaaaaaataattctgttacttaggctggctatataaatgggcctggaagtgctattgacaattgggcttctgtgggctctttcttgggcacattttcttctctccttttccctgcaaaaactataggttggcttacctgggcaaggaggttgcaaggatatgcacacatttgtatcggaccgagttaaaatgcacctatgtttttcttcgacagtgacggatcgagtagatactagccaagtacccatgtgttgcaacatattattaaaaataaattatgttgtgcatgtcatttaaaattcaatataactctaaaaagttgagttttttttcatcgagatgaaataaagcaatagatgacacctcgtgtgttgtttctgagcaactataaacattaaaaattggatttcgttgctatttcagaaggaaattatgtcatgctaataatagtaataagcaaatgcaatctaaatagtagcttaggtttgatggcggtttagaaacattatcaaatagacaaatagaagaacaacactgcaacagaaagacaatgttgttcagggcctaatactacaaagacaaggctgatatttgataggctcctcaatcagctaaaacaattctcttgatgtggctaagcgtgagtattaatctatactccattatatatataagatagacccattatattctaaagcttataatataaactcacatgatcattaactagcaattattgtattttaaagtttatacacataacaagtcatagatgctgtgttagtatgtgttaacgaccaaatttggtaatatcattatcggaaacggagattagatcaaggtggagtcgaaggcggagattgatctgagaacagagcaagaatcggctgaaatccagatcggctacgattaggatcggctgggtctgagtcggactaggtgagctgatgcagccgattctgacagtataatctggtgtatgacattgggttgaattgaggtgcttcaagatgattgccgcatatggatagagtcatgagaaggcaattgtatctattaattaggatgttttatgtaacttccttagagatatgtttgggcaaaagtctgccgcaatgacttatggtatcttagagtttgttagagatagtggtcgtgttcggtatagacatatcttgtaattctcgggtataaatagaccccgagccctatgtaatttttaacatacacgttcaatacaatttcggcgcatcgccacctttttgctttagttttacttcgacgagtttttgctttcgggttgagctgcatcggtttcgatcttcaacaagaggtaaaacttgttatgacggcttgtgttctcgggattagtgcttccatctttatgacactaatcttgtctgtataattcgtcaagttattatatatcttatataatctttggcaatatcgtcatctaacctacaatcggttaacatctgttgatagaaggcagccgattaggttaaatagcgacgttgtcttagattatataagatatctaccactttataaaacatccagcggcttgattgtctagatattgctcttcttttcatacttaatgctgcatcagttgagtttgatctattaagtcgtgcttagaatatcaatctctagcctgtactctggttgccgattagggtagtatcggagtttcagccgatcttatttgatttaaccatattcgatctatatgcttcaatgacatgttaaatccgtcctttgtgtcaagatatcgtcgcaatctaaatatattaagcttctgtttaatacattatacctgttttaatatcttgatatagagtagtatcggagtattagccgatacacgctagatctatctgatcggctatgctataaacatatataatcctgttattaatatatatttcgatctaagtgatttatactgtcttggcatggtgaccgatctatcccaatcacttgatttaagtatatattaatataagaactatatatcattaatatctacagccgatcgaatagatttagttccttaccacctatttataaccgccgatcgattcatatatgacatcggctcaaagataaatgatatgtcatcggtacctagccgatcggctatcatttatagatttaaccacgaattctgtctctatttcttgttgattacatgatcaaatcaactggcacgctcatacattcgaaggcgagctttggacctgcactggagttaagcagatctcccaggcatcgtgttttctatcaacagtatgttatagggctcaacatataagcatattaaatcatcaggtctgttcagattgtaaccaaaataaaccttaccaaaatttggcattcttatgtatttaccaaatttggcaacaaactaaatgtagacatttttatttaactttgtaaaaaaaagggtatggttgaaaatattatcaatctgaacagccccatcatttcataatattttaacatatatttatctatcatttttatgatatttatcatacatttattcattcgtgtatttatagcaaaacatattataccatctggtaaatacaactgtgaaatattatcagtggatagtaacacgtatgtagaagtacttaagatcacgcccccgtacgtttgatgtgggatgttagtgcttgcaagattaccgtacatgaaactaacaaaacaattaatccaatagccaaaacaacacaagcatacaaggatgtcaaagttgggtgaataggtggtgaacagattgtgtagctgatgccttatttattgctataaccccaattcttaccatattaatgaagaaaaaattataaagaaataaatatcattggagtatattcgcccatgatctatagctgttcgtagctttgccagagcccttgtagtggagacgtcagcaccggcgctgtctacaggccaacgatgacgtactgtgatagaacggtggtggggtgagaactagagaagaggacagagctggcgaatgtcgaccgggctatacgtgatgtgtgcaagtttgggtttttgtgatcgattttacctggacattgacgatgtagatgtaggcatccaagggacgggtgagttttggacaatgctgtactatatacgacaatgttatagtacgatcgcaattacagttgatgggctattacaagagtaggatggcatggccccccctcctctcctcacaagacgaatcactgtaccaaactcagtcagcaagagttcttccacagatttttttttctagaaaatgtcccaatgaatttcagagagaaatttgcatatatgagtaaaaaaattgtttcactagaataccatcacttagttttgataaaatatcatggtcaaacagaggttgtttgctagaataccaacgtggacgacattatctttggatcttcttcatcctccctataacataggagtgaaaacgggtcgagttcggtcggatctcacccttcccatatcctaacccacattttataatcggaatcgattcagacacggatagtgctgagtacagatacaaactcggataatgtcgggcaaaaatacggaacgaatacgtaccaaaatggatatgtacactatcggttatgaatatttattcagatatcaagttgaagcaacaatcttatatatcacatagacaataaccattcaataatttcatatatccacgatacgattatattatgccattaggaccttaggaaataaatagggtgcaatacctcacaattgaaaatcattttatatatgacatacagttgagaatattaggtcattaagcacaatatatctcacagttgagtcacaatatcagtatatcatcccatacaagctatcagtaggcatcattcaggaccacaggggcatagactaataaacatcatttaagttatcaccaattcatcataacaatagtacctcatagtagaaccaatacatagtaccaaaaggtgccttgcaaaaacataatacgggtagtatccgtatatttatccgggtaataccaggattttttttaccggataattcgtatccgtcagatactacgttcccgaacccaatcctatatccgccaaaaagacccgtactcggatccgatgtccctgaaaagtctcgggtacccgaatttgtcccgaaataatgtggccggacgggcgacgagaaataccgccccgttttcacccttactataacatcggaagatcctagctctggcctttggccatgctcactccaggccatggcggtgccaagggcctcagagagctactcttggacgaggggcggggtggtctcccatttccctgtgcctggaggaccatacttccctccggtcatccctacatagttagaggtcgggatgtggttggcaccgtcaccgttcgggcctccggggagaacttagccaatggcggcggagcacaaacctggggagcacttgggggactcgatgctctactcagtgacacaggcacacagcgtgcgatgcgtcgggagagagcaactgcgtaaaccattttacaagggtgtcaagcgtctccgatgccacctccattctcgccaccatgatgatctggtaaaaaaggtggctagggttcaggagtaggcgatctgtttggtggaatggaggagatcgggaggaggaagtagggtttttgaaatttctcgtggtccaagaatcagtgtgcgcagtggcgagcagttaacggcggcgatggagcatggtgacctctgacgagctcttccgctattcatacaaacgcgagaagtacgcaaggcaaggagaacaacatgaacacgacctagaagaacacgagctatgggctagcaagatcgagtgtcgctgccgtcgacgcaaccagagcatgatgcggccggtggtggcctcttctagcgttggagagaggaagaagaatatttaagggtaattccgttcacgaagcaaacaaccacctgtttaattgtggcatttctggcgaagcctatttaaatgatggcattctaatgaagctaggttttttaagtggcacatgcaaaattctcaaatttcataacacaaaacaatacttcctccgtccaagatcaagaatataagtactattgatgctgaatcacgccgccacaccttgagcacgttatgtgcaaactacagcagcacccagagacgcgctgccacgagaaggaagatgatgccgaacgagcactccgagggacccagtcagggtgaacacgtatcgatttgtcctagactcggtaggccaattagggcatcctctaacactatagcaagaaggagattaaaatagacttgggataggtaacaagaaggagagagaaatataatatagaggataaggataatagattgatttagaatataaaggatatgatatgtacatctaaagtttttattaggagattaaaattgaggtacggatggttgtaatggcttggaatgagcaagtacattgagaagtcttcgtattttagaacaagctttgaacttagatgtgcttatattaaggttagagatggttgtaattacttgagatgagcatgtagattgagaagtcctcgtattatatgtgctttatattcttgggcggaaagaaattatggaaaacccataaaagtagcataaaactttagtattgtaaccgatgacacataatccatatattattgctgtatagttttacaagaccccattgaagatgatttttttaaaaaaaaattcaaaatataagacaagtatattttttaaattattaattacttgattaaggctattagttttagtcttcactattaaaaaaaatattgtaccagatgtgttggaattaattgggatttactaagggtgaaggttttatgaaaaagataagccataaaacctatgattatgtcatataatataagtcataacaatcggtgtctttaacttaggtcataaaatatattacctccgttctaaattttagatatattataagatatacttactctgttctaaaataaattaacctcgtacatgatgcgatatacgagtttatatctcgtatgagattaatttattttgggaccgacggactagatattagtgtgaaatttgcacagacgaaaaggaaatactagtagccaatagaagaagccacaggtgcgctagtttaagttgggcgtggatggggaaagcaatagatgcggccagtccatttcatcaggacgcagtgtcgcaagttccaaagaggcccaccaccggattggattggccgagaccatcatcaccgccatgatcaccagctagattcattcatttgattccgcctagtcgagcttgacgtggtacggcgccttcaattggagatgacggccactgtgatcctgattgatccccagctacagaaatacagtatcatatcttaccctctcgcaatacagatcttgaaccccactagagtacatagctggaagaaaaaaaaatgctacgagtagcaaaaactcttcttcacaacgcagcgaagtggatggttgttgcttttccaaaaggacaaagctttgcttttgaaccacccgccttttccaggttttccaaaacttaaaaaaaatgcacggaggcccctgatggcatgatctctcctccttttgcaaaaaaggcccggtgaaaaatatccaaaaaactcaaaggtcaaaatgccacacatttgtttaccgaggctgagtggcgcaccacaccagaacgaacgtttctttaagcaccgtgcgcgttatactacaccgaagaacaaagatcgagagcacagcttagcttattattagtagcaaaccgcgaatgcgatggttcagcagcagaatcggccactatccttgacaaactctcccataatcatgcccgtcatgattggctcgaacgcccgatcacttgtttggcacgttgctacgtacttcgtactagtttttcgagatttgtacgcttgcttcaacgggcacagtggcatggctcccgagttccccatgccagttagtagcggcaatgcatttgcacgcgcagcctcgccgtcgcggcgtatggttggtggcgacctcgcgatcccagcgcccatgcggccagcgcttcttgggcccggcgtggcgtgggcgcggcgcggcgcggctcggctcgcgcgcgcaagcgaagccatcgcggaatagcgcgtccacagcgaaaaccactggattggtgagcgggattcgatgccaccacccacccgatcggcgcgcgaagccgtcggtcgctgttgcgggcggcatgggcgggtggcgcccgcgtgaacggcacgagggaaccgggcgctcccaccacaccacacgaatgtttgtccatgcacgcagcgggcgcatggatgcaggggctctgtcagggaccccatgccacacgtgaaacggatcctcctcctctcctctcctctgaactgtcctggctggctgctgctttcacgtcaggcgccagttgcgtttgagccgctcgatcggaaagctggaaggtgagcccgagctacggtcgggggaaaccttatccaccgatgggccctttatcctgtattaattcgatccttctaatccggcagattttgctctgtttaatcataccgaaactccatccagggcgcttggaatttcgttctcgtcttcgtcttacccgtccatgactcgatcaaatcgcgcctaccgcctagcgactcatgcatggttgggtccagggcaattcagcgtggagagctcatcagcctgcatctgcaagcccggacctatgccatttgatgattagtgctaggttggtgcttgccctttggagccgtgtgcatcatgggcaggtgtcccctaagctgactgacctgatactaccccgtttctctaccggcaccatcattgggtacctggaaaaaggacgctgaaaccctggagtccaaacactcaaaaccacaccatttttttggttcttgcttttggtacactactgctgctagtacgatttctacaacatttcctactcttttgtaattattctcagtccagcacacctgttaggtatagtcatttgcaattagggcagtccacagatgcgtctgagattgtgttcaaacccttgattatactataggtttatccgtgaatagtttgttagtcaaaagattcggggtgtgattattggtctcccttaagatggcatgcctagatcagtccaaagtaccaggactgataataatattagtaggccaaatctagcctaattcttctaattgagaacatgctgaaccttgtctggagtgaaattacttgattaacagtcgttcttcaggagtagttgtagtacatgactaggtcatttcttaactaagaagcgatataacatcccaattagtgagttggagtatatttctgagccgatcatcatggccccagatgtccttgtatcttttggcgaggcgcacttttaagctaaagattgggacttgctctaacagaaaaattgacacatcctcttttggaatcttttcccactggaacggcttaaagactactactggtcttgttggtagatgaagactgaacctgatggctgcaatgaaaagaataagaggaaaacaagcaatatgagtcacgcgtatgaatcattttactgcatcaatcgctgacatcatgacatcgccgaactggtgctactgtgctagtactccaacaaacgggccacaatgtgagtcagataagacggcccagttagtgttgtcaaccgctaagaagaggctcttggtaaaaagagaacaaaaaactggggccacacccattcttgcaccaaaagctcaaaacattctccgttaattttgtgattgaattgacagcggctgttaaatgtcaaaattaggctgctgtcataccaaacaccaagtcccaaagctcctctatacatcggccccgatcactgtcacttcatttggatccccattagctcttgcttcctgggggttggttctcatggcaggatatatctcactctcctcaatcaaatcctgctgctacttggctgtacacaggccatggcatgtatcccccgctcttgacatatactccgtccgtcccaaaataagtatagttttacactatttatctccaacgtttgaccgttcgtcttatgtgaaaattttttatgattattattttatttgttattagatgataaaatatgaatagtactttttgtgtgactattttttaaaaaaaatttataaatttttcaaataagacagacggtcaaacgttggacacggattttcactgctgtacttgttttaagacggaggtagcgtgcgaacagatgatccaagtgtactcgatttgggctacacgctgaattgcgttgcttcacagcttaagagttcagacttcagtgggcataaatattttctcaatcagctgcagggatcagataccttggaggattcgggacgttatatgataaccactattgttatccaggcgtggcagcaggcaaacaaacatccatcagcttttgcaaattattttcttccgtgcaaaaacagtgttttcaacctttccagttttcccacggatgacaacttccacatcaagcgagacgttaataattaggagatcgaactctcttttgttgcgaatatttggagtttttctcgtcgacgatgacccaatattcggcacattcttctaccagtcactaatttcctttcattttcttcattcctcctcttttctccaaaacaaatcgcctcgtggattgataggaaatgcgttttcacgctgcccagttgctaattagggcacgtacaaagatagagtcgtatataagctctacgttatttagagactagcatcctacaacagttagagacaatatggtctctaatcattaatgtatcaaaataacttttcttacttttatttcctttctttcatcaccatgcaacaaaatttgctctagtaaatgctaagagtcgactctgagccgttgtcatgcataacaaccatactcctttctctttcctccatgtcaccaaatttacttgcatggcaataaagagagaccactaataaacaccgttgtacatgcccttagccaatgatgccaacacatgtaacgcacacgtatcagtaaatcttcaccgcgatctgtaaagaaggatgggccgacacacacaccagccagcacggcggccctgccatgatggccgccggattatcgccggcggatacgagaggcaggggatcgtggagtggcctatctccccctgctttggtgcgccggtgcaccctaaaacgagcacagccaccggcctgatgcaacctgatgactggccggccgtgcgtccatcgcccggcgccctacctgtggtggagccaacaacgagctagcagctggtttagttttcgtgtgtgggcacgtatcgatctcgtcactttactactactttggcgtagcggtataccctaccagccactattggtgctacccaaagacgacccaggtagtagaaagatttggagtatacaactagaggtggcagtggccagccagggcatgcagtggaggtgacatgttgttgtccggtgagtgcaagcaatgatccatggtctaggccatggcagcatcgggatcccccagaggcagacaagagggggacaggcgatggtagtggccggagctggtggcgtgtatgtacacactcgccattgctgatactatcatggtatgtggccgtcggcattggcattgctgcgccccgatcgaatgcagcttgcaacttgcaaagcatacgtagcgagatcgctaaccacagatgaggcgaggtactgatcgagcagccgagcaggcaagaaggcaggcatgcgtgcattggccatctttgttgctaatgcgtggtggtgtcttctcagtgtgcgccactcactctcgctggctcgctagtgcatcgtgcaatgcgtcgttgtaggtttgtagccggagcggcagcagcgcgtgacatgtttggtttttttgcatgaaacgcgtatcggcttgggccaggtgaggatgagatctaggcggctccagaagccttttttgagggtgcattactgagatactgctgcatggtgcaacggagaaacaaacaaatctgcaccaggattaccagcctttggtgtgaagtcaagtcacccggatcaaagtgatatttggatgggtgtggaggggcactggttcatgtaaaatggtcacctctctggtgtacacggaataattgcatgggtcgattggccatgactttttattcgtgttaaccataccccatatggtttttgtgatgtcgttgtttgtctgtcagatcatgtttattgcgtactactatacagtacatgtcatgctgctgaaagaaacacagaaatatttggtctgatcatctggttcccaaggggaccttttcaagcctaatcgatctccgaaggttggtggagtgtccccataggaaatggttgaaaatacggagaaagttatctcaagcaagtcaagtcatcaaagagagagagagagagatggttatcaaataattagaaataaaataaacgcgttgagaattaaacgcgagaccgtagggttaaaactatacacctcttaacactgcaatatcaaatacatgacacacaatccgtaatatttaggctttattttttaaaacaataggcttcaaaattttcctttggaggtaccaagaaaagaatcctcaactgtttttactgctcttcacatctcaacatctcaggcacggctagtactcccaatccgcctacgtgtgggcgagagagattgtagccagggtttgcaaaaccgccggtaactgcgcggttaccgcgctcgcttaccgtgggatacggtaaaacaaaaaccgcggcaacctccttaaattcaaataaatttaaaaaataatttaaaattttgataaattttgcacggttgcgtacgattttccacggttaccgtgcttattgccggggtgtggtaaccacgtccctggcagttggggaaaccctgattatagcaccagaggaaggccaagcgataacgcacgggagggggagcgagcgatctcgcttagaaggaggcccacttttttctattattttagggatcaattttggtcatctcttggaaacaagtgtatatattttaaatccttaaatcttcattagaaattcttaaatccctctattttaaaatataagatgttgttatagcaacattgtaaaatggatgggtagaatattggacaacttttttaggtatgagttaagtttgggcgtctggctacctatataggagtggaccatgagttatttttttcaaaaaaaaaaacgtatatagtcctgtcggatactacaaccctatccggctaccttacccgtgaccatgactccgtgagttttattttgggtacatggcaaaggcgacggcaattggctgctggctgagacatgcacagtaagcatgcatgcgcatgcgtacatgcatgtacccatcgtccatgtaactcgtgcacccaagggtaccccactactcctattttgtagtaagctgggtactcgtatttaaatccggtccgatccgttcgttgacttttggagcccgtaaaacttttccttctgaccgtatattggtatactgcatgtgctaattagttccacgctaaaattggaagtttgaagaaaaaaagttagaagtttatgtgtataggaaagttttgatgtgatggaaaagttagaagtttgaagaaaaaagttaggaactaaacaagcacagtagtaatacctattcgccagatagtgtttagttgcaggtctagaatagatcaatgcacaaaaatatacaccggtcattctaatttctcccgcaaaagagacgttacatatgcaaacaagctattgacccgcgtccaaaagtgtaaggacacacctgaattgaaacaccggagagatctatcacatcagtagttgccccccatgtgtgtccggctacggtccgtcggccttgcatcagacaccatagcatgcggccggccgtgtgccggggtgcgactgtgcataccgaaaccgatcgaagatgacttgcgcgcaggggaggctgcgcacggttcaaacttcaaggggtgaactaaggccgccgccccgcgatatggccgtcctctggctggccaaggccgcgtatctcacacgatccgcgaggaccgcagagcagagagttcgtccgcgtccttgtttgatccgtctcgtggcctcagaaaccgcgaagcgcacatagcgcaccacgagcgccgccgcctttgtcgcggtctcgaccggcttgtttaatcctattagttcgttacaactgcatgtgcacgagcacgacaccgatcgatctcagcaggggatcgagttcgtacggaatttggtatttctagattataaattgtatcgctagtaaacaaacttattaggtgggtgttatttagagaaacgcccagggttttttggctagctccacaatcggtgatgggttagatgatctggattcaaagcctcaccccttctaattatttgatattaggtcatttattaatattcgtgtttttttaggtaggtgtaatttagcatatgaacttgcaaattgctcgttttgatgcacaaacttatcgacgtgcaaactaaggcaatgaaaaacactttataactaatttctctaattaagttgcattctgaataggatattatgcatacgcttaatcagtaaaatggctccgtagatcggtaaaatgaatagagttcgtgtttttggttgttggctccgatccgattcattttagctccaattctttttaggatattagcccttcatttcgttcatgtctgccttggcgtatgataatgctatgtaagtttgaatttttctctccttctaccaattgaaatagtagagctaccgcttgtttaaaaaacatatactcaatggataagttatgttaagtgtacagagaaaaagtatataaaataaaaggaagatgcaatgtataaaaataatggataaaagcaaataaataaaaaaactatatgtaaaggttatttacacatgaacatctctcgtgttctttgattatgcatgtgacatcttaatcaaactctatattagtatgattagtcataatatatcgttttagacttgatccgcatagacgcactagacaagttcataatgagcattttacaagtttgtgtactagtaagtttgtgtactagtaccatggattaccgaatatcactagaatcagggtgtgtttagttcacactaaaattaaaaatttaattgaaattggaacgatgtgacggaaaagttagaagtttgtgtgtgtagattagttttaatgtgatgaaaaagttaaaagtttaaagaaaaagttgggaactaaaccaggcctcagtagtgcatgcatgttcagaaagggaatttgattcgctgaaacatcttggtcgcggccccggttttttatttacgagaaacaaaaattgcagtgcaagtagtcaactcctgttgtgtaacggccatctggtgatctccctcgtgcatggtcaactattccgcgtcagttggtcgatagatttcgattccaacggattagtaatgtcgtcaagaaatagtactacagggctgagtcagtaatgcctaatgaagaaacgaaaatagctgatgggatctcgtcgctacataattaaatgagaaaattccctatatacccctgaaaatttactcaatcctttcaatacccctgaatttgacattatcccttatatacccctgagttttcattttgatctcctctatacccatctccgttagttgaccattagttgaccgttaaatattttaaaatgactatattacccatcctatacatatgtgtggtacctacccaataaattttcatatgaaaaataaacttatacaaaatacaagcaatataatcatttaatgcccaacttaaaaaataaaacttattattttttattttttaaaaattatgattaaatccatacattagtttcaccagaaaattaagagcaaaaactaaatgttatttaggtttaaatttttgggaagatatacgaaattcatcaaatttgatctgaaatttatttaaaaattttaaatttgttttctaatttgtgataaactaattatatcccctttgttttttcacaacgaatcttttttcactaaatatttgttgaaaagtaattttcaaatcttatgcagaactttttttacaataaatctttttttattttaatgaaataatgttttattttcaaaaattcataacaaatatttagtaatttattccttattggttttcacaactcaaataatttacacataaaacatttctagcttttaacaatataacaaggacaataaagtaatttctacaataactaacggtcaaactaatggtcaactaacggaatgggtatgtaagggatccaaataaaaactcaggggtatataagagatcaaacaaatttcaggggcgtagaagggattgggtgaaattacatgggtatatagggaattggccctaattaaatcggaaatgtcaccatagtcacgttactatatggggaaaaattaaagtcattgttgatcatctcattaatgcgctgaacttaactggttaattaagcttcaaggctcaaatacatatattctggccggtgattcatcagttgactcacgattagaattagcataagatagttcccagttgggttacatactctgctccgtccgttccaacgttcgaaaaatgcaatagaaatcggcctttgctgctcccagctgccctcattttttaaccaagttttaatgaaccagtatcgtatatacaatcttattaaattacagttagggaggaataagaatcatcgctatatttatctgtcaaatctgcatgtaccaaattaacactgcaatactgcaactcactgagatcgaactgagaaataaggagatacatattcacgtattttctagttttattttgggtatactatacgctctcgtatgatggcatgcgtagatccaccaaaactgtgaagcaaccgcacgtgttaggaattatagtatatctaaaggatgtatgaataaaattacacaagcgtgatccttcgccacctactgccgtgcaatacccttaaaccaaggaagctgaccgccagaaataatttttcaaagcatatagaatcccattcaacatttccccgttgcttgcaactacaaattctccggctaacctgcaaaacattttcaaattaaggagccgttcttgctggtgcaagacagtcctaggcaagtggccttaattaattcgtcaaacatgttacaaattaatcaaacactaactcatgtttgtttctaatacaatatactctgaacagtacagatgcgtttaccaaccgtttggattgttcagtcgagcggcgccacctcttttttttttcctctcacttgttgacagtattgtacattgtacactagtgtaagaggagaaggttttaggtggccaaactggtcagtactttccatcgtttttgttccaagcacttagtacggactacggagtatatggatattgctgtacgtgcgagtgatatatgttagcaacttgacatgtaccaggactaaaactaacacctgggcttccaagttgaagctaagcctgggaagtcacgttggtaggaaagcgaggctcaaaatcggattcgccggccgcgcgcaccacatttcatcggatctcgcgttgcatcgaccgatcggttcccgcgttcccaaggaaatcgctcgatcgtcggcaactctcgctgcccgcgcgtccaagcaaaccacgcaccgtcgtgcgtgcgcgcgcgcacatcgcgtacacacgaaagctgtgttctcttctctcgagagctagcgatcgagagtagtacgagtacgtcaatactagtagactgtatcgtgtgcagggagcgaaaaagtcttcgctgctactaggggttggcgccgaatctgtgaggttatcgcagtccatgactagacaaatgtacgggcagtcagaacagtggcccacaataatggagctctgcttgcaaacatatgaaaacccgcattttttttcccttcacggaggatgttaaaatcactctatttgctgcaattttacagtagagaagatcgtggccaagtggtcggagtagaacaactacgctgaaagtagtgctccgtaatactccgtaggagctattgctcgatggatctgctcgattgccaaacagaaaaagacaccacaagccacccgtgtgcatctacatgacatgatgattaagtttcgttgcttaattacgcagactagctaggcctttcggatatcgatcgactgattggactggcagcgccaaaagtccactctttaatcattaagagccggattaaactgcaaaacctggccgggtgtgtagcacttagagcacccgcaatgataaagtaaggtgctctctataaaacatgtacatctcagcaatagactcgattaatagtaaaccaccttaatagtatgtccacattggtatctatagctctctcatacattgcctcgtttttctctatagactatctctaagttaatagatagctttgctctctctcttcatttaataccttctaagtaggaaaatatgctgacatggatctcttgtagagagcctatagataaccattgtgggtactcttacaagtcgggcaagtatataatcttactaatataccagatctaatccaatccactagttaaagcaaaggtggttactttccttactttttgtttggttggatcaatcagctcgctacatatcgattaatatatcggcggtctccactcactacaatatacaactgcatttgccacccgtagctagctagctataggtctatataaattctcccagcttgcctataaatgtttgtttagcagctggttaatggaccaaattgcatgtgcttagacaagtaaacatgtatttgacttagtatttaacgactaatagcgggtcgatatgattcctcatttgaattaattttaaggtacacataggagagaggattataagggtctatctgacaacgtttcaattcctaaaattaacttcaaggattgggtttgaagtgtagttatagagcagcctaaccccgctccgatccaattcttcatttcatttcatttcattttgtgagggtacttccgcccgctcgaccccctttttgggtgtaactaaaattgttcggttggactttaactaaaaaaaaggtggagttaaagctctgttaaatataccctaagtttgtgctagtttgcagtttcggcctgggtgagcataattgctagaaactgaatatttcaggccgtaaattcgatcatcacttctaagtaaccaagtttaatagaagtaattcgcccataagccttggttgaccgaaacagaattaattaaaattattatttacaagcctgttaagtagcattgcttctttctcaataatataagttgcacatattttcatattcaacccttaaaatatttaaccaacaattattctaatgtaaattaaattttattaacaaaaagtagttggattgatatttaaatgtactttcccgtcactacactggccaaggtcacctgtgacgggctcaaatcctcatctttgacggcttcgcgcatggtcagtgatcagtggtcactggtgagtccaatcacctttgacgggtggccggccgtcacaggtgacacccacctttgacgggcaagttactagaaggctgtcagaggtgttggtctccactagcctagggcgagttaggacccgtcacaggtgacttatctctgacggccctttaaataaaggccgtcagaggttgtggtctccgtagttagaagctgtcacagatgatctacctgtgacggccccaaaagtaaaggcccgtcacaggtaggtcacctctgacgggccttacttgctagtccgttacaggttagattacctttgacggatttttgttccgacccgtcaccgatgagttaattctaacaaaaaaaataaatgctaaatattagctagcctcaggatttgctagccatgccctctgaaacacagatacatcacagatatattccagtcacagatccatcacagatacatcaccccccaatataacatcacagatccatctcaaacatcacagatccccaacaacacatatatgcagttcaaatgccacaattttgcacagcaaattcacaccccttgaaagccacaatttcggtcgttgctcatagaaccgcatatatacttaccaaatggattaaagccataatgtcatcgacctccacaacttgtcaataaggaaaaaaaaaggagaaaatagatgaatagtacaacgtaaatcgtagttgatcaaatgtgatgacaatttagtaaactaccataaatattgcacatatgaaagtaaattacattgcactccataaaaacataattttttacatcgcaaggaattataaaaacatcttttttacatcacaataaattagctagccaagttcatgagtctatttgacatgaaaacgtcctttcttgttcattatttctgcaagaatgaaggcgcacacttcgcctctgatagcggggggggggggggggggttgatgggtgagatcttgaagccagctctacctttctgtttaataaataagaggttaattagcatgttttgaatagcaatgtaggtattgaaatgagctttttctctattagcaacaacctcagggtcgaaatctttcacctctcttagaagtgttgacatgttgtggcacacgtggaaaccacattggtctccgatctgttgtgcgcatgcaaacttggtgtcatgataaagttcgtccttgccctccctgtgtctaccacccttttctacatatgggccacaagccatatttaaggccttggtgatttcactgaaatcataatctttggacttattggagttaaggtaggtaaccctactccacttaggtacgatgactaggagaatccaatgttgcctgcgcagtggttatgtagcgttagtactaagaaccttaacttcaaaaatagtatacacgaagggtattggcctcttactcttggttgtgtgcgcacatgatgtactccttgtcttgatgggcccataaacaccggttgacatagtcaaccatctcagtgaagctctgttgtaaattaacctcgttcaccatggatggatcaaggaatccaacctgattaccaaggcgacgactctcgatccaacacaaccttaaaacatttacgtattagaactaatttaattaggagatatagtccaatcatatcacaagtatagaaggtatgcacttacaaggtgtagcattttagaagaccagtgtccaacttccggatcctgaaaaggtcgaagaggtcatcaaagcccatagttatataggcaggcgacaataggaacggctggtggtcgtgatgtccaactatggatgactccctcattttccgcttggcattgcttagctctatgtattgcttatgtagctctcggcaagcaatacccatcacggctaacacattgtcctctaccaatggcatgcctagctcaaattgggctggcgccctcacgaccttccccgctttgctcaccggcatcgacgtcgcagccttgcccctttttggctccggcgccaactccccgaccttccccttgccgcgttcacgcttcttgtctttgacaagtggtggggagctatcggcctttcttgtggtctttattggagccaagctttgagttatatctgccaagtccatatcagctccaccaggagaatgaggtactgataatgccggtccacaaggagcctcaattgatagcttagacttgggaggtgtaagctccgtcggttgacttggacgaggagtcatcttcacaactatgtcttctttgggccattgtatgaacgtcttgcgtgcatcgcccaaagtcatgatttcatcattggggggcacgggcagtggatagcctgaccaggtgtcctttactgtatcgatggacaccttggcatacctagctagcaggtctgcgccgtggaccttgtctgtaaccgagggcttgaaagccatgccctcagcgacttcaggagcgaaagttgggtggactctcgctagtaggacacactgtgctgcgccctgcataaggtgaaagtttgaatttaatattgaaacgtgtaaaggtttttttattagatatggatcggataacaacaattacctcgatgtggtccactgcagctagtggtgcgatcgggagaccaggggccggcacctctgtggatgcacaactactcctatgctgtgacggactcgggtcgtgttgtgcacgaggagttggatgcataacaggtgttgtgactcggggtatattcatgtcggcgaggaccttattaaccctttcttccacccttgcattcatgctagcttctagttcttgaatgacctcaaccttaagttcggccttcaaacgagcgtccctctcttgcttggagactttccgtttcctgtattgggagctgtactgagggagtccatgcttccagggcacatcgctaccaattccccgagtccgaccaggatattctttggttccgagcgcctttgtgaggatgtcatcttcgcgcctcttcggcgcggactcaacctcgctttgtgaagcttgttcagcaaccaagcccaactagaaaagaaaatagtcgtttatacgaacttgtactttatacgaacggaaattagttaggttaagtagtgaactcaccagttcctgatagacgacggcatcacttttgttctcaaatgtgacagagccatccgggttgaccttaccccttgcccgcgcccagttgcgagctctttgttcagggatgtgtgaaaacggggcagggacattcgctgctgcagcggctgcatcttcatgggcccatattgcctccttgccgatgtaccctgcggtgcccagccgatgcgggtgctcattccgctgttgcagtaggcgatgtgcctcgcttgattctctaaactcttgggtgttcttgagagagcagaattcctcccacaccgcttcggttatttgagggtattcatcgaacggcgtatgattgccgggcgggttgacaaactcggtgaagagcttagacttccaattcttccaagctttgcccatcttttggaatgccttccgcttgagcctatcctttgcttcagccggaaatgtgaaccatttctccattgctgtccaagctcgctctttctcggcttctgtgaccttcccgatatctttatggaggatcccgaagttctcacgtgccgctagcccgcagcagttagaccatcttccaatgacagtcctaggcgccgtgggcctaccactagcgtcaatctctcttataacttgcactgtggtcggccatatattttgtgaccggggatttctgctagacctacttgcacttgtcgcgcccgacatcaacgtatgttgttcctgcggcaattctgcagcacaaacagaaggcaatatttgctaaggggtgctagctaaaatttatgtggtcatgtggtgaaaatttatcctataaattaccatgaatttcgggttgttcgaccgccgttgtcgaaggatgaccttcggcaactgtccccgtggctgggtttgcttcttcctggatcctcgcaggtgttggggtgggcgggtttgcgccgggcgttgccatggtctaatttttgcgaaaaagcttataaatttcctaccattatactaaatagcattagatccaatgtaatacggggtatactatgaaagatatggcctcagttttgctcagaaatatgcatcaattacaatcatttgcatgaagggataaaaagaggaaatcataacatcaaaagagcaagtgcagaaaatttgttcttatgcataaaaaaagaacaagtgtagatactctgttcttatccataaagaacaagtgtagaggtatataaccactgaatcaatcatgcaaatttaaaaaacagcagcagcaagggtacagatagaatgttattgacataaaacagcagcagcaggagtatatataccacaggggtagcaacagcagggggaaattcacataaacagcagggtgaacaagtagccacagtaagaccaatagcacggcaaagatagtccacaggggcagcaacaacaggggcaaattaactaaaacagcatgtctagatagtctcctcttatcaatccagaagaaaagagcaagtgcagaaaatctgttcttatgcataaaaaaagaacaagtgtagatactctgttcttatccataaagaacaagtgtagaggtatataaccatgcaaatttaaaaaacagcccacaataagggtacagataaactgttcttattgagcaattcatcacttattgagccacagcaggggcaaaaagaagaatagataaaaaaatgacagagtgtagataatttgtccttattgagcaattcatcactggccatttaacaaggaatacattgggcagcagaagcaggggcaaagataatccacagggacagcaacagcataaaacaaggaacaggtgtattaacaagtagcccacaataacagcagtagcaggggtgtagataaaaaaggagacagtactactaacttcatgtaaacagcaattcatccattcaattcaagcaagtgtagataataaaacagcccacaatcatttatgtggcagcagcagcaagggtatatatatcatgtatataaacaacaattcatgcaattgacctattcatagacaaaaagggtatataaatcaacaagtttagctacattaaactagctaagattcatgctaagatccactgcagcaaaattcatgtaagatcctctattgatgctaagattcactgcaccaaaaaaggaggaatgggggagggtggcggcgtacttggagaagcggcatacttggagacggcggtgcaggccgtagtcgtccaaggcggcggcggagaggcagcggcgaagaggtcgatgtggtcggcggtggtcggggatcccggcgtcgtggatcccggcgtccgggaggtcggggtcggggaggtcggggaagtcgatggacggacggcggagaggacgaccggcggtgagggcggcggtggagagggcggtggagagggcggagatggcggcagagagacggcggcggtcgagagagtggcggcgaggaggcggtggagaggtcgaggcggcggtggagagggcggcggcgaggagggcggtggagaggtcgagcggcggtggaaaggtcggcggtgaggaggacggtggagaggtcgaggcggcggtggagaggaggacggcggatctggatcgagagagagagaggcgaggcggcggtcgagtgagtgagtgagagtgggtgccggatctggatcgatctagaagatgtccaaccctaggtcaaccctagtcaaactcacctgtgacgggcccaacactatgggccgtcacaggtgaggtcacctgtgacggccccacagatagagcccgtcacaggtgagtttgcctacagtaattttattttattttatttcacttagttcttttattttccttaacatatttccacatacactatatatttttgttatacttaattattttatttcactaacagtagtaattgcacttcattattatactaattttattattttatttccaatggttatacttgcttaattattttatttcacttctagtgggtgcttcacttaattattttatttgactatttcataagcaatatactattgatcattgcgaacatattagagtcatacagataacagacatgtacacaaaaactacgtacatatattacaaaaataatccttcctcatggtcgacacgtgcatattgaacttcatcttcttcttcctcctcttctagaggtatttcttgacctatgccgtggacgtgctggttgtaatcatcctcgtctgcaatattttccaatccaacaattctccttttcccttcacgaacaacatgtagtttcttgttacacgggtcaactatgtagaacacttgaacaacttgtttggcgagaacgaacggttcatccttgtacgcgttgttagccaagttgacagtggtgaaaccttcattgtcaacttttacattgcgaagatcgacctatcgacaacgaaacaatgggactttgaacttcaagtaatctagctccaatatttgctcaactctaccatagtattgatcacgacgaccaccgtcactagcagtctcgatgcgtaacccactgttctgcactgtgcatttgctgtcttgctttaccgtgtgaaaggtgtatccatttatgtcatatccttaccaggtggtggcactccattcaggaccctgtgacaaccacttaagtgtttcactagacaagttctgcaacctggcaattcggttcttcagccactcgttgaaagaagacatgtgcttgtttctgacccaactctctgatcggcctaggttctcccgtcggagaactgcaaggtgttcgtcaacgtacggcaccacctcagtcatatgctgcaatactgtgaaatgagctttatcgtacaccttccgatccaacctaatagtctttcttccaacagtaccaacaccatcaagcctcccttcgtgatgagatcgtggtaatccaattgaagatgtttctgacatgtagtccacacaaaaatcgatgacctcttcggtggtgtaactctcgatgatactccctcggggtgtgaacggttccgtacataacccttaaggatccccaggtacctttcgcaaggatacatttgcgtcatgaatgctggaccacagcactttgtttgcctcacaaggtgcaccggaagatgttccattatgtcaaagaaagttggaggaaagtacatctcaagatgacataaggttctcacaagttctgcctgtagttcatctagtccctcgggatcaatgatcttctggccaattgcatggaagaaggaacacaaccgctggatcgtgtgtcgcaccttaggaggcaaaatattccttattgcaacgggcaacagctgtgtgataagaacgtggcaatcatgcgacttcattcctaccaacttaagatcttgcagtgaaatgagcctactgattcttgatgagtaaccagatggaacctttataccactcaaacatgttagcaaatcaatcttctcttctttcgagagagtgtagcaggctggaggaaggtaaaccctgccggattccgtggttatgggatgtagctccgagcgaacacccatatcttccagatcttgtcgggcgttgagaccatcctttgtagtacctgggttaagcagtaatcccattaaactctcgcatacattcttctcgacatgcatcaaatctatgcagtggtgaacttcaagatccttccagtatggtagtctccaaaatattgacttctttttcaacatgctcctctcttttgtcttttgtttttccaca

SEQ ID NO: 8567 - DNA, 40204 bp, Oryza sativa
  unsure (1)..(40204): unsure at all n locations
ctaatcaattacctaaatccacactcccttttggaaattcgaatggaatcaagagccttttttgcattgcatggcgacctttgctccggagcaagcgctgctgctccaattctttttgctgggaattacgcgcgccaccaacctcagcttctacctccatcattctctgctttagttgtgaaagggcaaattaccttaaatataagtgcgagagtccctcacctcaatggttagtttttgggggtaggaaaggcccttttacgatcctacaattcgtatcagagtctggctagtttaacatctctgacccgatagacagtgtgtgaaggactgatggaccgtgggtgcctgcgggacccgtatacctgagggaccgtgatgaaatgatgaagtactgagggacaccaatgtatgaagggggagattgttgaatagtcccatatttggtgattgtggaccgtggtgaaacggtgaagtaaggactgagggacaccaatatatgaagaggaagattgtaaatagttatatattgattgtgaaagggtaaatgacctaagatataagtgtgagaacctctcatctcaatggttagcttttgggaatctgcaggccacatttgcgtcacactgcagcgaacgccctgatccctttccgcatttctgtggtgctgcatgctgggaaaaaaagagaaaaagtccgacggaagggcaacaagacacaccttcaccccagatatggtacggagtagagttcgaattggacggttatttgagttgaactggcaaaaaagtgagttatatattctgtgcactgataatgaatccgtattgaaatcattaattagattcacacgttgtatttataattctacattgactaataatgaagacttgctttgagtagaatattataaaaaaatccgaaaaagaatcccatattctaaaactggcttaacagtcctttttaaacatgcattcgggcaacacaaccaagatttgtaagatgtcaagttctgcttaggtaataatatctggtgatgttgatggtgtcacaatagaaattgccagtaaatttgttggataggattgttaaaattgtgaggtaaaaacgtcatatcacataggtttttttatttaaaataattgtgtgaagtgagtgtagctcaactggttagcatctttgtggtggaaccagcatacccggattcaaattctagatttgacacgagtgttcatatttacgactaattattatttcagtagtaggtgatatatccgtcaacaacgagacgtctatggtaacttcatcaatcttaaatattattcggtggtagacgacatactcattaacggcgagacatctctatgatgacttcgtcaatcttaaatatgcctattgtgaccgtttagtgatgagggaataaaactcatagcttattaggacaattttgttttgaagccaaaacatgccttatctaaaacattgcatttaaaacagtatttgatcatgtttgtttcattgtttgctaacataacttgtacacataaacgttgccaaacttacatactaggatttggccatgccaatctatttttttcgaantttgatacaaacgtaagtgctcgtttaaatgcgcgcacactcacctaagagcaaggttaatagtatagcccactactagctataattcatctataaccaatctaatagtcaattcatacaataattgattactatactattaatatatggtcccacctgtcatacgcacactgcatcttgtagtccgtgctgcagctagctacaaatatgtagcccgctgctattatctctcctcatttatgtccttaaaatatgtttgcagctgccttatagcatgctattgtacctgctgtaatacacacattatatttttacagcacatcagaaacagaactgatataccacgaacccagtgagtccagggacatttattacatggatgaaaagatgtgtcgtgcttagctgtgttcttcgtgaacaagaatgtacagtaaatgaaagtgaaataccttatgagcttggtataatatagtactgtgtacaacagcaacaatattttgttggagatcgattttctggtggatttgatctcttcaatattgaccagacaagcacctgaacagcgaattaagaatttaggacttcgattcagatgagagttccaacagttcaagagctgaatgtccatattgaaatacttaatcatgcatggtgtacaggtatataataaacggacccataatcatccataacatcgatcggtttaaagggaaaaaagctccccaactacttctaatgcaaccttggtgagcgaacccatggggccctaaatatagccatgatctggtatttcactacaatttctgcaattggcaacaagtactacatgcatggaacttttcctttaaaaacccaacgtttttatagccttgatttgctgaatatatgctgatgacaccatcaatttggaaccagcttgttttgtttattccttacttttcctcctcctgaatgacccccacagaatttatgcaggattattgtcaggcaggttgtacaaaaccaaagcgttcaaggaattttgtggagatgttagtattgcatttataccactcgagatgatacggagcatcacttgatgaacagcagcgaacaggtttgatttgcaccagaactcgaccttgcgaataaatacggcaataactctactggagtactggtctactctcatcttcagttttgttgcaaaagcatactctttcccttccaaaataaacaaatttagcacatgacacattttgacatatatataatacaaaatctacgatatatcacattaccaggttttgtttgttttaagacgaatgtattacgctacaagctcccagtcaagcatttactacatgctaggagaaacattaggatttccgtgtgtttatttaaaatgattttttttcatgtgtaggtatatttattttttcttttcacatccatattaatttatctgagattagctaaaaaatttaggcgtcataaggttttttgggacggatgtagaaaattttaggctctgtttttttccctgtaccgtgtaaactattatggcattgcattgggtagtagctgatccatttctagttgttttagatcatacgaattggttattgtattacttaatgacaatttaggctgtgttcttttacatgacttcgcagctcttcttcttcgttttccgcgcacgctttataaattactaaacggtacatgttttgcaaaaagtttctattgaaaagttgctttaaaaaattatattaatccatttttcaagtttttttatagctataacttaattaatcatgcgctaatctatcactccgttttgtgtacggaggggaggggttcccaacccctccaaaagaacacagccttagagcaggcacaatagcagactctaacacagctataaacatattttaagaagataaaagaggagagaggagcaacatgctgcatatttatagtcagctgcagcacgggctccaagacacacgggctccaagacacatgtgtgtatgacaagtggggccagatattaattgtgtactatatgttataggtaactttagctattaaattgactataaatgatttagagccagcagttaactatactattaaacttgctcttatgtgtcgagaaattctagcattttttctatctggtttggattatgaccgaggtttgaaattttaaagtgattttttttaaaaaaaaatagatttttaggtgagaagacgctgacttaatagcaggtacaataacaagctataaaccagctataaatatattttaaagggataaaggaagaggtagaagagcagtgggctacagatctgtagccagctttagactccaagacgtaatgtgtgtatgacaggtgggaccaggtattgatagtatagtaagcaactattgtacgaattggctattacattgtctatagatgatttagagctagttgtgggttatactattaaacttgctctaatagtaaaaaaatcaaactcttaagtttaaatcggctgtgagcatgtcttcttgtgtcggcgttctaccttatacaagttgaccacatcggaggttctaggggaaaacggttttattattctctcaccctctcgctcagtcgcaaagaggtggctagagtagagtttggtgtcggttgttagggttagattttggacgatcttggctatagttcctttattcgcttagcagcgatcagtcatgcttagtagcgaccggttcggtgatagatttctcccgagtatatatttggtgttattggtgcgtgaatggtggttattttttctttgtttttctgtttacgacctttagagttataatcttttttttacactatcaatataaactttacactgttcggtaaaaagtcgttaaaaaatcggctttgaggcttaacttaatcgtgtgccggtgggtgggacccggtttcagtcccctcaccaacccaaagatggcaagattcaaccttgcaccagctcagtacaagcaccagctcagtacgcgaagtaagcctgacacacacagcgagggaatagccgagtaaccacgggaaacaacggggttctgaccttgtagggtggagtaaccacgtgacaggggctaagacttttgagaagccagcagtaacttcatctcctagccatatcgctcttttttttaagggtgtgtttagttaacgctaaaattaaaagtttggttgaaattgaaacgatgtgatggaaaagttgaaagtttgtatgtataggaaagttttgatgtgatgaaaaagttaaaagttttaaaaaaaagtttggaactaaactcggcctaaatcaaaacaagccatcgcttttagttgtgtttagttcacgccaaaattaaaagtttggttaaaattgaaacgatgtgatggaaaaattgaaagtttgtgtgtagaaaatttttaatgtgatgaaaaatttagaagtttaaaaataagtttggaactaaaccagggctttatggcttaggctcaccccgaggaccgagtttgagcaatctctccccggaagtgtagaggcgtaattgctttatctcaaaataaattcatttttcatttgtcctatagagtactccctctctaaaataacgaatcgaacctaatctaaacaaatatgtactaataattatgatgtgttatactctagtactatatcggtttttcttacgaggcagtacataccaatgtaaaactaaaagatcatattgttctcattttatcaaatctcaatgccattattttttacttaatctatttctattacatttattcattaattttacgaactccgatgtaataattagccaaaaaaacttattttaggataaatcggagaagctaaaaataaacttattttgagacaaatagagtagattttaccttgatttttcgttagcacgtttttcaaacggttaaacggtgtatttcattaaaaaactttctatatataagttgttttaaaaaattaataaatcaatttttaaatttgcaataattaaaaccgactagtaattaatcgtgtgctaatggctttcttgttctgcgtgtgctaacttaatcttcatccaaatgtatctcaaacgggacctagctgctttcgggagagaaggctaagaatttttctcccatgcaagtaaaatgggatagtttatgagcatatggttaagtaaatattagcttaaaaattaaaaaaatagattaatatacttcttaaagaaaacatatatatacatataaattttaaaaacttatcatttagttgtttagaaaacatgtggatgaaaaaacagagaatagaagttcacgtcatagtcacacagacttcatttcctacttcgcccgagtttagttccaaaatttttttcaaacttccaacttttccatcatattaaaactttcctaaacaaataaactttcaactttttcatcacatcgttccaaattttaccaaactttaaattttgacgtgaactaaacacacccttcgttaaaaaatgtcaagtttatttttagtcaatcaaactaagaaatacatatttaattggagcctacgaaatacaactaaagtacgaataaggggcatagttatttctcttcactgatagtttgtctgaaagttgctagaaacaaaatctttatagcacctgataaacatatactgtactaataattacttcctccctccttaaatgtaaaagattctgactatgaattacatgtttaaattatgaatctggatatgcacaatctgcatatgcacatagatagatttatagatatggtccataacatttagagtcgaagaaaatagtacactatggccctttttgaatcaatgagttattttttagcccgcccttaaataaccccaaatagcctaaaagttccaaacacgtgagctatttcagggctatttggaaataacccattaaaaaaactatctccctcaagggctattttaggtgggacttactgaaaaagtgtcttttctctccctctctcttcatgggaaagtgcattaaaggccaaatagttctcaaaataacccttagatacaaacaacttacagctattttcttatgctaaaaaaatatttctcaaaacctggcctacagagagaagatgaaaacgtaaaaaaaaaaaaaaaactgaaaggtctttgcctcttgcctcctggaaggccagtccaggccgctgagccgaggcggagtgttcgttattataaagccgcaagcgtttccatttccctccccatcttcctcttccctcccctctctctccatcaccagctcatccctctctagcgctcgttcgcccgcccctcccccctacggccctacgagcgccgcgcttctctttctagccccctcttccgcattactccctcataaaggaggaacagaggaaagactgggcagaggagaggacctatagctgagaagaagcagagcaagtgaaggagaaagccccgtaatcttggccatcctcctcctcctgctgctgctgcaactccggctctgcctttaaacagtgcagcccgggcggcgccggccacgacgctcgtactcctagctagcagcggagaacgaacagcgtgcagggactcgcctcgatagcacagtaaattccattccatatcatataccattccagccatcactctccaccggcaccctgcatttactgctcccccatcactcgccccggcttccttgagcgcgatctccagatcatcttttgtgtagcgagaaaggttggtgctcttcttcttcttcttcttgctgctgcagctggtggtgttgttttttttattggcggggtcggtttcctgctctgttttgttaagtcatattgtgctgtcctggatcttgatccgacgtccgtccgtacgcactcacgcagctgacgacggggaagggcggcgtggtcagcatggtgccgcgcgagcaggcggaggaggccatcgtggctgacagcaacggcaaggaggaggaggtcggggtgatgggcgtcagcgccggggagcacggcgccgacgaccaccacggcggcggcggcaagttcagcatgaagaacctgctctggcacggcggctccgtctgggacgcctggttcagctgcgcctctaaccaggtataactcatcctgctccgccatggccgccatcgcggccatgcagctcgctcgatgaaggaatcatatcgagacgaatccgaaaggcagcgtgactgaatttctgaatttcctggtggtgggtttctgcaggtcgcgcaggtgctcctgacgctgccgtactccttctcgcagctcgggatgctctcgggcgtgctgctgcagctgttctacggtttcatgggcagctggaccgcctacctaatcagcgtcctctacgtcgagtaccgctcccgcaaggagaaggaaggcgtcagcttcaagaaccacgtcatccaggtacccgccccgccttgtcatgccatggccgtgctggccttgtcgcttcttcgtatcctcctcctcatcagtaacggattgttacagcttcttatccccgtctttatgtggcataatcgaaaacacatttttctcgagcacgcattttttccccttccgtttggtcgttttcgatccttactggcttgaaaaatgcctccttttcttttgtgaaaatggcagggggtattggatcccctgcctcccatggctctcttctggttgcttgccgaaatgaaagccgagcctgaatcgagctcatccttaatccttgttcaattaatcacttattactgcaaattttgcataactacacaactatagttactatactaacaactggggctaatgggagaagcttgtgacgttgactggtggcagtggttcgaggtgctggatgggctactgggcccgtactggaaggcggccggactcgccttcaactgcacgttcctcctcttcggctccgtcatccagctgatcgcctgcgcgaggtcaaattcctttcctccccaactcaaccaaccaaccatcactctcccactgtcacttcgcagcgccagtgtaaatatgtagccgtgctgctgcgcaacagtgtgtcgtggtgacagattgggtttgtgcggatgggctgaaaacctgaccgataatttggtggtgttttcttcagtaacatctactacatcaacgaccggctggacaagcggacgtggacgtacatcttcggcgcgtgctgcgccaccacggtgttcatcccgtcgttccacaactaccggatctggtccttcctgggcctcggcatgaccacctataccgcttggtacctcgccatcgccgccctcctcaacggccaggtgagataagaagagggaaactgtccttgtcactttctcgatcatccatcgcgtctactacatgtccatttagcttgggtttgcagtgactgatgatcgtttgcgtcgcaggccgaaggcatcacccacaccggtccaaccaagctggtgctgtacttcaccggcgccaccaacatcctctacaccttcggcggccacgccgtcacagtgtaagcaaagcagaacttgctctgtttgtccagttgttaatactgtacagtagtattagtactaggactacaagctaatcctcctgaggaagtgaagtgagggagaacttttcactagctgcagcttttgcctgccaatgtggaggacatgtcccgattggaaatcaggttctggtttccattccattggtccccctccatggtactggtactcgcacctcactggtcacagtgtagtatagtgagtactactactactactaagcttaattaaaacacacgtagctgtagctttgcagctagttagctctatggcgtacagatcccaatggatggataggggcacttaaaaattccaagcctgtgcgcggtgggaaacagctgcgttagcttgcgaccattagtcggctgatcgattgatatcggtcgataaaaatttataaagatcgatccagctgctaaagctcggtgcgttcatgtgcatgtgcgatgtgctgaactggtgatgcatccaaaaggtcccctgctagtacacgcgatggtttaggggagaaaagaatgggccactatgcattagaatagactccttgagcccctttattcccattgctcgtttatgtgcctaatctattgcttggattattgagtgtgtttttgctttggcatgattagaggcccatgcgaggaataattagcgtttcagtgcgctgttccttcaaaatgcgatggtcgttagtgccttagtggtcgcatgcagttcggattggagatttgatgatcttatagtagtatatatagtatctcctagcttcaaaaatttaatgtagtgctaccagtacttgttccatagttgtgaaaattgaaaatgcttttgatgggttggaaatggaatggaatgataaggggggccagcttcattcaattcagctagtgcggagttcacatcaagctatgcaattccgtgctagttgccctaatccaacggggtgaaatgatttccatcatggattgggacatcttggtgccaaatcatccaatgatgattccatttatatcttactactactattatgctgctaggcttgcatgggaaagtttagcttagtggggcgaaggggacacagacctgctttgagaattgcttcccaattgaagaatgtgagtgtctttgtccatcttgacaatgcccctcaccacttctggtctcaggctaattcaaagcccagtttggtagcgacatgagaccattagcataacatgcatgggatgggatcttcgctagctgtggagcagagtttttaggtgattagtactcgtatttagtggtataaattattattggcaacggccttatttggccgtatttgtcggctcctccatcatttgaccggtggcggatacatgtgttggtgaaagaaagaaagcaattgcgagattccccctgccgccgcgatccttgcatgtatcctgcctgcgtgactaggagaagcagcagctgtagtagtagtcctactttttggccgtatcatttgatcaagctgattaaagtctcagcatcattgactcgcatgtgccgaggccgttttgtccgttgatttgttgattaataacctgcaagaaaagaaaataatgactgattgggggtggctgttttggattggtgcagggagatcatgcacgcgatgtggaaaccggccaagttcaagtacatctacctgctggcgacgctgtacgtgttcacgctgacgctgccgtcggcgtcggccatgtactgggcgttcggggacgagctgctgacccactccaacgccttctcgctgctgcccaagaccgggtggcgcgacgcggcggtgatactgatgctgatccaccagttcatcacgttcgggttcgcgtgcacgccgctctacttcgtgtgggagaaggtgatcggcatgcacgacaccaagagcatctgcctcagggcgctcgcgcggctccccatcgtcgtccccatctggttcctcgccatcatcttccccttcttcggccccatcaactccgccgtcggcgcgctcctcgtcagcttcaccgtctacatcatcccggcactcgcccacatcctcacctaccgtacggcctccgcgcgcatggtaacctcaagaacctctctgcacatgccctaactatgccccatcatcatcgctgcatgcatgtttttgttccggtacaccgcctcgtccatccatccacgcattcaatggcaggtactagtgcaagctagggcgaatgcaacgtgacggccaacttatactaacaactgggtccgatggatttcatcgacgcttcctccgtgttgctatagctgagcagcggatcggtcgagccatcatcaacagtggcgagactggaacacacaggcaatagaatagacagtggagatctgtgcgcaggcagcagaagcaagcagcagttcgtgttgaatgcaaaagcacagccgggccgtgcccggggcccacctcatacatgggcaaatccccaatcattgaatccagccaacaaccacattaattccaagcagcgcccccccccccccccccctcccctttcgattctggccgctgctttggcagtatcttccccaagagaggttagcttagcctagtcactttggtttagtgaccgtgcccagttctggtgcgctactgctcccatgtatagtgtctcagattaggagcccaaccaaaggtggtccctgcttatctggctggctgctgccgcgcggctcggtacagcggacgaatccacccgtagactctctgtgcaccgtgcgcgacgacgcgaagaaacgcgcggaaagcaacggttgacgccgcggtggatgaggtgggacggacgcgctgctgatgttttcgcgccggcgctgctatcgcgggtgggacatatgtaagacttccgcttggcgcgtagccggaggcgatggcgcggtggtcgccgtcgcgcccgtcaggtcagggggcgcgcgcggctagcttagcttttttcgcgcgtggggggaggggtttgggagatttttgtgcgtgggtagcctttccctctcgatccccttcctttttccgcgcctttccgaaaggcgatcgaccgaacgtgcgtggtagtacggacgcggcacggcgaataaaaccagcaagcaccaaccatgttttatgttgagaatctacaatacgcatctcttttttgacgagggtttatgttgttgtttgcaacagaacgcggcggagaagccaccgttcttcctgccgagctggacggggatgttcgtgctcaacatgttcatcgtggtgtgggtgctcgtggtgggcttcgggctcggcggctgggccagcatggtcaacttcatcaggcagatcgacacgttcgggctcttcgccaagtgctaccagtgtcccaagcccgccccggcgttggcgcagtcgccggtgccattgccgcaccactagcgcgcgcccgttccgcaccaccgccgccgccgcggcggaccgtgacaacgtgcaccgccgagcccggagcaaggaacctcgctctcctggccggcacggctgcaaaaattcagtgttgcttaggttttggtcgccttgtaatatacaaagcctctcctcctgtgctagggtgtcacaccaaaatggtagaagaagaagagggcatgggtccctacgatcttgccccgggccgtccgctgccgcgttgctttcccccgatcctcgatggtgtccttgtgtttgtttggcttgcccctccctctggcgatatatatgtgatggtcgtcatggcttataaagattttcagctcatgtcacattttcatatgatatgatgtagcatatcactatagggttatttgttttctacctggatggagcttggtccatgttgtctagcgcgagcaattgtaatcggcgattcctcgtgctagctaaaggcaaaacacggaggcctttgtttattgcgttccgctttggatgttcttattgtaaatgtagagcgattgctcgcttttttttttcttctcttccgtatgtgttacctttgcgccaagcgattaaagtttcttgagaaattttatgggcttctttgaaaggaccacaaagcaagggagaaagatatggagcaaaaaaaaagatgtgctcgtagtaatgaatggtggtcgagtggggttgtgatgcgggtgcggcgcgggtcggcgcaagctataatgactcgcactctgaaacttgcttgtgaggctcaaatgctcatccagagttctaaagatggaggctaccactactggctacactggctttgcatagttgacacagcgtgtcacgcagcagacggccctgattagcagcccatcttatcacaccagcatactgatacaccggcggttgaggctaactttataaggattagactccactacttgtactggtactagtagtagtacaattcatggatgcattattgttggcttgtgcttcacagcatcgatacggactttggttagagagaagattgtgctttaattcgcccatgtgggactcctaggctctccccaagccgttgcaaatgggattctctctaatccctcactccctcgggcatcagccttcacatggagggggcatgtgcttctattgacaggtttctctttccagatttccttttgctggtatctgtgttccttccaaccatccatgagagggggggagcgaggtgctaactgggggagcatgtgctttcgacttcacagcatatagatgttttaatctgacagcaactggccgttgatgatagtttttgtttgatttgatccctgtgttcttaagtttgaagtgtatatggtatagtacaatatacttacctctgctcgagtcccatcttgcacatggtaatgccacttgccgttgaatggaatcccaagtggaaaagaacatcaactgatgatctaaagaactatgcttagtgcttacttctatttgcaagggaattgttggcgatgctaagatacgcctcaaccatgtggagcatatgcctaattttccgataactttcgctatctgacaggctacatgtaccaagctatgagtttgaggtaaagaattatattatctttcttgtataggcgcaatcttgatctgataatggcagatcatgaacacgcgccatgcacaagtagttaggcgaacatatagcatgtagtttagaaatgcaaatcgtgcaatcttacaggaccccgaagctttctagtgcaactggaggacagcgatttgagattacaggatcgcaagaaaaggctcaagatatccgctggtccctggtaagaagctcataaggcgtagctcaattgatgcaggtagccaggtacttagcccacccaacgcatcatatagcatctacttttcagctcaacagatctgaacacacctggaaccaataatgaacggtatctcgcaaagcctcttgtttcctcgtccaaagaccaaagtgagttgaaacagttcactgattgctgaagccaatgtacgcgactgttacaaggcattgttaacatcagcagttaaaatcccaacgaataacatcagttcggtacatcatgtacttgaatgagaggaacagtgaaacttttgctggggggcaacacatccaccgaaaaatagcatgtttactggcttcgatcagaacaagatgcaaatgtccatccaggattggatcatcagcttaaccaaaaccttggcattccagagtcacgttcagctgcagcactgttgttaggtagcctctgtattctacttgagaactcattagcctatgaaaaatggacaaagggtcaattacagactttgcaaaaaaagactgaaaactaattccaccaaataatcactatgcaaaacatgtggcattgatacaccaaatatcacttaaaggaagaaaaaaacaattgggatcaagtttctctggttttgcacttttgctcaaagcaaaggtaagattcaccaaaccatgcgaaaagtagagcataggtaaaaaaaaacaagattcaacaggacagtatataaaagcagaaggatatgctttcattatttggtcaaaggcaagattctatgtaacagtgcaataaaaggggatcaagttcctaagccgaaaggattctactaaagcctagcataaaatctggaaatatcattctgcgtcaaatcaatattattgcttgcagcctagcacagtagcacaaataccctcacaaactgtgaggctgtaagcctgcgataagtaactaaagccacctcaaaaatatgagcataaagtggtatacttgagttaccaaccttctcatcgatccacattaaagaacgcagttgattatccagtatccggacagcaacatcaaatggtgtcatactatcagcagtctcaaactcagcaccctggattggaggaggctgatgtctaagacacaagtcatcactagacaagtactgcaaccagaatacttacctgagtagcattcaatgtctgaatgatggacttcacttgttctgtcatatgttgcaattcattctccacagtttcagattgctcaaaccttggcattgcaaaattattctgttaagctgatgatgtatattatgatataataaaacattaacataatcatttgtcctcacaaacaaaaaaaaacagctttgtcagccaatttggcaattcctcaaaaaaagaaaaaccaagctaagcaactgagtggggcagaatagattatgcacatatttcgagtaataacaccactattgagacaggccactcaggaaacaaagaatatcgtatgttattcgattcaggaatatttttaagcaatgcacagcatttacttagcttaagctgcatttattttagatcatgtgcagattattcatgccacgtttccaaaaggaacttctccaaaaactgtcgccttcagaattgcttaaatgcctaggctgtgttcgtttgttatctttcccaactcacctccctcgttttccgcatgcactcttttcaaactgctaaacggtgcgttttttgcaaaaaaaaattatatacggaagttgctttaaaaaatcatattaatccatttttcaaaaataaaaatagctaatacttaattaatcatgtgctaatgagttacaccattttgcgtgcacaggagattagttcccaactgcaacaaacgaattcagccctagacaacttgttctaagccatttgttatctttacaatatataatatttaaattcatcccgataagcaatcatccataatctgtccaatcaaacatttcaatgcatcctaaatcgttttaaagcaattgtcttaatttttgttcccgaagtgtggtgcactatttatttgcattactgttactaaatacaaacagatggaagtagctgaatccaaatggtgactaacattgtatctcttgcagaagcagcctcatcttcacgaagcaacagccgttcatcctggaatacccgctctgcttcctcctccatgctctgcagagccttgtcaacctgcaattatataacgagttgttcactagccagtacctggtggttaatatcggaatagtcacagtttagccaagtaccaaattatggaacaccaaaattttgattgatagttcagtttgtagcaatgaagttcaaacagcatatgcgattaatttttttcccacttaaagaggtcagaccaaagcatcatagtatggaactatggaagcaaacaacaaacatattactacaggctacagcagaacttttaaatggcaactgcaatcatcactgggtaaacaaccaaaacataactctgttagcactgcaacaaattattctcgaagaaatttctttgcacattaaaccatagtcagaatttagtcttaagcaaaaacaaaaaagcatcacatgtcatgtacaaggtttacattgcccccaaaaggccatacggacagaaatttaaaaaaactcaaccagtgggggaatgactgcccccatgggccacagcttttcattaagaagaaacctcaattcgtggatttcccatactaccagaatttcaaataagagttttgatgaatttagcatgtgatggtcacatcaaatctatgaaaccgtgaacattgaaccatagggaacaatcctgattgttaaggtgttaaagctagatgaggtaacatatcactgcctcaacaccaaattatgcgaggcataaggcaaagcgatgacacataaagtggctgcacagcctggttatgggagaaaatgggaaagaaattaacaagcgaaagagaaaataaaaggaaaaaaaaaccattggaccaaaagacggcattgagacatgtgcgctcccagctatgagaagagcactaggccactgacaagatcaatatgcactcttctgctggccaccttggcaagggagcctgacatctttgcctaccggtcgtggagcttcaatgcatccgcttgtctagctgtccaccactgccactgccagaaatgatacagtggcagcgatctagagctagtctgatggcactggtgcaagttctgcgacactaagctggagggagcaaggaagagatggacctgaactatcaacactcaactgtccttgaacatcttaccatttcaccctttctttctcctgcgaggcaaggcagagcgacaacacctctgcacatcttgccactttagtagcccccttaagatcatcttaccatccagagggaggataatcacgatgccatggaaaaaaaattcctccataccaataacccagcttatgagagacgattataaaatataagaattgtaatgtattctagatgacataaaacttagaaaaggcattccatattaatgcattctaaaatgcagcttggcagttgaaagcttgtcatccttaaaaaaaaaatcagtcaacctatcttcattaaccatattgtgcgcaattgtgtaaaaaaggagatgacagccgaaatatgatgcatccctggcagcatagcatataaataatgagcttacaggaaagcaattcactagtcaatattatgatgtcatccatggggatcagcaaatgaaagagcaaacaagcatgcaacaaaaacaaaagtcataactagagtatgcagaagacatgaaatatatgcatccatacccacctctttctggtgagtttctattaactcaagttgcctctccaagcttgtttgtgtttcaacaactttagccacctcagcctgcaagggacataaaatttattttaaatcacagcaaatgatctaattatataaagttcttttgagtaatataaacatgtatgcatgctaacacacatctatccagaaaagcaccagctcaagaggtgataatggtgggaagacaacatcagcactaacttaattagtactaaacgaagaaattcatgaaatgaacatatcttctcgcattaatctaatgtgaacgataggcagctgagagggagatcatcatagctatcaatatttaccaagagcatcctagaaaaaactataggagatatcacatgtgaagtatttgaatcaagttaggggagctgaaacaagttatttggatcagaggtagcattgcacatgtatttcgcaaaggcagaatattggcatagtttttacatcttcaatcacagtctgactagtgatagggcattgatatacacatttccctgctttacattcgactgataaagctcaccagtgaacagcaaggaaaaagcagttcgttcactttcagacttcctagtttttcattttcctaatttctcattccatcaataatcaaaactaaattacataaaatatatgcaaaagggtgaggataaataaaaaaaatcatgtacacttttaaaagcaacaatacatcggctttacatgaataagtcaaatcaacatgcattgcgcaagacaatcatctactagataatcaaataattattcatgtttcatgttcaatttaaaactactgctaagaatgaaacctccaagtctttgtaagtttgcattaccagtgataaattctagagtccatagggtaagcatggctattcaaatccaaccaggcttccttctaccctgctttcaactaattgtaatcatttttcataaatattgtctttatgcaaatgactttgcaaaaccaaatcagcaataaagaagtaaatatataaccatcaaatcttctgatattgatctagctgcaaaagttcatatgaacagaactagaaaagaagagctgtaaaatgtaaaaataagaacatacctcaagccttataagaacagtcctgttctgcagaattctcctgtcccattcagatattgcagtggcatgcttccggaacttcgcagtgcgatcttgaagttcattattccagtccctaataatctacaatatagataagttcgtcggtaaaatattactgtgttgctcaaggtaattaacaagacaatgcaaagtcaaactagaaagtaagtgttgcagtagaaaacaacaccttataaccgcaaagaataggtgcagtacctgctcaacatttttcccaacaatttctgatggtagcttaggtgcctgtgatgctactggagtgatagcagtagttgtaggactgcaccaaaagaacagggaggccatgaacaaggtcaatatcttgtagcccagaccctttaataagtatgctagagataaatcgacgggatttgtacaaacccagtgctgctagcttgaacagctgaggaagttgcctgactagtgcttgtgatggtggttgaagtacttgcagctacagtagaaacacctgttgaaaatacccgcttaacataaatctggacatcatcaaaatagactgaaaagtgataatcaaaatagactgaaaagtgatcacctcaagatttaggaaacagattgcaaggtaatgattatagtcaaaacagtgcgttacaacaacaatttcctgtattgcataggaaaggcaaatgcacaatgatcgggtcctcaaatgatgatacaaataagttatttgcgatgttatgagctaaatggttacttgcatgagggtgacatttaattgttcactgccggtaaatcaaggtatgtaaatggtatggtcaaattagactgaaaataaaacaatagttttaacaagaacatgagcactcaccgaatgacaatattgactgtgtctgtgttgatggagctgaggcagaagctggtgtagttctctgctggctaaatagtgtagcagttgttgttgctgaaggagccggcgttgtcatggctgcagatgtcgatgcacttgtgactgttgtggtagtagctgtagtagccgcagctgatgatgacgatggtactactgtgaaactgaaaccaccagcagaagaagcaggtgctggcactgagaacaatgaccctgatgtcgcgggggaagcagtagctgctgacggtgtggatgcgctcgttgcagaagcagaagcaaatgccggtgcagaagcagaagatgagccaaacggaaagctgagagaagtggcagacgagcttgctgctgcactggtgttagagaacaatgagggagcaggtgctgccggcgaagtggccaaggagaagccagtagatggagcagacgctggcgtggtgggagcagcagagctactcttcgtgaaggagaaggcgggagcggaagatgcagaagagaacaaggcaggggcggtgctcgcggtcgtggtggttgccgatgacggtgtgaagccgaacgacggagcagaggcggcggtcgctggcgacgatgagaagccaaaggacgccgtggtcgtggccgtggtcgctggggacgaggcggtggtggtgctgaagagtggtgcagaggtagtggatccaaacagcgccgagccggtgcctgctccaaaccctagagccggagaggaagccgaagtagtggtggtactcgatgcagcggccccggtgttcaacccgaagccgaaagacggtgtcgaggcagcagcggtcgcggcagtggtggtgcccgacgcagctgagccaaagccaaagcccgtggcggcgccagagaaaaggcttggcgcggaagcagcggacgcggcggccccgaacagaccgggtgcggcggcggcggcggaggtggcgccgaaaggactgggtgcggtagccgcggaggaagcaccgccgaataagctcggggtggtcgccggggaggaggtggcgccgccgaagatgttgggggtggatgccgcggatgatgcggcgccgaatacgctaggggtggtcgcggtggcgggggtggaggacgcgccgaagatggatggggcggacgcggcggcggcggtggattggccgaacgagaagccggtggatccgaagccaaacggagatggggatgaggaggtggcaggggcggcggcggaggcggcgggggcggacccgaatagggaggagccaaaagtgggagcggcggcggaggaggaggaggagaagagggaggagccgaaggctggggcggaggcgggggcaggggaggaggcggcggcggcggcggcggcggcggcgggctgagagaaggagaaggctgatggggcggtgccggtggagaaggagaatggggaggagccggtggatcccgacgcggcggaagagccgaaagagaaggaggtcgccatggctgcgccggcgtgagcgcggtggcggatttgggggatcttcttttggcagattttttgcgtggttttgccgcgggctcgtcggccgcgccggcttgagaggaaggggaaggaggggtttggggcttggttccttcgtgggtaaccgcttttttgaagtagggtttaggagggggaaaggggatttgggaggaaatgttggttgttcacttgttcttgtgccttcctggtacgtatacctaagcatgatgtgtgtgttatccaccaaatttgaactagagaatggttcgttctcacttatacgaacctatcgtagtaggcaaaatttgttataggacacccgaaaatcgtgtaattggttgtgagacaccataaaattttggttttgcccatggacactatgaaatttgtgaaattggctgtgagacaccagaggcaatattttatagtttccgaggcaaaagaggtcaaatattttttaaaaaagaccaatctaccccctgcacccagctgtccatctccctccccaacccgatttcccagtctcgaaccctaaccctaggcgacggtggggccggcggcggtggcggcgccggcggagacagtttcgacaccggcgaaggtgttgaggacggcaacgggatcgagatcacctgcagttgcaatggtgactgcaactttagcagtccttgtgtgaccgttagatcaaagaaaaacagctcagatttgaccagaacactgtagcacgcacacatagtcctgtagcgcactgtagcatgtactgtagcattggcaccttggttgtgacgtggcataactatctgtcgttgatcagtttgatccgacggttgcgaatggatgtgactgcctaacttgcagtcaccgttgcaactgcaggtgatctcgatccacggcgacgacggcggccgctggagctgtgatgatgacgcagtaaatcgatccttgtggcaaacccgacgagtcctggcggcaagtgcacggtgcggcggtttcaagccgatagcggtggacggcggagctcagtttccaaatggaggacacgttctctgcacagccgtcagttaattaactaattaagttgtcctttggtgacaaatatttcctggtgccatagaccaattagcatctgagtggattataacagcaggtgcatcgtcgccgtgcaggattgaggaggaagaagcagccaaaggcaataatggcgcaggcggagaagacgagcgagagattttctctgtatgcggaatctcctgctcgcttgatgtcaggatcgcgccaggcaaggccctattcgcgtctgtgcgcggcgcggcgcggcgcgcacacgccatgccagcatgccatggcatgccaattgcgtaggggtagattggtcttttagaaaattatctgacctcttttatctcagaaattataaaatattgcctccggtgtctcacagccaatttcacaaacttttatagtgtccgtgggcaaagccaagattttgcagtgtctcacagccaattacacgatttttgggtgtcctgtagcaaattttgccgtagtagtaaaagtcagggccgtctctagaaatttagggtcccggagtgaaatgcaaagtagggccctataatttaaaaatcatgtacaacataaataaaatatattttcacttaattatatagatgcaatatgtgttctaatattatgaatttactatatatatcatctactcaatcactgtctaatcttacccgtctaaacctccgaggtcgagttatcgagggttgagtcgacgatgaatagcggatgaggaggaggacggcatgagctagcagacgagacaaggtagcaaggcaaagccgtcgccgctgccgctcggagcgttggaatcgcaagtagcaagttgtatcgctatcgccgccacctcaatcgccgtgaatggaattgggatcgtcgtctcggtctctgaaatcggcacgtagaattagatcgctcagcaaccaacaacaggacgaaatcaacgatcgcacaacatcctcttgattttgggcaaggcctagcattgttgatctatccattgggctattgcctattagatgatgttgtattgcattgctatatttaaagtgggccttcatgtttatatgggccccctaaaaatgggggccttgtgcgggtgcctatttggcacatggccatcgatggccctagtaaaagtttcaaatgtttgttaatctctttgcatatgcattgaactatcgtcatatgttccctgcaaaccatttgaaatatttatgcgacaaagtaaaagtctcaaatcatatttgtgaaatctcacatacttaggaaatacatatatttttcattcattacatcactttttttgtccatcatccatatttagttgcatccagatcgttcatccgtaaaacacaaacacaatgctacgattgttggtaataaaaaggtgacccaaatcgcaatgtacttaaattcaaaacataccatcaaggtttgcggatacatttagaaggcaaaactatatgttgtcatatcaaacacacatagagtttttgcctttttattttcacttttcttgagtggcatatatcgaaccagtaaagaaaacattgaaaacacaaaatcagtaagaaattctaaggtgtgtcattgataggaatctaatttatcaagttgcgattaatgaagttacaataaataccatcttataagacaatttgtataagaatgttattgacgtgacgttccatcgatttaactttgttagctcatgtggagtgaacattttaccactatataacaattaagctccttaacgtgaaaagaacaatgatatcgctgcaacaaatcacgctctagcaaacatctccaagcccttcactcttataaatccgttgtcgctggaaagataaaaaccacaaccatcaaaaggagatcaccggtgagagtgctagcaaactttttcatgggtggtgtggcggcggtagtagccaagataggggtcatgtcgggaatcctgtgctgtcgcttcacgccaccgccaccgcttgaaatgcacgttaatgttgttttagcctataactatcttcgtcctcacctagaagcgatgtgttactaggctttccttacttgcaaccgtcctaactatattacgtacatggtaccatctattttttaaaataaattgatataatgatttattatagacagaagaatgtgaaactaaatatacattaagagtacaacttaaaattatttctctcctcgtagaaacgattatccgtctataagaaagttaacggggaaattccggtgatcaatgtcgagataacgttccatctcaaagaaaaaaaactgagaaaaccataatactatggaaaagtctatacgtactaactttttcttactaaatttttactaacactgacatgccatgctataagtgtatctagatttttttataactttcatctacttgaatcaaacggttgagatgattgttagtataaatttagtaagaaaaatttagtacgtgtagcggtgctctaatccttttaccgagtagcaacaggctaacagattcagagtaggcagttggatctcaatcccatcccgtcctctaaaaataaaacaaaatcgggaacaggaaacccacgcacgaatcgattcccatctaggcatctcttcccagagagaagaaaaagaactctcccgcagccgatccccaaatccccacgcatctcatggcggcgagcctgtggcgggcggtgatgggcgccggcgcctcgtcggcggacaccgacaccacgggcggggtggagttctggcgttcgccggagcgcgcggggtggctgaccaagcagggggagtacatcaagacgtggcggcggcggtggttcgtgctcaagcaagggaggctcttctggttcaaggactcgggcgtcacgcgcgcgtcggtgccccgcggcgtcatccccgtcgccacctgcctcaccgtcaagggcgccgaggacacgctcaaccggcagttcgccttcgagctctccaccccggcggagaccatgtacttcatcgccgactccgagaaggagaaggaggagtggatcaactccatcggccgctccatcgtccagcactcccgctccgtcaccgacgccgaggtcgtcgactacgacagcggccgtcctgccgcctcagtcaccgcagacggcgacaagtgatcgatttcatcgattgattggtgagcaaaaggacctgtggttcctgtaatactgcagcatatccatggtacttacttaggttttgcgattatggttcatgtttcttgatttgcgaacgtaagtgtgcatttgtatattactgatgcttatcggggaataaatttgggagtttagtgtataggatgcgctctgatactatccaccagttcactccatgtaactttctttaataaggtacgatttgtttggtcaattggtctgtgtttagttgtctaaattcttagatcaagtgtgttggtgaaaccgtagcaaatctttcaaggttagtcctgactaactctgcactcttgcccgtaaatagccaactggctttgatctatggaattataattcaattgtatatctttattcatgatcttggtttgctatagcaactgtatttgattgacagtggtgaacttataccagtgcttagtgcttatgcacagtaaaagcgggctacctcacttttgccttcatcagaagatgcaatccattccagaattcctttcctgtgaaatagatatatactttgttgtttaacagattcaaggtgcaaggagtgattttcaagtatagctgtatgattatgtgcataaagcacctaactgattatgaaaacagttgcaaccagtgatgttataacttacagtatagctctattggtcacaactattaagtcaatcaaatacctccatcatattgtcgaaacaccaaggctgtgggtttatgataatgaatattctaagctatagatattatttctaattggctggcctgattcataagtcccaacaactgttggccttcatggaatacatgatgagcaatattcagtatagacttatggagctaatccgttcatggttcattttggtgacacttgttgatatctttgtagtaaatattgttatttctctttcgttttatcatgacatgtgagtgctatctgttatgtttgtttaaaggaatcattctttgtatgcctagaaagatgcttcctgtcacaggttgtattatgtaactttttcattgtaacatgaagttaaaactctgataaactcatgctgacataaacttgccatcagtttatcatgctgacataaacttgccatcagttagatgtggtctttggagaagaaactttgtacttcctccgtttcacaatgtaagactttctagcattgcccacattcatttagatgttaatgaatctagacatatatatctgtttagattcattaacatctatatgtatgtgggcaatgctagaaagtcttatattgtgaaacggagggagtactttgaaatgggtaaacgaacatagtctgagatgcaaaataaatatctgaaaccaatcctggttatgaattatgaagcctatatgggtaaatttgtcaagaacacatgtttatattcaagtattttgttgttttgaataattactttttgtgttgaaaatccaaaattctattaagtttcagtaatatttttgtgtagtagataagtagaagcttattgctttattttactcaacctgtcaacataatttaaatctctagtgttcctttcttaagatgtctgtcgtctataaagttagtctgtgcttgctgttgtgtcatgtttttcaattacacaaccattattacctgccactttgggtttaactaaaaggtagcttgtggcagatgtgggaggaggctaatctcatgagattgttgaacactagaacttgatgtcgccattatcaactcaaaaaattatttccatgtcagttaaaagcgtgtagggtagaaagatgtactgtgaatgttacacatgcataatgtactgagccttgtggggtatatatagattacaaatgcaagagtgtagggtagagagatgtactgcgaatgtcacatatgcataatgtactgagccttgtggacggtatatatagagtacaaatgcttggatctcaaagaatcatagagacaaaaatcaatcacatcctaccataacaaccggatcatttccgttcatatccatatactcttaacatcggtgatacatgggccgtttaacactggtgcatagtaatatacctaacctttcggttttgcttgcaactatagtacatttttgtttgttttgagaaaggtatcgtctgattctccttctattgattcttttccgatcaagatgtatggattcatatgtctacatacctagattttggtcatgaattaacggaaatgtgcgagagctttatttgcctttgccattctatgagtcagctcatacctagattttattcatgaattaacgaaaatgtgcaagagctctatttgcctttgccattctattctatgggtcagcttgcattttgcgtatgacacccccaccctctttagcagcatctactaactcggaacttaatttaaaagccatattttgacccagacgcttttgggatgcttctaataaccaacgaatggcaaatgatctcccttatctatatcctattcaatcagaactttccgcatcgatcctttttattacgtcttgtttttactcctatattcttgtctagatcctattcaatcggaactttccgcgtcgatcctttttattacgtcttgttttcactcctatattgggatttaccagtaatagtccttcctttagtttcagatccttcaaggcttcaatcctccctcctagaaccctgttccctgcatttgtatgtcaatgaaatgaatgttcgggtgaactgtatgtctatcgttttatctactcccatcatacgtgtattgttggctgtatatatccacctatggatatagaggctggatttctatccattatcttaaaaaaaagatcatacgtgcattgttgtcaatgtctgcagtgcacactttcatttgctagagcaaataactcacgcggtcatgccctcgttccctccggtttgtttgcacttcagttccagctagcatccttttcttctgttgcattgatgccgaagcgagaaggcaagaaaccatttgccatggtgctcgaaggcttgtaagaaaacacgggcatttgttgtgacttgtacggttgattagacgagccgtacgactaggatgttgctgcctctttttttttttctcaacacgttacagtttcctacatacaatatagcacttcatcttgtaaatactttttcctcccctacttaatataacaccagctttgttggcttcatttttttaaaaaaaatatatactcactccatttctaaatgtttaacaccgttaactttttagcatatgtttgactgttcatcttattcaaaaacttttgtgaaatatgtaaaactatatatatatatatatatatacacacgaatcaaatgataggaaaaagattaataattacgtaattttttttaaataagacgaacgatcaaacataattaaaaaagtcaacggcgtcaaatatttagaaacgaagggagtatataacttttttttaacatatatagcacttcatcatctattaacccaccacaagtccacacctgtgcagtgctgtgcagagctagtctcagttggcactcccggacggcccggtcgcccgcacggcttcgctgccgtggcggatccagtccacggcagcgggcgtcgcaagtcgcaacgcaacgaacggcaggggcagacggatgcgaaacactcggcgcgcgcggatccgacgcgagaccagggcagctaggagaacggggacaggagggccccgcgggcgctaaccgccttgtcaccacggccacacacactgccgtgcgcgcgattccctcgtcccaccctgctgaaaaaggcccgcccggagcgcgaatgcatccgtgccgcgtcaagcaactctcggtggtgtggtgtccactgtgcagctcccgtgcaggcgttccgctttgatggaaaccgccgcggccgtggtgtgccgaggcggcgggctgcgcgcgccggcgcgtcgcggtggcagtgacagcagcacgacgcgcgcgggtggcgttgctgcctccccggcgcccgccaccaccgcgcgacggaggccgctgctcgtcgcgtcgctcggggagcccctcatcacggcgcaacccttgtcgtcgtccctgggagatggcgccgcggtacacgagacgctggctcgctccgattcggtgatcccgtcgctgaagccgtctcactgcgttgatcactcggtccaggttgacgccgacgaggagaccggctccaccaagacactcccacctcctgatgacggtgagctccactcaaaaattacaaaatcacaagacgatgcgattctcttaaacagctcatgatatattctaccctccagttcctacgaagacagtgcacgtcaaattcgtgctgcaaaagcggtgcgcgttcgggcagcgcttcctcgtcgtcggcgacgtcgcggcgctcggtctctggaatccggcgaaggcggctgctctggattggtccgaagaccacgtgtggacagtgaagaaggtgaatcccatcacgcgaatccttccattctccgtgtataatctcgtaatgaatcatccccacttctgatctgtccaggaattgccagcagaaagatcgatcgagttcaagttcttgctgcaagatcgatcgggacatgtcgaatggcagcacggtcgtaacagaatactgcatgtagctgacacctcgaacaccttgattgtctgcgaggactgggacgaggcgaagaatcagcaagtatcagaagagattggtgacgcagatgggatattttcaggaagcgatggcgtcttccaggaagatgagcttcaactgggtgaagaacaagagaccaacaagggtgtgactgtaggtgtggatgatgcaaaatcggctttagtcacttatatttacagggaaatgatgggagcaaacgacgcgatccagccacaggtaagttgcctggtgacagtattgttctgtgtaaaagggcagcaaacatttatgtgcaacaatatactactccctcagtattttaatgtatgacgccgttgactttttgacaagtgttttacatttcgtcttatttaaaaaatttatgtaattataatttattttattgtgatttgatttatcatcaaatgttctttaagcatgacataagtatttttatatttgtataaaaattttaaataagatgagtggtcaaacgttagttaaaaagtcaacggcatcatacattgaaatagagggagtatttaagatcagcttcttgttaatttaatcgtccctttttcttttctaaatcagttagcattggacaaacaccacaagattccagatgagcttagtggggaggcaaacatggcagcacaagatggcaatcacactgctactgcagccgcagcttctggttttgctggaagcaacggtgaggatgccatcttgcacaaggagggcgatccagtagagaataataggctggggctggccagcattttcttcaatgacatggcctggaccaggaaagccctgcagcagttgctccgaagccttggtttccaaatcggcacgagaaaaacatgaagtaagcatcagagacgctgacctgcagttttggctgatcacacggtctcgcggtgccttcattcaaaactcgaaagcttctacatgctgcaaacctacaaggaacaagtgtattgagaactgcaacaaaaaaccctttacgttgctaaggtctgcaacaccagcagtacttgttagcagtgcaaaaagagcaggaaagctgttagcagtgcaagtatgtttaggaccagtaatgactaagctaccaaaaaactcaattagtgaaatgcatattgtggttaaatttatctgttcgataaattctgtagaatacatctagaataagagccaggaaaagctgaaagtctggagatttggcataacatgtgctccataaccacaacgtataagctcaaccacatgtactttaatccaccagatttacgttcatttctcaatcatttcagttgtaatgctaatatgctcttgttctggtgatctagtaaaaatgatgtccatgatttgcaatgctttctttaatttacataagaaagctggcagcatttaaaacatgtaaacgtgaaatatcagcgtggacattccactttaattaaactaacttgtttacaaataactgtatccgtcaaggaaacagtcaatattcatgacatacccctacccctacctgtttacagctatccaactacgccagtatcctgtgaagattacagctttggttgtatggagcaaacggtccaaggtcaacagaatccacgatgcaccatgcccaattctctataatttatcaccttctaaactcggagaggcaaaaaacactttgcatgaaaatcatggttcaagaggcagccagccaaccataattggagaagcgcttccagtaataaaccaatggattgccagaatgccacaattttgaaaatggcatgttatcaacagctggcctcacatttcaacattatcaaactcacctctgtgggatataaggggaaattcagctgttgcatctggaataaaaataataagaagagatgacaagctgtaagataagagagacataaggactgaataatgattaatttacatcttactatccagaatacaagatatttttaggaagagatactggcaaaaatactcaatgaagtccagaacaaaacattattcgtaaataaaaatagcattcatctgcaaattaagatatgttgacgtgcaaaaacggcaagcatcaaatagctaccttactggtctcaaatgcttcttgatttgtgggtccgtagttgttttcaaggtcttcagcgcctcttctgcagcctgaaacaaaatgtttagtggtgagtatcaggaaaccgcagcaataaagaggctataacagtgctgttgccccctcgagacagaaccagcacactttgcaccaggcagttattagtggttaatgcaagtaactggatagttaggcaagtcctgataaagtttttactggccaaaatatttccattcagttttgaagtttaaatgtatcaaagtcactagaagacctacttttgttcaaaatgatatcctaataatggtaatgtgtggaccaagtggacagcattcatgggttcgaatcctgagaaggatttaatttgttagaaatcccacaagcccttttggccaaattggtaatggtaaagatggcatttccaaattcccacaaactcttttggccataacatatcacgtgaacacaagctctggtgcactcactgtgcacaccaactgacatatacatactcataaaacagagagtttttttcttttctttttttttccttttggtaaccgctgatatttaatggatttgaattccaaaacttatatataggtggagtaagattagaagtaaatgaacaattttatttaagattttctggtgacattggttagttgttgtgcacaaagtgcacctgaagcatgtgtgcataggaatgtccccccttttagtcgatgttaaggagtatatttacatctcatgttcatgtcagcagacttgaagctcacctgccattaaatatcaaacctagtttacgggggtgttttggccacttcaggaacaacttcaaatttgcacaatattatgaggccggctgaaacaggtagaattttataaggcagcttcttggttcaagcttgctagtgcaattaatgttgggacattaattttggacaaagtcatgctggtggagcattctaggagaatgtgattcgggcttgttgcaggcttgaggcagcaacctcgaaacacagaggcatctttagtattcccaataattgtgcaaatgtcaaaagtcagatcctagttagattagtatacacaattcctattagacagattttctgcaataaagcacaatatcatgtagatatatacatatgaaatgtacaacactacaatctttgcaagccagcaggtgcctcatttatcacatctgcgtgcaagtcagtgcaatgcctgatgcaaatataatttagaacgacagaactcaaaaaagtatttaaagtggcaatgcatcaacacataaaagctatgaacaaaaggcgagagcaatataaaatatagtacctgaagcttcgcaaaatctttgttcaaatcaatgcccctcccaagaatttgtcctcctaattcagcctacaaaggataacaacagttgcaacattaattgcattaacaagctcatataagttaattttaaataggcaattagcaaatatccaatttagtttagtttctaaacacttgccagtataatacaggaatatttgtcataagctaaaaaaaactaggtagcaaccagccggctccctctggcaagtagtaaccagctagttcccttcttcaaacaaaaacccaataccagacaggtgagaactggtctgctccagaactgcaacacccgggtacactgtggtataagccagaaggcccacaactatgctaggagaattctagaacgatgcgactatgcaagttaattaacctggaaatggtattctccatttaatgctgagccagaatcccgtacttgatcgcgaaatactacatgttggtcctccaagcactagaaatagcaattgcaaattacaattcaattaagcaaagttaagaaaagaaataacacattaataaggacactaaaatggaatataagtgcagcagcagcatctcttacaagttctctaataagacttataacagaggacaacctatccaaagcttttgaatgatcctgttcttttaatgtacttccagatggctcttccatagaaatatcctctgagagagtaatatcttcgagaaagccatttccactcccaggaggcttgttcacatctttattaagaactccagcaacaggagccatgaatgacaagtaattgcctgcaagtcagccagataacaggatttaaggcacatggaatttctcatcagtgaatgctttagaaaaagaatgacacctgtaaacacggaattgtaaaacaaacgtaacttttcaagcttgcaataatcaagatgtaaaggattatactcactttccaaattctggagagctttttcagcagctagtacttgggcttcatctcttgtttttccaatgccgatcccgattttttcattactaaatagaacctggaacatcatatgtataggtaacatgaggatcacatgattaagtagagatatcacagcattgctatacaaatctggtaatgcacccgcaagcaaacagcttcagagcaaaagcactggactgatgctgaagttgagagttgagacgccaaaggaaatgtgtctcaacattctaaatatatatttttctcaattagaatttcagcccaagctgttgccaagaccacatggaaacgaagtataatatgtaaaaattcaaaatgccaacctcaacagaaaattgcatgttttttccactgcttacagtagacctgaactccacctaatgaagaaagaacaggagattactctcagctcataagggcaatggcagaaaacaaatataatcttaaagatccaaataccctggattcgcacagccgtccaatttcttgcaacaccgtgacaaataatgagggggttgttgccaatgatcccccgttagattggatatttgtaccacctggaatgccacggagtgccactccgtcgtcatctacaaagattggtttatgttactcgaagcatcaaattacagatccaaaacaatatatgaattgtacttctttaataatagtgaggtacaattaggattttcaagcataatgttgatgctgctgcatttcatagtagagtactctttcctttacagggaaaaaatggtacagagaaaaccattccctcttttaatgtccgcaaggtaataataaaaaatgactaaagtgatttataaatgcaagggttcaagaaagcccaggaagaagaaccaaaagaaagccaataaagataatggacatgaggtaagtacctgacaaacgggttgatgatggtatttgtttctggtctctaggatatgcctgaaataaggaacacactagcatgatcattatatactagtctattacaaactgataaagaaactagtgatgattttgctagctaagtgatagaactgtggacttaattttgatacaaggacaaatccaattgtaagccaaagaaggatcaatttgatacacctacatttcttctaaaatgaaataacacaaagtagatggttataaataattgaaatcaagctacatgacagcatttatattatgctgtataacagcgcttaccatagaaataggcatcattagctgatttgatctaggtgaaaaaaaaaatcaagtccctaaaaatcaaagcaaagcagaaacgaagatcagcactcaccagcccattcaacctcttccctacttcagctccactcataccctcaggtataggggcaacatccttattgtttggtgcaaaattagtgtcctggaacaaaattagcagttggataaccatttagaaaataaacacacacaaaataacaacgattcaataatgttacctcacagactaagtagtcaccaacatcaggagcatatggaagatctagcaactcattttcatacattagttcaaacacttttctcaatagattttcatcgaactctctgcaatgcattgatgaacgcaaagaataacattacaacagtaagcatgatatcatcagaatgcacatacggtatcttatattttttaccaacctgaagaaaccaccacgaacattgcaagcaacatttcttgcaacacaaagcacaggcacagcatttgccatctaaaatatgcaaacagggtccagaatgagatattgttgaccaaaaaaagtgtaagcaataaaatacaaataaatacctcagcttgtggggcataatatggagtatatgctgggacaacatgaactcgaggttgatccttctcatcccaaacctgcagtcggtcatcaattaccatggccatcttcggatggcatcctttgtctttaaaaacattctgcagacactttttcgaacctgccatgaaatagaataatgaataatattggtggttatgtccatgaaattatggcaggaacatagtccagagctgagacaatagagatagtaaagcgaagatctatgttatgtattatccatataatgggcaatggcaaagcgcaatttctcattcacttaagcattctacacaaatattatattgtttaaactaagaataagttttatacaaatttaaacaatatttagtactacttatgcactatatttgaagttgtaaggataagaatgaaatacaatactaagggaatgaacgatacatgctagaaaaactatgggttttctctctgggacactaatctgcaataccgaacccattccttctcaataacttggaaacacaacataatttcattgtacatgaaaagatagataacacagaatattcgtgttcagtgttttaaagtagctactctgtgtttagtaacgatgtcaatataacaaaacatgttgagacaagaaagcaatgaaagatagcagaaaaaaaagaacctccaatttcttgaaaatttacctgactttacacatactacacgctctgcaaggttatgagagcttatcaagttggcttctggatcaagaagcctccacatctcaagagcataatctctctcagccattgtacatacatagacctcaaatcgtttgcgtcccttagcagtcaggtaacttctcaaatcctcccaagcaggccttagctttacaaaaacactagtatcgcgaacctgagcagagtattaaaatcagacaggggataaggtaatcacctcaaaaaagggaactaattacagaattctacaataattaaaaactctagttatctcaaaattttgaataactagacatatgagaattatactgagcccattttcagtccagaatgacttaatcagcttgattaatcgtctcagataagcattacaaaaataattactaaaatagaatctcttttttctaattggcagcaaacatatgagctgataataacacattgtgtgtaggttgtcaaactttgtgttaattgttatttcatcatttcccaaaccatcaggctacaagttcatttctgcatctgttttattcataaacatcacatgtacaaagcaaattatgtaactatgcagatcatacagacctgtaggtagaaacaatgagcctgaacaaatatgtcttatccgaggatcaaaactgcagcaattacaagtcatttatagaacttatttttgtaccatcgctaataaccaaatagacatacagcatgccttttgtgggcagcaaattggagcccagttctatttttccaacccaggaataggtccaactgatttcaaagtgtaattctagataaccccaggccaaaaacatgcacacaggcaaacgataacaacatttcatttaaatgaaatatatttatacatgatctatctgaattgtacctctggatttatgcgagttagaatcgcattcctttctggcagcctgataacaggccggagaacacgctcctgcccaccagagataggcagaacttcctccttttgggtcccaacgattctgccattatctgtaactgtatctgtgtcaatgaactccttgagcagctccctgtcctcaatataccgcttgatttctgcagacatccctgctatcctgacggggtcgtcttcaatatccatcctacgggaaagcatctcgatccggtcctcaaaggacttcattgtgttagcgacaataagggtttcatcgagatcaaatacgatagcaaggcaccgcaagttcagcatcccaacagatgctgcatagatcccagagcgtactgaacagcaccaaaagcatggcaccttctccaccttgctcggcattgccactaggtgtagctcctcatctccaactactaccactgcgctctacacaaacccaaggagacaaaaaattttataaatcctattatttcgtgcccctgatggaaatatcatcaatgggaaacatcatccgaacgaatcaaaccacatcaaacacacaacccatcgaagatccataatagaatgtgtaaaacgctttgattactggtgattgccccaaaatttagaagtggcgctaataccatttcccaagtagtcgctgtaaacaacttatttcgcttcgatttcgaatgggagtaccagctatactaatacaaagcgatggacatgagcgattgttgagaaattgcgtgggggcaaaccttgtactcgttgaagcaagtgaggtagaggcggtgtaggctcgggtggggaggcatcagcttggcctggagcttgcatcgcacggagaagggcgcgatggtctgcaggatggcgagcggcgggcaccgctcgctcgtcggcgagaggtggctgatgcggatctcgttgctcgggaacggcaggctcccctcggccccctgcttcatcgggaacacctccgcctcgccgaggaacacgtcgccgtggaacatccgcatggtgaccccaccggcggtggcaccggcccctcctccggggacggccgcctggggcggggcgcggggcgtcgccatcgcgggcgagagggaggaattggagagagagagaaggggggagagtgagagcgcgcgcggcgtggcgtgcgcgagcgagagaggcgccttttgcctctccttggctgcggcctgcggcctccgcctcccgcttcgacggacgcggattcgcgggttttggcaatttggggggaagaaaaa

SEQ ID NO: 8568 - DNA, 48581 bp, Oryza sativa
  unsure (1)..(48581): unsure at all n locations
ttaaaatttaactcccaataaaattttaactcatgagtgaatccacgagttaaattttaactcatggtgacgtggacgaatctcggacgtccatttctcgatccaatgatagtttccaagtttgcactacatacgtggtctggactacatattttcgtagcagtagaaaccagaaacggtaaacactgcagctgcctgcgagcagcgtgaggcactgttcggttaaccttaaagaaagtggaaataattaaagggagtttatttcgtacatatgatcgatgatgtaaaattctgcgttcgtccaactcctctctttcgttttccgcacgcacgtttttttaactactcaactgtgtgttttcgtaaaaagattgctatacgaaagttatttaaaaaaatcatattgatctatttttgaaaagaataattaatacttaattaattatgcgctaatagatcgctccatttttcgtgcggagggaatggttttccatagggccgggggtggtgcacggtggactgggtgcagggggggttgtgtacggcgaggaggtctgggactctaggagactggggtggtggtgcgcttctgccaactcggggccggggtggttgcgtttgcgtcttgcggtgccaacgcccttgcgccttttgcggtttggaccctctccggcactgtggcttctgatggggttttacccattttctttttctcctctttctaaaagtttctcttctgtgttgtgtatgtttggtaggttgacctgtgtgagtagcaaggtgtgatagctgaccttttcttcttttttttgagaactctgacctgggtttttcggctcattttctaaggctttgtgaaagtttggaacatgccagcgtttttcacgtgtttttcaaaattaatttggcccaaattcgtattaaaaacacgcaggtatatatatatatatatatatatatatatatatatatatatatatatatatatatatatatatatatttgaaatggagggaggaagtgatatctccttgagatggttggcgatgtgtacatgtaagttttgattgtcagatgtatatcggtttttatgtatgggtcgataaaaatattatgaaatatcggttagctcgattagttatgtacaaaatctttctcggtggttaaatttctagcaaatagggaatcaaaggtggtttttctgttagcaggactaattaggcttcaaaaaagccaggtcctcaaattattggtgttcatattcatttttgtatggatttttttttgccaaagtgagaaatttaattaacaagaccaccgtatcaacgagtatccactttctacgctaggtaaggtaacatgctattgtgatgaatttagctgcttcaaggaattaatgctaaacggcattatctttgatattaacttatcaatgcaatcggtactggaagagaggatatcctaggatttgtttagtgaatcaatttgagatgttgagtcttcaattgaagttattaactatagtacgaagcagcacattgtatatagaacaaccaggtgaagatccagaaaggaaaggttgaataaactatacaaaattatataacctttttaatagatgtatgacagaaaattttagcgggacttaaatagagacttccatggttaaaacgttggtagtgaggggtcggaggctcgagaccctgccgccccatggtagattcgccactgagcacaactactatctccaaatataggacatgataattttcgatcatttccagtaaaaccatggatcaagatccaatgaataggctgttaaagcaggagatactaccaatataaacgactcattcctcattatttctatattccctcacactatttattgtatgcttcaccactttacatggcttctttatcatgcgtaaaacataacctcataactagcaaccaactaattgtgtagttctcattttaccttagttcaatttaataaacaactgtaactaacccccttgtaacaatagctaggtgggcagagaataacctacaaaatccaacactttgaaaccaccaacactgaaggtcaaaactattgtttgtctaaccatcccataggttacccgaaaagaataagccaaaatcaaaatttgaattttagaacattaaaatagttttaaaactttaagttgaaagtaaatactttcaacttattttttttatattagcttttatgataaaaaatatataaattttttacatataattttttttattcattactaaaccgttacgacttataaatacttttgggtaattgatgagtccataacttttcccccctactccatcagagccattgtttggctgattttaagtataagcgaaacggtatatatgcaaataaaaactaatttgtaaataaaacttttatatacgtgttcttagcgatctaaaaggctaaaaaataaacttcgatgaaaaaccttaaaatcagcttcaaatttaaggttaaaaatttaaattttacctgataagtataagtataagcgaaaatataagcccgcataaaccggtaagcagggagtacttggaaagtcaggggtacagacgtaagaccacaataaaacgaggggctaaccatcaaaacaacccttcccccctctctctctctcacacggcctcatccatccatccccacctgagctcccaccggagaaaaccacaaaaccacccacccaaaaaaaccaaccccctccgcgatccccatttcaaaataaccccgccgcctccgccgccgccgccgacgaggaggggtcaccgatgttgtccgaccaggagctggcccggtacgtggagtcgttcgtgcgccaggcggcggccgtcccgggcgccgtggcggcggcggggggcatatcggcggagtccgtggcgcgccagctcggcccccagctcggcctcgacctcacccccaaggcccccctcatccgcgacatcctcctcgccctcttctcccccccgccgcagggggcccccttcacctcctccgctccctccccctccgcctccgcctccgcctccgcctccgccgccgctgctggccacttcttctcccagcagcagcagcagcagcagctgcagacgttcctgacggcgtcgcagcagtaccagcaccgcggcggcgcgggggccgcggcggcgccaccgtcggcgtacggcgtcgcggcggcggcggcggggtacaggtacgggcagccgttcccgcaggacgaaggggcgcatctgcagaggctcgtccagatgcatcatcaccagcagcagcagcagcagcagcagcagcagcagatggcggcggcggcggcgggggtggccgctgcgccgcccacggctgtggagagcccgcgccccgcggcggcatcgaagaaagagaggtggtgcctcccacgctttgtttttcctcttcgatttcccataccttcgcttcgagttagggcttggattagatgttcttttaggttctcgctccgatttttcagatttggttggcgcattgaggttaggtcaagactaaaaacgctactactagttttttttttctctttaacgctcacaaagttcttgatgagtttaatctttattactactgtggatcgagatatttatcacgatgatttagtgggggtggggtaatctggaaggaactggtttccgagcgattcaattggtttgcctgcttgtactacatctttaatgtccacggacgcttgtggaatcacttctagtgtacttgagaaaatctttgaatactgccgtagggatgtcaaccataccagcataattaatgcctctgaacttgttggggggcaataatggatcccgtcattctcctcaaaatgattgccatgcaagcaacctcctttggcctagaaactaagaatcgtaacgataaagttcattgtgctaaacaaatggattttccatattatttcatctggaaactggaatttaacctccagatcatatttatcatgtttgtttactccacttgattaacttccaaatcatattatttgtgtttacttcatttagattgactttcaaaaaaggaacttctcttagatttgctatttggcatgtgcttgttcagacataatgtccaagaagcatcagtgtgtctttatggaagaatgttcctgatatgaaatccggtgtacagactatgagagagataaatgtgcccttatcttgctaaatgctagcatattttactgctcggtctattcattgaaccttttttttttccttggtcgtgtttacgaaccagtgcaagtactggagtaaagagaagaggtggtccaggtgggctaaacaaagtctgtggtgtttctcctgagctgcaagctattgttggtgaaccaaccatggctagaactgaggtttgttctgctggctcacctctctagtgaattatcttgtattaactattacatcatgtatgaaaccctgacgttgtgactcaactgcagatcgttaagcagctttgggcatacattcgcaggaacaacttgcaggacccaaacaataagagaaagattatctgcaatgatgagctgcgtctagtctttgagacagatagcactgatatgttcaagatgaacaagcttttagctaagcatattagaccacttgaggcaaaaagtaggtcttcttcactctccagctatgttctgcaaaataatcaagcttttgtttgtggaataagtgctcaaaattcttgcagaagattcaaatcgagattcaaagaagttgaagcctgtcgacagcgaacccatttctcctgctgaaactgatgttaaccagcttccaattatcttgtctgatgctcttgcgagcttttttgggactggagagaaagagatgccctcgtctgaggctgttaagcgtgtttgggaccacatcaaaagcaataatttagaggttagtgattattaccaaacttttgtgtattacatagttctcatcatctcatttgaatttgttgtgctataataaacttgtggtcatttcaaatgtccaagcatggagaactacaacaggcaatgcatatttcagttataaacgagtacctaaattgtgttttaggatcaaagcatatcaagttgatgtgaggtagttagaactaagaactacttactagggaacaaatgtaagtgctaagataaggataatagtgctctttaatttcgtatcaatgctgttatatgcctgtagatttttctgatctgtttcatgaactgaattttgtatactggatgcccttcttggtctattttgattttcttggcagatctctcactttctattctctcttttagtttttcttttgtttgttggttggtagaatggttgttggtggttgaacaactagatgcatatggtggttgtatcggatataagttgttgggtgtatattcccatgtgcttttcatttttgaactcagaactggtacatggtggtcaatataattttgtatagattatcataccttatataaaatccagtgtagccatttgcgaggatttcgcaagttgcttctgtgtgcaagttggtttattatatcttttgacctttgacaggagtgaagcataagcaaagcatgtcccatttaagtcactttcctccttactttagtgtcccattcatagctaaatactagtggtttgccacctaagaaggtaatgaatgataaatcatagcataagcaaaatctgagtatacgtattggctgctcttagtttgtggtctattttatccatcatgcaaaagaattcgccacttctagtttctccatattagtttgttttgctgttcatggagatggcccagtatggtagttattgaaaatctgcctgttggcatagctagatgaagacaagaggttgctgctaggcatttataggttggatttttcagtcatctggttagcaagagattttatattatccatccaggatttcattaacataaactataatgtataaattgcttttgcttatatttgtgacttctcttcctcactgaagccattttcaatgttctctgtaaagcacacaagagatccttgtatcttgctgttctagttcaattaaactactgcggattcagtcttatatctatcttgcttgattttgttgcaggatccagcaaatcccaccatgatattgtgcgactcaaaacttaaacaactctttggatgtgaaagtctaactgccgtgagtgtttcggagttgctgtcacaacaccttttcaagcaacctaacaagctctaactggttagttatttcctttcagaacaacatcatgtattgagacttgcactggttagtgtttgctagatgacatccatccctgcttgcaactcctagttagtataggaagatgttgaacaatatcagaattttttaaagtaactggatctgctccttccctgtttgttccttgcaccgagttcgcaccttaattttattataatggctcttaggtgctggaaactactcaatctatttcatctatagcaaggtgttatcttgcatatcttatatgttaaggcagaagttgatggtgttttgttttgttttgcagatgaatcgtcttactggactctagttggtctaacaccctggtagtaggcgctgatgaaacaacagaaaatgctgaaagtgtttattctatgctttgtatccatcaaactgatttacttatgagaaaaaggctgtaggctaatctcttcacagtagcaaggaaaaagaatgatagttgttgcatattatgtagtcttgagtcttcttggaagagtcacatgtggtaggctatcttgaatttctagcttgttaaatactgagtagaaagcagcaccgaagcaaagttaaagctgatgaactttgcttgatgtaaaaatcagcaagcataggtgcgttctatggtaagtagttgctttcacctttgttgcttgaaagcctcttacattgttagtgctcttgttaaaaggacacctgtgctctccctgtattatgttgtcggtgatgcttaatttaaatttacagttttagattgtcatcaacacattaatcatttgctcctgttcatcgtattaatgaatggttgttgctcctaaccatcatcagacaggcactctttcagcctttgcttatacgcatcagttgaagtgttcttgcatagtgctgtggtgtttcagaatctgttgtcgcttcacctgccaccagttctacatctgctgctgattatttacaacatgttcttgtagctctacacagtagaccatgcttatgatttatgaagtgttattgctgtcccaatagacctacaagttcttgaacatattgtagaaaactaccatgaccaccagaccaatgatggcacatgcgactattgtcctcctgttactctcatcaagagtaccttctggcagaagcttattcgccaatgtcaaaattaccgcatccaaattctgcagcggttaaaaaaaggttaaattnnncttcaaaaaaaaggggggggggttttggggtttttcttttntttggggggggcaaatttttttttggtcaagaaagttttattgaatgctagcatgtttctgcactgtaaatgcttgcctggtgaattatctcaagaatcctctgaagtagtggcacataaaccttgttcacttcactgcaacaacaaaacaagaatacaatcctatcagtttcttcacctcttttttttttctgccgtaaatccaacattgttaactaatgtaaaaatgttcacatgtatattgctaaattgctaatcatggtttatactactgggtaagccaaatagtaacaagttgacccaaggttcaatttaatcagactgaaaaataataatctgaaattagtttacttaatgagcagcatgcccctgtagacgtgattggtggtgatgttgcagtctaggtcccaaggcagcttcttgcccttccattctgcaaggcaaaacgcagttaaatgcagtaattttttctttctgaaactaatttgtaatgcagtaacaaaagccaattcaggtgaggttatttctgaacaaacctagagaccatttgacgcctaggtcgaagccttcgttttcagtcggcttgagcacgaacgatacgtggtgcctaagcatcattgcgtggaggagcagaaacatgttctgttaaaagcaggaaatgtgtaaaaaaatgctgccctttacttgctccaaactcgttggatgctacctcatatcttctataaatctaaccatattgttctttattaaactgattaattgagaacttttgaaaattttggttaaaatttgaacaatagagacagctaaatcaatttcttgacagtgtgattttacggtcctaaaggagatagagggagatatcatagttttaaactgttaaatttggtactccctccgtttcacaatgtaatttattttagcattttccacattcatattgatgttatcattaacatcaatatgaatgtggaaaatgctaaaatgacttacattgtgaaacggagggagtacttcttagatataaaaaagtactaaagttcattctaaaataattggtatactacctcttaagaaccacatttatttttctaatttcgaaacagagcaatcactcacctaaaaagaaccccatttttttttctagagttgaatattgattccttttgttttgaagaaaaaaaaatatagcattggttccatatatatgtataaaaaccaatttagtactagatgtgacatattttaatacaacgaatatggacatatctctgtcctaggatgtgtcacgtccagttctgattcggtttttacgggacggagggagtagttaatttgtaccttgctcacttgtgaaacgtcaatggaggagattctaccgaagaagtagaggcactcgtcgccggcgagctcgagcaactccctgacgctcctgttctgcacggcggagttgagcttcaccagcctcctcaccgcccggaacccgtcatctccgccgccgccgtcgccgaacagggaattcacgcgcactcgccccctcacccccgccgccgccgcgctcttgctgctccgtgtcccggcacgcggcggcgccgccgatgggagaagaagaagacgaagatgacgacatggcgctgtcgtcgaagccgagagaagagctgcatccatggcgtctcggatgtttggattttcttggggatcgcgaggttgatcggttcgaggggtagctagctagatatatgatcgaattcctcgcgggtttggaattcgatccgtggactattccggcgaagaaagcaaaggatcggatggaatggaatggaatggaatgcgattgaaggagatgcccgcagtagaagaggttgcgaggttggcaaggcagggatgctcttccaaacttggcttgaggtccattgccctacaaatgctacatgccatttcatggctatagctgaaaatatgcttcagaaagcttcatctccaggtttaacatggcacatgacaatgtttattgtcatcactggttagtgcatagtgctattcagatggcttcgttcttttctttgattcccaactcgctcacctcgttttccgtgtgtacgcttttcaaactgctaaacaatgtgtttttttgccaaaatttttttctatacgaaatttgcttttagaaaattatatttatccacttttcaaaaatattagctaatactgaattaatcacggactaatgaactgttccattttcggtacgatgaggtacacaaccttaatgtgaattattttaccctattatggagcctgaattgtttttaccatttatcttttttatatcactaaaaggcactgatgagatatagttattccccgatgacctaaatatacttttccttctttatactccatccgttttatattataagatttttttttgtcttacttagattcatccattgattaatgtatatgtgtctagattcattaacatttttatgaatttgggtaatgctagaaaaacttacattgtggaatggaggaagtagtactttacaatgcctcaacacaacatatagagtgaaatagtttagtttttttttttttacaatacctcaacacaacatatagagtgaaatagtatttttttttaattgtcactggaggggagaggttcccacctgaatcttccattgaaaaagcattgtttagattacatggggggtacatgcattagccctagggctagctattatggatgtagagaagacagactatttgaaaaaaatactacaccaagcatcagcctctaatctgtcgttaactttaagatgctctgcccagagtgataattcttctttgcagcgcaggatcagccgttggactgacggctgaaggtcgcggaagacgacatcgtgtcggtgattccagagacgccataaccataagcagagtagatagaaggtcttgtagtgttttgaaggtatgtttggtggccgggctaaaagatgaatgttactcacttcggccacattgggtataactccgattgtcgtccaaaaagctgatgcgaaggggcacatgaagaagagatgattcgacgtttcgtcccctgtctagtagatggcacatactccctccgtccaaaaaaaaaaagtcaaaccctatgttttcgtgtccaactttgactgtccgtcttatatgaaatttttttataattcgtattttcattgttgttagatgataaaacatgattaatattttatgcgtgacttgtctttttaatatttttcataattttcaaataagacgaacggtcaaacgttgagcacggaaaccagggtttgtcttttttttttgggacggaggaagtagaggtgactgcaggattgtttttgtaaaaaggtttttggcagttggcaatcgatcctttgagagcaaccatgcaaagaattgaacctttggcggtgaagcattcttccagatgaaggtgtgaactggatccatttctgacggaggcaatagggcatggtatatccccctggcagtgagatcaccttgctgtgaaagcgtcgagaatctgaggtcctcctcctcagagagggaaatactccctccgtttcgaaaggtttgacgccgttgactttttaccacatgtttgaccattcgtcttattctaaaaatttaagtaattattaattcttttcctatcatttaattcattgctaaatatatttttatgtaggcatataattttacatatttcacaaaagtttttgaataagacgaatggtcaaacatgtgataaaaagtcaagggtgtcaaacatttcgaaacggagggagtaccttgcaatgtcattgtaagctgggatagctcctgtgaagcggctgtggaaagtcttggcgccagagtagaacagatggatcttcaggaaaccgacgccgcttggaacagatagtgcgagaagagagcagggtactgtagacggaagcatttgtctgggagccagcagtcattccaaaaggatgtgcgaagtccattgttgtcctgcgccctcgttaggatttccagctggggaatgagcttagatatctggctgtgtttagttcagcgcaaagtttaaattttagttgaaattagagatgatgtgactgaaaagttatgtgtgtatgacaggttgatgtgatggaaaaggactgaaatttggatccaaactttggatctaaacacagcctagatatagaatgccagtgaggtccaagcttgccgagttcgacgagagattttgaattcgaatttgcttctgaccagagccaattggaccaggagtttacccggtagaggctgaaaaggcgcttgagtagtaatgcatcattttgcatctgaagatttttgatccccaggccaccgaattcctttgattgacagtgtacaaacgataatggaaattatctgagccatcaatcgctttaagcgactccaagagcttatagaattttatgaaagtaatatatatcgttctaatttgaaacaatcctcttcagattaatagcctgggtaaatcttccatgagaaggtcgtccttcttctgttttctttttttggcggtggctgggtcacactgcaagaatcaagatgctgtaaattattggtgagtgaagctgtagggacaaaagggcgcatctttttttttcttattttctaggtgtgagtgcagtagctttagcgttgtactccctccccgaaaaacaaacctacaactgaatacgatatattttagtacaatgaatctgaataaatattatctaaatttatagtattaggatgtgtcatatccagtaataaattgattttctatgagatggagggactacacacttgcactgctggccaatagcccactactgaacttgccaaaaattttccaaaatactgaaataggtctcagaaaatagagaaaaagaaaagggaaaaaaatgtttcgagtttaaaaacaatgaagatttagcactgtacaacaagaacggtgtcgacatgcacaagtagcgggtgcaattcaaactcggcgccgcctcgtacattattattgccagtctaaaaatttcgaaatgcctgaaacttctgtagaagtttattggaatttgatgtgctcttcagcttctcgggatgactattgcctcgttttttcatgagcacacttcctaaactattaaactatattaagctgtatatgtatttttttattgaatagtttcttgaaaaatcaaataaactatgtttattgaatagccactaaaaagctggtctcaacccctgattcgaaccaacacccagtaccgtaagttgcagcccagtaccgcactattggtgcttggacaggatagcaaaggaatatgcctattttgccttcctcatcttttactctagattgagttgtgtcacttgccacaaaaccgggtataatgtatcccccatctttaaaaaccagtgcaaatagactctggtggtttggaagtagtttttgcaggtggggctcacatgtcagtgagatatggataaacatatgtggtgggccctatcggtttcatctccgcccatgtgatgtctacccccacccccatgctactacactgtgcgcgcatcgttccccttctcctcttgcctacatggcaccctcggcgtccctgaccaccaccactctttccgacatgcttaaccaggactgccgccgtgacgcccaaggccacggcaccttcctgccgtggaggttgtcgttgcaactcgtgctcgatctccaccgcttgggtgccgcttgtgtccctaggagcgccttcctgcaccccaatcgtcggtcctaggtccgtgccccagaaaccgccacacccagaggtgccccaattggtaaatatcgtcgtcgttgagaggcctttgagggagagagaggaagccgccgccaaacacatccacaaccaccacacactggctgagtttactcatgcagaagcgacgatggtcgtcttggcgagttgactcgcacgaggaggcgacgctcggtggcaacgaggcctcgacactgaagggagttagcggacacagtggtggtgccgcggattggttttttgaccgcccccgttaaggtggtggaggacacaacgagcttccccccatccgcgcacggccggccgacgtctcctcccctcacatgctgccagccagcaagtcctccctcctagcgcgaccggccaacaagctcctccctgcgcaagttgcggctagtgaaacctcccctgtgcgtgcccgacaggccaggtcctccccgcttgtgtacttggtcgatgagctcctccttccgcgcgcagccgactggcaagctactcccctacgagctacaaagattggtaccgtcgctgccgcccagcctttgttactaatggaaggtgggagaggagtaagaaaggaaagaaagagagatggagaggtgaggaagaagatgggataaggtggaagtcactgacatgtgggacccacttgctgattcagcgagttaaccatgggtaacctaccacgtcaggagaaactgctttccaaatcgtcgaaggagtctatttgcactggtttttaaagatgggatatgtgttatacaatttgtttttgagggatgcgacttaatcaggatcaagatagagggaggtaaaatagacttatccggtaggaaattgaagtctcgtccagactgtcccgaagcctggaacaattacacacctctattgagaaatatttgattcaaacttttgaagctttattcgtcgatattctatcaaatgctagctaggcttaaaaagaaagaaatgacacgggggagatttgtcttaaaaatactatcatactctcttgttttaagttatttgttactccagtttccttttaagttaaatatttctatctttgatatcatttatagaaatttatagagtttaataacatgcaaattatatattatgaagtttagttcacgccaagctacttcaaaatctttctatatagaagtttttcaaagtgattttatttaaattaaatcacttttcaaaatatttaataattaattgttaattagttatgagttaatgattcatctcgtattactagcaaaaaaatcaaaacctttacgctcaaacgaacgcccagttggattatgttacaacttactccctccgtctcataatataagggattttgagtttttacttgtattgtttgaccactcgttttatttaaaaaattttagaatttttttgatttactttattatcccaagtattttaagcacaacttttattttttttatatttgcacagattttttaaataagacgagtggttaaacagtataaataaaaacttaaaatttcttatattatgggacggaaacttaaaatttcttatattatgggacggatagaatacaactcaagctagcttgacagataaaacattcgaaagtagattttcatgttaggaacgtgacttgactaccgatactaaagtggtttatggtttatctagcatacaaaatgagctggatacacgcctactgcgacatgccatgttggcaccatagtactccgtgcaaaggactgttcattgtgaggacgcatgtggggcccttccaccgccctagctctgttgccacgtcagagttgggttgccgtttggctccaataatctgcctcctttgatctctgtggcctgccattccatggccacatgtgttgccctaccaaaataaaacgatgcttcaaaatgattttaaaaaatgcttgttttgtgctgttttgaagatgaaaaattcaattatttgtagcataatatctagctaaggccgaaggcttccaatctgatatgaagctggagttgtggagttagaaaaaatagcttcaccctttcttaaacactacatgctcttacgttataataggatagaaccataaataaaaatagactgtaagtgtgattgtaaaataaaacagtggatccggtggttacgtacatatgttacttcacgcgtgcaagctcgctgcgcatggtgggggaggggatggagggagaatgactatgcttttaaaataatagagatattcatgcatggatgaactagttatcactaggcaaatatagctgacgcattaaacatgtagctgctacaattggttgatcgcgtaactggtaggctgaaacatcatagccaacctcatcagggccggccttgacttttgtggcccggtgcaaaaaaaaagaaggcccccattcaccataaaaatacaagataatatttaaaatctaatttgtcattaacgaatttcacactaacaagtttaaagtacaatcaagcagtcacgatatgctcgatcaccgattagtcttgtctttcctctaagtctatcagacctgatatcgtaatatacatattttggaggtctctaatttttgaaggcccagtgtggtcgcaccgtccgcactgcctcagggccggccctgaacctcatccattgctacttgtataataaatttaagcccttgaggatttgtttattttgttttctatttcctgtttcttttttgaaaatgatagacaaggcaaattttaaataaacgttaacccaatttaaactaaaatcaccagcattctaactcaaactacaacatgaatgttttcagctccaacaacacgattgctcacagaacaattgatacaacagagtacttgccacggtagatcaagcgaggcagtaggcgtgtacgtggccgtggggccaacgctgatcaccggccatatccatcaccagcgaatttgtaccaattctgtcaacctatcctactctgcacgttggacgtttggtttaatttggactctcccaaacaacgcttttttctcattttctctatttcgctatcgtcctttggcctctcctcatacgtactagtctatgcttttagagcttacaaattcattacaaaaagttgtccaaccacgttcatcttcaagatcgatgatgtagatagatactatagctctataattctcctgactttcttctccaaccaaaaattaaaattcgattccaaactgcatttgtagttataatgaatgaaaatcaaaccaaaatgcatcgtcagaatttcgcttaaaacaattcagctcttttctaccatggttttgtttgaagagctcgaaattccgagaagaaactaatgagaaatcagctcgtaaaaatataaaaaacctacaatttttttctactttttagcttcttatttattttctaaattctacaattacaaattcttaaaatcttaacatttagaccgtatgggaaaaccgaagacttagaaaaaaaaagggtgtagttatgaaaagctcctccagcatggttcgatcaatctgatgaactggcggcgatcaatatcattcatacaatgtgtcaatgttgtatgataaaatttccccatcttttacaaaggcacccggatccatccatccatgcagctgcttttgggaaaaggtgcaagaaagtttcagtgccgtagtagtatattcaaagcagaggaatgaagaagatctcagctccatatgccgtaattattattgttgccaacggagcctcccacatgacacatgcgaccacttcaccccccaaccctcgctgtaaaacgctctacctgtagtatttcatattttcatggcaaattagggctaatcatcccaaattaatgaacttccatccaatgacatgaaaaacaactcatcaatcgatcaatattgaataaatcacaagaatatataattagtgtgattgatacagtccaaatggccaataatctcatctaattaagctagtcgcgagaaaggccctggtcttccggctagctagcaccgtagtataaattgtgggctagccgactcgagttcaagcctcaaccttctcttaattaataaattttaatatcagagttttttctcttatatccaacattttaatttacagtcaaccaattcttcagccgtattacggagtagttatatgttgctagctgcaacgtataacactcctatcctaagctactttacatatcattattgcatcctggaacaattcttggcctctgatgtcaacttctcgatcatcagtataatccactcaacaaaatctgtccatggattatttctttgtttctaactcaaatcccaaccattatattgctgtaaatcagtaatatgacactagataattaagaagaagaagctggggcacatgcatccaaaagctagctagggaataataagctcagtagattagcacatacactaacctcatcattttggggatgaaaaagatgagctaatttccaaacacatcacaagctcgaataaactagctatggctgatgcgtagctctaggcgtttgcacccgtttcaattcaaatcacagatctgaattcgagcgcacattcttcgatcggctcaagttgcaatgtcttcacgctagtgtcgatcgagtgatgaagatcgatctccctgatctctcgatcgtgcgcacaaaagaaaatgatttgagtaatgccataattaaagatcaattggtagatgttggatatacttcaacacacacacacacatgaagtaaatttacaaagttacatgaaaaaattattcaaactgataacaacaaagtaaagtcatatgtaataacaaaactacagttagaaagaaataaaattacaccctgcatacattagaaatatatactaaacaacatagaattacaattattttgggacggaggtagtacagctttagatgattgaaaacttccaaattttcagacgtttgaaatcccagagataccctaaatttcataaataatgtaccatgtatgtcaggatatagacggttacttttttttgtgtagtgctggagaaatcgaaaaccaaagtgtagctggcaaattaagaggctaggatacaagggctggcactatagaacgtgcatgcagatgcaggaacaaacaagtggtcaggtcagggcggtgcgtggctgcatgcattgcactgtcatgagcacgatgacccaatccttacaactcaaaagctctgcttcccctcatggccatgtccagcttgatcttggctttttcttcaccccatttatgcctctttgttctttaactatgcaaataaatcaatttccataggaaaaaaataaacaagactaatcaatttttggatccaatgtaaaatagtagtgcatcatgtaatcaatgtgagcttgtaggagtgtatgtacagctttgttctccaagattcccagcatagattagagactcgtttaatcatgctctaactcgtaaatttaacttcaaaagttagatatagagctttacttctctagatcattttataagagcatgccagcttattccgctttctttttatgtggagctgaaacgttttaatcgtactttagcttcagaagaaatgaagcttaagttggcctgagctgtgtcaaacaggcctagctagcaaaaaggccgatcagtttttgattagtgaatgggagcagtatttttgatccggtcacgcagggccacaaattaaagctggattaattgcttttaattaatcgcagtagttcatctcgaaaataattgaattagttgggaccattttggcctcgaaacccctctataaatagcccctccacctcaacacatcgcttcacacacgagatctcatcgatcagtcacagtgacgcagtgagcactagcttccactgctcgcatcgcttgtcatcatcatcagttcatcaccaatggccaccgtcgaggcaagtagctagctactgatcattcattcatattcattcatcctgtgacaagacgaggtttgcatttcgattcgatcgaaatcgatctcgtgattttgttgtgctgatgatgagatgaatgcatgcatggttgctttgcttaagagcaagtttaatagtaaaaccaactaccgactccaaatcatttgagtcaatttagtaaccaatttatgtactccatccgtcccataatgttgcaacctaagattggatgagacccatcctaagactacgaatctggacatgccatcctacgactatgaggcatgtccagattcatagtcctgagacccatcctaggttgtaacattataggacggagggagtaatagttacctataaacatatactactacacaattcatatttggctatacatatcacaacacacatgtatcttggagtttgtgctacagctggctataaatctatagtccactatagtccactgatcttctatcttctcgaaatgtgtttatagctggcttatacctgctcaaatgctgcaggtccaagcagtcgccgccgcgcctagtctggcggcggaggaggctccggccgtggtggaggctgtccaggaccaggagccggtcgtcgccgccgttgaggaagaagaagccaccgccgccgccgctgcggctgcggctgcgcaggtcgaagagacaaagccggcagatgatcaggctgcggctgctccggcggagactgtggctgaggccgaggcagaggccaaagaggcagagcctgcagccgccgaggaggccgagccggaggcggagacggcgccgccggcggcgatcgccgaggccgaggcaggtgaggcgaaagaaccggagccagaggcagaggcagaggcggcggccgctcccgtcgaagaagctgctgcggcgcccgtcgaggtggcggaggaggctgaggcggcgccaccggccgcacccgaggtggctgccgtcgaggccaccgagtgagctggcgagagatggcgagccggagatgaagctgatggctgccggcggcggcggcggcggcggcggcgtacgtgtgtgttgtgtaatgaattgggctccaataaaaatgtgtcaggttggctaccgggcccagtgtcagtaggtgctgacgtggcaggtcatcactggccctggagctcgtgcccgtgtatgttctcggtctgtgttgtggtttcatcgttaaaaatgctagtaataattttccgtatctttttttttgttaagattttctcttttttttttcatttttgatgtcacgaactcatgatacgagacatataagacacggtattgagggagctaaaatagacttattctaaaaaaggagcacggtgtgtctgctgtgccggcccgactgatctcaggccatgcctgatcatgcctgggccgggttgggccggcggcccatttggctatctatatggggatgagcttttaataatcacaatgcttgatgcagtacagataaacacatataagtagtcactactatgactgcaccggatccttatccatagaagtatgtgtgagtgaactacttggtggagagcttttgtttttctcatgtataattggcccgcagatggtactgccattgcaaattttaagcagtgcaaatctaattcgagtggaatttatgtagcaggcatataattaattgaacacattacgagtttgtttggaggatgtagtagtaatgtgcaaagcatttttcagttgactgttttttctatgtatgtacaacaataaatagattgttgcaaacagatcctaatattaacttcagtacttcatgtcatgttcaacatgtttaagaatactgaaagttgacaacatatttatcctagtgatgtgaacatattcaaacttaacaaaaagttggctggagtgctactgtgaagaacggaggttaacttttgatgctattaaagtgaattagaatctttcggtgcatatatctgatgtcgggaactttcagtgttatagaaccaatttcccctataataaatattcattctggtgatgtgaatataatatttttctcagtaaattattttcttgtcttaagtgttattgtgaatatatattaatcatgcatgatggagaatgatcatttacaactaacttatatgctatttttagaagaaaaaaaaacagtttttgtttgtggcattgcaaaaggctatttgtttagttgcataagttcctcaaagtactgtagattaaagttaatggcattttgtgtatactaatgtcaccatataaatgcatgggggaataggagcatgattgcttaatttcggaaagattgttttgaccatggttaaacttcagaaaattgctgcaagtagtttgtatggtcttccatgcaaactatattagataatgcttaatttcagttgttatagtttacctctctttggcgttatccacaagcagttgtcaattgctaaaatttcgaattgccacattacatgatgtgctatttctatattatggtcttacacaatttttttttaaattctcctgtgatggcagttggagaagatgaagataatggtgtaaatcatgtaatggaaggctgtaggatctttttgtaggggtgctgaaggatcaattatgcgtctgcaatgcatggcctatttacgaaaattttggtagtatttcttatgtatttactaaattcagcaataaactacacgtagacacctttttttataactttaccaaaaaaaaaattgtatggttgaaaatggcaacaatctgaatagccccgcagttctttcacagtgtctaaagtagtaagcatagactcctaggactgttgatattctaactatattaaataatgctatgtttcaactaatatggcaaaagtgatatttgatcttaattggaaattacagttattactccactaaatgtattttgtttgtacgataagatattaattggaaattaccgttattactccacggatctactaggttttattggaggcctacgtaagcccatagcatttttagatcaagaccaccattagctatactcctttaaaaataatccaatggtgttgacagtgaatatgtcaccccacctaccccgttgtaatttttacatattacgctttaaacctcttaatattacatacaactagatttaaatggatagccacattttcctatagggaaaaagtgggctacatatttcatggtaaatatgatttattgtagtaaatattgtgatattttttttcttttatatgtagcaaagcacatggatttagctagtatggtgaaactttgctagacctaatgggcttcgtttcctggccttgggccatggcctgggtggcctaaggccatgacttgaggcctactcccttgatagtagtttccgttgggattaaatccccaaaccggacctgatgaataacaactccctcaaccaaaaaaaaaaaacaaatttgagtttgagttaaactttattaaaaatattatttttttagttcaccggtttatcgaggagttttatgtttgagcatatgataccacgtgcaatgatatgtccgataaacatgctagcagagctgttaccatcgatcgatatttgaaatcggcgtgcccacttggccctgtggttgaatctgatggagatattaagtatgggcatgcgaaacgagaaacccttttaacatgtgatttaatgagtttaaacataaaattagatttatgtaatattgtaaaacaacttttatatagaaaattgtaaaacaacttttatattgtgccaaacggttttttccttttttggagcggagtttgcagagctgctccacaaatttgtactacgggggtggagctgggtttttctgctccacagctccactccatcccaaaagacccactaacctttaattttttagtgtatttacacaaaaatgccactgaaataccccttcctacttctgtcctctcgttctctctcctctccatcttcttccccatcctcctccgacggccggttgtggtggtggcagcggcgtctacgtcggcggcggcaggcggtgtcggcagccgtgggcggtggcgcggcggccgcaacgggcggctcacgggtgacggcgtcgacaggcggcggcgcgtgcgcggtagcatgggaggcggcacgcgagctacggcggcagtggctcgcaagctgaccgatgccgacggctcgcaggctgcccggcggcggcaacggcagggtgacacctacaagatgttcgacaaaatggtgacgagggatatggtaacatggagctgagtaatctagtcaaacactttctatacatacctcagctcctaaaggagccaacttttactggagttgaagtttagagtttggagctctaccaaccgagaccttataagagggatggtcttataatctacaaggccttcaccagatcctatttagcttgtagatcgattataactcaaaaacctgggtcctaagctaaaacacacacacacaaaaaaaacactaaattggactttgactaggggttgaaggtctgaccgtttggacactggtctgaccacatattattgtccagtctgattgctcaaagattagcggtcaggccggcctggcagtaaagtttacaatcctttttctaaatttagactaaaattgatctagtgctaaatttagctgtcaacagaaacattaaaaatttgagaatgttatgttgtcggctcctgagattgtaatctatttggagttgataattgagatacggacaattacataatcaaccactcaacacatatcatactcgctcaacctcgatatagaacacacgggtctttccatgcgtctaggagacgacaataccgtttgtttgtcttccattcaaccgacgcttcgagagaagagggttggggtacccaagtccctagatagctagggcagacatcatagaatgccatattggtgtccttggtagtaggagtcgtatctacgagacgaaaaccaatggtgagtatcttaggtggacgtattgaactaaaataagatttaaaattgacaaggaggtctcactttccacgtaagtgtatcgtgagggtgttcacaatacgggctacgcactcaagaggcccaagagaccaactatgctcaagatcgttgtaagtaacaagcttcacactacatcgctcgtgtacgcctggcaaaaccacgccacgctaggatccgccctccacaacacggcggtgtgcccatctctttacgtcgcatgctctccatgtagacagagaacgcgtgtctatctttaattccgtgttcttcgtttgactccgcatatggacgacatagcgttgaatatttttttttccttttttgcgccatgggtacggaacaacacgtcgattgcattgctaacgccctgaatgtcgtaaacgctcacgctactgtcgctgctactgctgctcgtaaacgccggaggcattttgcatggaacggcttggacatatctctggtcctggacttggtcagtgactgaggtgagacctgtatattttggcgttgaattagaaaggctatcgcacactgtatttgtcatggactcgttcagaaaacatgggcaccaaaatagtagtgccagcgctcacacggcaatactaataagtacccataataagcacagttgtagctttcagtgtcaaattttgatcaaccgtcttatttaaaatatttttatgattagtatttttattattattagatgataaaatataaataatactttatgcgtgacttaacttttaaaaatttttcataaattttttaaataagacgaacggtcaaaagttaggcacagaaacttatgattgtacttataatgggacggagggagtaataactagtgaactggcgcacacatataagttacgtcgcatcatgcgtccaacgaaaggtacaaacctatttagcacagctctagctttaactttaacttttctagagctgaagttcactaaaaaaagtttcagtttcacctaaaacgaaagcgaagttaggtaaaagcagtctcataaaataatttatactgttttacaaccatattctagacccaatttctataccaaaattttaaagttgaaaccctaccgagcatacctcgatcgatcatgggaccgtcacacggcttcggcgtcgaaatccgggagcaacagccggtgtttctgcaaattgcaactgttagctagagggaaattaatgattgcgacctgttggccaaactaataattccatgaggatcatgacaaggcctgcaactactgatagtaatagtaaatagcaatccctttcgtcatggacctacactactacacaaaatccttggacaaaaacacatttagattgcatacggagtattactggtcgtgtttagaaaaaataagcccattttcacgtacggtcgcattgaaaaatacccacccctctttccctcctacccactttaaatttttccccctttctcacctcccctctttttctcctctccttccctcctatccactttctccacttccttccgtcccgtcctctcctcccctcccctccccttccctctcctcccctccccttccttccctccccgatggtggcaatgggcgtaggctgcggctgcggcagcggtggcgcggcgatcaatgacgcgcgggatccggcaggcggtggccgtccccgcatggatccgtcggccgggcgccctcccctacaggatcccgctctcctcccctcaccttcctttcctccctagatccggcagaggggaggggcgtcagcggcggtgcggccgaagggaagcgcggaggccgccgccgggagcagcgtcctcggccgccgcggggaggccggatccgtcgctggccgctgtggggaggccagatccgtcaccggcaactgcagggaagacggcagcgggtctcgggcaaagtggcgacgacgatagtggtgacggcgacgacggtggtgacggcgtttttgatttttttttgattttttattttcccatgcaggcagtttaagcgcccgcgtgcgggtgtgtcacccgcacgtgaaaatcgtgattttcacagacacctcgttccagacgggtggaagatccacacgcaaaaaccgattccgaccacacgaaaaaaatcgttagtctactagtgttattccatttttagtctctcttgtttaccacaaaataaatttaatttaaattttagcaatcattataccaaattttataaaagtaagagataaatgcattgactgggagtagataaagtgagagataaggattcgatagagcagaagtagtgtatgtggaagtgtgaaatataaatttatttagaacagagtagtgtgtatatctctttataaagaaatactactagaagtatactagtatatctctttagagaagaactgctagtataatacttcctcattttttaatagatgacgccgttgactttttctaacatatttgaccattcgttttattcaaaaattttatgcaaatgtataatatataaatcacatttaaagtattataagtgataaaacaactcataacaaaataaattataattacgtaatatttttaataagatgaatgatcaaacatgtgagaaaaagtcaacagcgtcatctattaaaaaaccgaagatagtattgtttttctcatgctagaagccgaaacggtcgaccttgaccggcgacttgcacacgtacatactagagactgaccagatccaaagctcaaaacagagcccaagtcgaaggccaagtctgcatttcttggtgtaaaaaaaaagtctacatttcttctccacaacactaattttcttttgttcttttagataatatcttggagttttatataccctttgggtgtttggaggcatgcacgctgtgacacggacagatcgctgtcatctttttccctctcttgtttggaatctgccgtgcggacctggtcacattcgtggttcgttttgcccaatacaaacttgcaatgtcgcaatccgtcttgaccgctgaagaaaccgtttccttctttttatctcccttttttatcttttcgttgttgccatgatcattgtggagactgttttattgtgggcggtcaacattcggtccattttacaatattaaatacccatgcattgcaatcagcttatattaaaccctacaaaataaaataaaattattccctatctaatcatcctaatatatgtggtaaaattttgtacgtgcatgtcgagttacacggttgctgaacaattgatataaatatacatgttgtatgaaattcatatagtgaacgctcaaatataaacccacatgacagttggtggcagcagaaccaccactaccaccaatattttaaagtagtatagaaaattacaatatggatacaaaagtgtaaattccaagtggccactcgcattttaaagaaggtggttgcatccctttagacccgttccaaagtccgatctgaaatggattaaaacgagaaacataattagcatgtgattagttgagtattaactattaaaaatttggaatatatatatatatatatatatatatatatatatataaaataaagcaacttctacatagaaaattttcgcaagaaacatagcgctaaccagttttaaaagtatgctaatgaaaatttagaaaataacaacccgaagcgtagtttaggacgcgcacttcgtctgatcaaacatttattcattccaaagagatcaaacattcatgtattgtcataggtttcattttgccccttcaatgtatcttgacttattgtgctttaaggttaatgttgtaccacagtattttgtttttgcagtactgtaaggaagtgatagcaagcatttctctattaggtgtgatatattattatcgtacctcatattatttcccaaaaaagtatggtgtaacatattacttttccgtatgctgaatatattttaaatagagtgtcgctagctagatttcaatgatctaaatcctcaaaaatttgcttatcctaggatccatgtcaagatttgtgtccaacgacagcgtgatgatggtggtggcgactgcgacactatgtttagggtctatgtttggaggtgtgtattgcgtgaccgtgtccgcccactaggcaaagtccaattcttctttttaacaattcggcagtgcgatgttcatattgatagagcagaaaaatgtaaagttcagttccaatttctaattccaagacgttggcatgccctcctccctctcaagatagcctctaccttcggttcaaaaataatttcactttaatttgctcccttctaatatgaatgttattcattcaatatgttttatttatatcttacctactcacgtaaaattgatgttgctagatttatcgttaaacaaactatcataatatgcaactctttttatttattttttttatttttatagatattgttggtcaaagtagcatattaaaaattgtgtcgaagtcaaaagtacttatattttgggacgaatggagtatcatagtacaataaacttatattattatattatatctaatttattttttttaaaggacggatggagtattctggtttgctgccgtatctgccatggcgattgaggtgatcgatcagttcagacttcagagcctccgtatgattgactggatcactggatccactcctccacttttgcccgaatccgtcgcagctgattgcgaaacagaagcgcacatcgctttacaagtttacagctgcttggcactatctcagcttcgttcttcatctataaatgatcagctttaggctgtgtttagttcagtgcaaagtttaaattttggttgaaattagagatgatgtgactgaaaagttaaaatgttgtgtgtatgacaggttgatgtgatgaaaaaagactgaaatttgaatccaaactttaaatctaaatacagcctagttagttggttaatacaaagtcagaggtatatacgcgtgttttcacctgcccagatgcatggtttcttctcctgaaaaaaaattatattctagctctatctgcaggtcgaactagcatgaagcaatcaagagtaagttaaatcccgtttgtttaaaagtttgaatgatcatttgcagtactaaatgagcagaggaatggaagcatgtactactatataagtaaaggccaaaagacaagcgggaaattaaagaacaatagtactttataaacaaacaagcacctctctatcccaagacttgacaccatttaccaataaaaattatcatgacaatctaagttggggttatcaaattcttcgttatacatttaacaagcgcaagcaaatcctgccattttcttttcaacgttgatatgtgagcgctatgttggaagcgaatcatactacaactatgatttaattattttcggccattcccacaactctacgagacataaaacgaggcaaattaattgattattaattattacaaacatgaacacgggcggtctacttatgttttaatgaaacctctatagaaaagtttttgaaaaagaaaaggaacattcagtaatttaggaagcccgctaacgaaaaacggaaaagttgccactgctaatagcccaaacaaacggtgctagctgcaacataacagcttataagttgatcataagttggtcaaatactatttaaaggccagttcttttcgtttatgtttatgcttataaactaaaatttgaattttcaacctacaatttaaatgtgatcgtgaggtttttctcattatagtttatttttcaacctttactttcaaatcgctaataacatgtatataaaagttttatttacgaattatttttcgtttgttaatatgccgtttggacgatggagttcttaaaaatgaactgcatctcatatttaaaaataacagaggtagcacgcggtaaacgataaaataaataaagtactctctccgtcttaaaaagactgaatttttaggtttacatgtccaacgtttgaccgtccatcttatatgaaatttttttatgattagtattttcattattgttagatgataaaacatgaataatactttatgcatagcttatctttttaaattttttcataatttttttaaataagatgaacgggtcaaatgttagacacggaaatcgtttttttttttacgggggagtatactgatagctaggagtaacaaccaaacagttggagacaagcacgcggttcgagcgagcgtcgtctttgtggtgcaatttctcgggggacgccaagccccgctcggttcacgggcgtctcactgtgcggtgggcccatccccagccgtcccctcgcgggccaccactctctgatgctgacaggtgggtcccaccctctcgccctcttctcccctatatatacatatagtacaaaatccccgtgtgccaaactgccaatattctctctgccaaacaaaaaaaaaggaaaaaaaaccaccgcttttcgcagtgcgcttcttctctctccctctctgctctgctcttcctgagctccgcggcaaggaagcttctggaaggttctgcgggatgacgacgagcagctggggtggtggtggtggtggtggcggtggccccgtgcggctgtggtgctgcggcctcctcctgatgctcctttcaggcggaggcgggggcggaggcgccgccgcgcagaggcccccggcctacaagaccctctccggtaagctctgctgcctccttccccggtggcgtgcggggagaggaggagggggaaggggagggggaggaaggttctggcaatcggcctttgaacctttcctcttgtttttgttctgtttcccttttctccacggcattcaacgactctggtttgaatgggttggggttggggtttttgcttttgagttgattcgtattatataggatttctaaggagcaattcctttttccatggctggaaatcatgtgagcagagcagcaactgagcatatgacctggaaattgttaggagtttcataataagttgagaaatcgctgcaccgcgccgggttaattaattgtttcttgtcctttttatctgcttaattaccgatcattacttacagctctgtaactgataattattaccaattaaaattatagttcttggtgtgtttatgggttcttgctattgatgtgtatagcctgaattgagcaaaccattgggcatttgctattgcaggtaacgcgcccatcgtcatagctgaaggtggcttttcaggagtgtttcctgattccagcaaaaatgcctacgtttttgccttgtcttctacctcgggtgacaccgttttgtggtgcaatgtgcaactaaccaaggatggtgtcggaatttgcctccgggatttacttatggacaactgcaccagtataagccaagcttaccgagcgggaaagaaggcataccttgtcaacggcgaagaaaaaaaaggatggtttcctattgactataccatgtcttcgctgcaaagtgttatctgtaagtgtcaacctattattttttcaactcttctccagggttcaccgtttaggaccgaaatttcgggtttacccctgggtcctggtagtatgtgcctctgatgttcaagtttttttaaaaagaaattccctttgatcaccaaaacacatgatggttttgcctcttagctcttcacatagacataggcactatatgctttgaccgaactatcacaccattatgatattaaaacagtattcatgaagcaatgcactatttggcgtacctatcataaaactgcatgtgtgatgatcttctgttaactaatgactctgatcaaccaagaaaacctgtaaatgacgcatggtaatattttttttagggtgacatatggtaatttctgatcattgtgtcaattaagaaatctccctggtctcttcattataacagcatggcacaaaagataccgaagtcatttagctcctccagccaccttagcagcatcagctttcacgtcatacactgatgtgtccaggccacactgtgcagaaattaccatttgtagttaggtgggatcagttggttagattgtgttaatgacgagaacttttaaaatgtatttccgcaataggtattccacacaatgtgtattttggctaaagcacgtgtagaatttactctgattttgattggatgatgaaattcctctcttgaaaggtgtgatgtgttgatgtgatttgttgctaacctggtatacttctgtactctttttatgccattgaacagtaacacaggcaatttggtctcgcaccgacaagtttgattttgcattccttcccattcttcctgttaccaatgtgatagatttggccaagccatcttctgtttggctgaatattgaggttgacctactgctcttgcaacttgaacttgcaaaagttgttgttgctacttgctagctgttcatgactttgagttccatagaagctaatttatctttcattcgtgcagcacgatattttctacagacagcatggtttgaatatgacaaaatacatcctttcaattccgaagggtggttctgtgcagtatatctcatcacctgaattgggttttctccaaagtatatcaggaagagttaatcgcaaaacgaagctagtgtttcgttttcttgatgcaaccagttctgatccttcttcaaaccaaacatatggttctctgttgagtaatttgacatttattaagactgttgcctctggtataatggttcccaaggagtacatttggccagtgacaactaataactatattcagcctgccaaatcaattgtcagagatgcccacagtgcaggtttagaaatatatgcttctgactttgcaaatgatagaattattccgtataattacagctatgatccgttggaagaatatttgcattttgttggtagtgataacttctctgttgatggagtattatctgagttcccactcactgcagcagcggctattggtaagattctatcattattactctaattacttatcaaagttggaaagttcatcagtactcctctctgtaaaaagttagtgaatctgcaagcaaaaaaaattactaagaacaaaatttgtcaatggatgcttgatatttgtttgataaggaacaacactactttcatagctttatacctaataattggtcaccaccaaaatactgtggttcgtttgctctactgaaaactacataagccgattggtcaaaaaatgatcattcaatcctttttcttttggaaaggagatgatcatctgatttagttctttcttttgtagttagatactttacataagatcttgactgcaagtagaagaagaatctaggattgttgactcaagtgcttgcacatgggaaatttctttttatccaggggttgggtcattgttagcccaatataaccaccacagttactgattttccccttatccttaatgaccaacttttctttattttttttaaacattcttacagaggagcacaaagtacgtcatattgaagtttcatctacagcatgtcagttttaccattataaaattagattctatcctcgatatgttttaattttgtgctttttggaggagcactgaagcatttccctgatttgtaatatagaggaataaattgtaaagttgaatgggtgatcatagataacgatgatcattgcatcaccagcatatttggcactgtctatcatgtaataatatccataaagcatgtttggtttggattctataataataaaaggctatacaaacttacgtcctaactgattgaagattggataatttatgccttttctgcccatatactaactgattgccttgtacttccaccaatcacaattatgatgctttctttaattgtttggtgaagtagagtaataattaatgcattttaatctctatgtctgcaggttgtttcactaatttgaatgtaagcagtaagacagatcatggtatgtttcatttgggtgccaaacctactgtacagtaagacccatgttgcttgatacccagaagttctacttgatctaattgctgtagtgtttctatacagggagcccattaattatctcgcacaatggtgctagtggagactacccagactgtacggatttggcttatcagaaagcggttgatgatggcgccgatgtcattgattgttccattcagatgaccagtgatggagttcctgtatgcatgagttcaattaatctgtttgagaccacgaatgttcagagaacccctttcagcaatcgtgcttctatctttaaagatattcagcctactccaggaatcttcacattcaatctcacttgggctgatattagcagtagcgatttgagacgttagtttctttacctcacacttgctattttttttctattagaatttatctactctatcttggcaattaatgtggatggcacaataaatgaagaaaaataatcatgcatttgatcgttgtctacagccaagatatcttccccagagagtatatattatcttgtaaggaacccagtgcacaaaaatgcgggaaatttcttcaggttatctgactttctaacatttgctaaggataaagatttgtctggcatcatgatcatcataaaggtgatgcttcgtcttgaagtacttcatattcttgttaatctgatcctttagcttcaaattttctaccgcttgaattacatatgcactatcatcttccttctgtgggcaaaagttcttctgaaagttagctttcaatatttgtaagacaaacatgagttattaacacagcctgttttcggaagtctgtggtgcctagtaataatatattttacattactaccatatatatctatatatgtatatgtaaaattatattttcctcattcttgtcacatatttggaccaatttaaaatatttccgtatcagtggagccttttacattgatcaaaccttttgtactgcagaatgctgtatttatggcaaattcattaggatttgatgttgttgattctgtaaccaaagccttaagtgatgctggctataataatcaaactaccaaagccaaggaggttatgatccagtcagaagatagtgctgttcttgtcaacctgaagcagctggaaaccaaatacaagcttgtctacactctcccatcaactatcggggatgcttctgcttcctcactggtagatgtgaagaaatttgctgatgctgtcattgttgacagggaatctattttccccgagagccagggctttatcatgaaggaaacaaatcttgtgaaagatctccgttctgctgggctagctatctatgcacaggtgttccggaatgagtttgtatcaccaccttgggatttcttttcagatgtaacagtggaaatcaatagctatgtccagtcagttaatattgatggcatcataactgattttccgaaaacagtcagaagatacaaaagtaagtgtcattttctgtatccaattatccataaggttctattatttcaactcttgcatgtcttagatatgatgaaaatgaaatgttcgttcagctgatcacgcctagtatacattaactctaatggaggaaacaagtacaaaagaataaggaaatatcaactttgcagctccatttaaccaccagcaaattgtgtactgacatcttgctaatctaacatggtttttatcacctagacacaattatcctgtgtactgccatctcgctaatctaacatattttagataaagcaaatatttgtcttgttacttgaattgtgttatgttttgcacagtaatttatcctggccatattatggtgtcactcactgttgctgcttgcacgcatgctgtcctgttggcagtgaactcctgtaccggtctgggagttaacatgccttcatacatgaatcctgcggaaattggcggcctagcgcagctactcaacggcagccaagcccagccaccagctctggcaccaatgccggtactgaactcatcagacgtcactgaaccgccgttcccttctgccgcgccgaagaatgcacctggcggcgctgccaatgggagcacccctgcacccggtgcgtcgccgtcaggctctcaggccgctgctgtcatgagagccggcattctaccgatggtgacggcgctcttcgcgtctctgctcatctgagctgacatcctcagttgaagctgtgtaattggttgttcagagttcagttatcacactttccattggattgggaaagctatttattgtctgtcaatgctgtgctgctaggaatccagtagctgttttggtagggaaacatctgaatatccgtttcttcctgctgtataaatctgtttataggacaaaggctacaaatatattctagcaagcactgaactactgaatgaatgaagccgtaagtgtaactagtagtgtacattgctgactgagctggaagcttcagtgtaatgttgtaattaatctcatctcctgtctgaagagatgcattttgtatgtgttcagaggtgcaggatttcctttgaacttactagacgtggccctaattttgttttaactgaataaatgtgggtgaaatctgtagcatgagatcacaatcttgtctctctcaaattctctctgaaattatctcaggattattggttctgagccagatggtgggggaaataaaggagaaaacgtcctcacctcatcagggtcgtttcgacgagcatcaacagcgagcctctcgccggagacgacgacggcgccgccgccgccgccgccacaggagaatctggtcgagaaggccaagcggggcggaagcatctggaacattctagaaggccggcctcctcctgcttcacgctctaatagtctataaccccgtgattccgtggtttgggccttcgcgcccctggcttccgagagcgccgcgggggaggaagtttaataccataccagaaaccgagcgagggtttcttcagcttatataagcacaggctgtggcgcttcggccgtacccgacgggtttttacttattagaagctaataatgttcttactcatccttagctcttgcagatatgcctctggaggcttttttttagtgcccttgcaccttctgaaatcttacgtttaggtccttatatctagagatggcaatgggaacccataacccgatacccgacgggtttttactctattaggagctaatcgtgttctaactcttatactaatgggtttactgatgggcgaaaactcttaaccattgggtacgtggatatgggtccgttctttaccacccgtacccaccaacccgtgggtgaaaaaaactcgttgattgagcctaaaactatgaggaatataagtctcaatgactactaaatcatagcataaaactcatttcacatcttaaatattgttctagtctagttatatgacattgttattagatttcttgattatgtaatatggttgtataattttttttactcgcctttgaacggtaatgttaatagcattgctgctagagaaaatattgatggtttacaactctaatatggctaattacagtacaaaactataaatgctacaagtcaattatatgggtatggatacccgttacccgcatgggtgtgagtgtggatatggggacgattttgtacccgtgacgggtgtgggtatttaagtggggatatttagacattacgagtgtgggtatggggcaagggaacccgatgggtatgcacccgttaccatctctacttatatctcttggtccctggaggtatttttttactaatttacgtgctggtccttagctcttgcagatatgcccttggaggcatttttttgtgcccttgcaccttctgaaatcttacgtttaggtccttctatctcttccattcttttaacatataccatctagttacctttttaatcttttacttgtaagctttggcccctcgcaacattttgttcttcacatatatccttctggcatctaacaatctttcaaataaaccctttcatcttttatatctcagggtcgtagctacaaccggtttaacttgtatgaattagtccagttatttggcgatggtttgtgaactagccacgaggagcatacagcctgtacgtatggccttgatgaccaaaatatatctgtagaaaatgtaaaattatagtacagttgcacgccattcttccagccaagcatttaataaaatatcaccgttaattgtccttcaatggaagctggggatatctcaatttatcacaaaaataatcaaatgcgaaaatatccatatcaaatagtatgaggtaggtgttgacgcgaaaaacacgcactggcctgagagatctgcttaactctgcttaactctgcaggtccaaagaattgcctttgggttctgagcgtgccagctggtttgatcctgcaaccaacaagatagaaaaaagggcaaagagttaaatccatcaacgataggggattgacaggattgccaatgacgtatcgtcagaggccatgccgatgtaacttgcgtcagatcgacagaggcagatgaaaacttggagattgtttggtgtactcgatcggctgtagatgttagcgatacgtaatccatacaatgggatacgcttagatcgagtgattgggatagatcggtagctgcactgagacagtataaatcactccatatctaaatgtgccccaaagcaaggattatgcatgctcatagcatagccgataggacaaacctaacttgcatcggctaatactccaatactgccttataccaagatatcagcacagatgaaatatgtaaaactgaaaccaatctagcaagcaggatgaacctagcagattaataggaagcttaatatactttaaatagatgagatcttgatataagaggcatatttagactatccagaaccagataaggaagcaagacgactaaatcaggtaaggtcggctaaaactccgatgctatctctattagcaatcaaagaaggaactagataaaacgtttcaagacagtacttaacagatcgaacctaaccgatgtagcattaagcgtggaaagaaacataacgatgtagcattaagcgtggaaagaaacataagatctaatcaaatcgatgaaaacccattcaagattttagatacaccgcatagtctagcttgatatcgaagcctaagcttatcggccgttttcgatgatagaggctagccgatgaagcttaaatgacgagatcaatctagattatgcggtatatatgataactcggtggtttacgtaggcaggattagagtgtcatgaatatgtaagcactaatcccgagaacgcaagccgccataacaagctttacctcttcgtcggagatcgaacccgatgcagcccaactcgaaagcaaaaactcgaaacaataaaaatagaaaagggtggtgatgcgctgaagtatattgaactgtcgtcctttgattatttggtgtcgggtcatatttatacccaaagtacataatatgtccttactggacacagctctttatatctaacacaatttaaaatacgaatgagtccttcaggtggacccttaccaaaatatctctaaggaaactagaaaatgtcctaattaatagatacaattgccctttctaagactccaatccttgcgtggcaatagctatgaagtgcttcaaccaatccgatgacggacgtgggaccatctttcccgagactggttgcattggcttaccttcgtcggatctggcgctttgctgatatgtggcagtcgataccgcctatagccgatgctgctcgtaacctatacgtattctgctttctcgaacaggatttctccaaatgggcttcgtttctaacttcgaatccagctcatggtattaccaaatttggtcgttaacagtaggttaactggaaacgtatcttatgcatagaagcctttgcgcgtacacactgtgcacaccaactaccaattttcataaaaaaattctaataaaaattggacatgtactttcaatagtattatatctatgtgtaaagttttatcttcaaatttactatatataaagggtaaaaaaagaaaaaaaattctaacacatttatactcttaaatctatcagaatttttatattttgtattttagctgtaacaagaaaaataaaaattctgacatataagagaagatcatggagacaccaagaattctacggaattcctatggaatgactggccgaagaaaagaagatattggaggaaaattaacacgccgtaggtttaacccgacggaaactttctttgagtcctccatgtctctgtacgtaaatttatactatgtctttcacgtggctaaaatatcctttcattcaatttttcttatatttttcaacccctgttttatattctcgtgttttctcaaccctgtaattcagagagagcctaagggcatctacaatataagccatatcaagggtgtcattactaactgaagccactcttagagacacccatctctcaatgagggatactcgcagctgggctttcaaaatatcaagtaaccgagaggtactccagcttacgagataccccaacccacgtaaccacgattatgtatttccttctctattcctagcccaccgagcacccaccagcttctccctttctcttctcttttcttcgccgctttgatcccatcgccgtgatcgccgcttcttgatcctctgcctcctcgccctccgcagtagtcgcaaccaccgcctccctcctcaccctccgcagaagtagccgtcgtcgctgcctccctcctcgccctcccgggcaccactgcttcctccctcctcgtcctccctagtggctgactccatctctctatcccactgtcgccgctctcgccctctctcccggcagccgccgccgttcttactctctctctctcgttggcgctctgcccctctctatcccgtcggtcattatcgcctctttctcctgccctttccctctctctcccaccgccaccgctcgcctctctctcgctctctatccccttggccgttgccgctttctcccgctgctcgttgctgtccacctagctagctagcagccggatccactctctcacgtccttcctctcccgccgcctctctccctctttgcacggcgagcggcacgcggggcgtggtggcgacggcgcgatggttgctgcatcccctctccctccgccagtcaccgcctcactctccctccgtggctggtcaggaggccagatccggtcggccgtgctgtccctaggtcgtcgtcgtcgcgaatccgtctttgcggggctgccaacggctcctccaccacctcgctgcctcgcaccatcgctgatgagcaggggagacggagagaagacgagcgcgatgacaccaaggaggagggagcagcagtggagatgagggtggaactgaaaaaacggggggaggggagagcggtgtccacaggctctttacccggccatggccgacccagcgtagctcctcgcctggtcccctagccgaggagctcgtagagccgcgtcccttgtagagcagacacgcgtctctgccgagggacggtgcggcaagcttgaaattagacgagagccgaacgccgtgagccagagccccgcgccgagctacccatggtacatggcctatcggttgctagctagcttgatcacctcaaactcaaacccgtcttaattggccctccgatcctcagggctccaccacctcaacaatatccccatggacggccttgcgttgcgcaggtacgggcctaccgatcggctgggagattgtctgcgcctgtctccgggtccgaggtcgtcgcgcgcggtcgttttcgaggtggccgaggtttctctcgcggcgcgcggggtgcattgcacaaacacgcgtacccaaatacgcaatggtgctaggtaagctgcattattggtggttggcgtggtagtggtggccactgctggtgaggccgaccggcctccttgtcatgagccaaagggaggcacgaacgaacagttggaacgttctggaagaacgtcggcgtacgtggacacgtcacacgtacaagtgagattgagcagacgtacggtagtgtgtatacttctccgtttcatattactagatgttttggcttctctactcttagctagggccctatttagttatcgtataaaaactttacacactgtcacgtcgaacgtttgaatacctttgtgaagtattaaatatatgctaaaaaaataactaattacacagattgcgattaatttgtgtcacgaatattttaaatctaattgctccatgatttgataatgtggtactatagtaaacatttactaatgatgaattaattaggcttaataaatttgtcttgttgtttatcgatggattctgtaattagtttttctattagtgcccgaataccgcatgcgacaccctatataatactgatgtgacacgccaaaattttacatccctgaatctaaacacaccctaggttaactaacaaaaattttcacaatttgaccctttgcaaaaactatttttacaaatgaaccgtcaccaaaacttatttcaaaaataacccttggcgctgaacttagacacctcagcaccaaatagcgtggcgctgaatatgcgttggcacgctgacttagtctcccatccacggtggcacggcattcagcgctagttaacatggcgctgagatgtctaagttcagcgccaggtgatttgacgctgaccaaaagagtcatttttaaaataagttttggcagcggttcatttgtaaaaaaaaagtttttgcaaagggtcaaattgtgaaaatttcaggttaactaatatccatgagtttgtacccatatatataacacattcattgatttttgcatggatccattcaaaatcagaacgtcttatagcgtgaaatagagaaagtaacttggtagaggttgtttggttgacatacccatattgtcaaagcttgccatacttcatttagctaacatgtgtaatatgttgataataaaattgaagccatacttcagccataggaaagcaagcttaccatacttttattagccaataacatatgggattcacatcatggtgaaggaatcttgtcataagtatgacacgaacctggctaagttaagctgtggcatggtaaggtaaattgtggtagtgaaccaaacaattcctacatattcagagaagattggtgatagcttcagtatcaataatgcatgccaatgtttaagtgaaaagatcttttatttccgctgcgttcgttgtgtggtgtatacccctacatgatagtgggggagtactactagtactagctttttggtttgctatcatactgagaaatatgggcaagttataattggcaatgctaatattttagtaatacatgtgtctaatagataaaatattgatagtaaactaaatattaccgatttattattttaaaatgccaatattctcgtaggttacgatatttcagcttcaaaccggttctgaatatccttgtacgtgatatttacttcttccattccaaaaaggcaaaatttgctacaggacacttaaaaaacgtgtaattagccgtgggacaccgcaaaaatatgaattggctgtaagacgtcgcaaaagagtgataattagcaactagacactagagacattattttattatttttagtggaaacgaagagagaaacaattaaaaaagaccagattgccctacgtgcgcccaggatgtcagtctctcctctattttctttcctcttcctcccgacgattgttcttcccgtccgacgacgcatccccggcgcagctcgcgcagctcggcgttcccggagcagtcgggcgtcgccgcggcagccagcggcgtcggcagcggcgtcgttggtggcgagccgtgccggccggccgctccccacggctctcaggcagagcggcggtgacccccgccacacgccctgcatcgccagcgtggacaccggctgcgtgtatgcccacgcatctgtgtcctcgcaccagcccagctccagcgtccccgctgccgttgccgccgccgcgtcatctgccgcccgcctcaccacgcagcgccccgtcagcgggtggaacagcacggtgtacggtctcgcgtcgtcgtagccaggccctgcatgcatcgcatcgccggcgaccccatcggttagaaacgcgacgttcgtgcacgacattgagccggtcaccgaagaagacattgccgtcatcgtcggcgcagcaccacccgggctagctcacgctgttctccccgaggctgtctggccctgaacgactcgatcagcatgaggtcaaggaaccccgggttgttcgcctcgacgccggcgaccgcgtcggcgaggccgtgggcgagtagcgagcgccgccgcgaacgtcgcaggtgggggcgaacaggacaacagcagcgtgcgacatgccattctggttctgccgggtgaggcggagggggccggcgtacgcagcgccgacggagagagtgcgcagcacaacgaggaggctggagagggagtgctcgcggccaggggcattttagtacttttaacgctctttctctctccattttcaccggaaataataaaataatgtctccagtgtccagtagccaattaccactcttttgcgatatcctacagccaattcacgtttttgcggtgtcccacggctaattacatgttttttgagtgtcctgtagcaaattttgccttccaaaaaaaactcaattcttaggtttctatgtctaacgtttgaccgtccgtcttatttgaaaaaaaatatgaaaaaatttaaaaaaataagtcatgcataaaatattatttatgctttatcatctagcaataataaatatactaatcataaaaaaaattttatataaaataaacggtcaaacattggacacggaaatctaagaattaattctttttgatcggagggagtaaggttgtggtaggctacacacgtacggcaaattaatgaatgattttcttttcttttcagggaacagtgctacatttaacatggccgtcgtcgtcgatggtcgatcaaccgatggactgaaagagataattattgacacaccaacaaatgtacgttcatactttctaaaaaaaatgtacgtatacgttcattaattcgctactcctagctggttagctgttgatcatatcgaataagcggtaatctgccaaccatatttttaatcctgttacgacctgaggcaggcacatgtacatactatagttttcttccgttccaaaatattccacataacacattctaataatactataaagttaaaaatatcttttaaaataaataaacctcctgttcatcggcctaccatgtaaaaactcaaaatattaacatgtttacgtaattttgtaactggtgatcgaaagcggctagctagcagcctagctatctaaacgaatccaacctcttaattaccatcttagtattaattagcttagcttgcacgcctccttgaacacagtggcattgcattacattatagtacagtgttattgtgttaacagttcaatactactccaattaacagaggtgtcaggttaattagttcgtcaactacggcatggggtgatatatttctctttggatatgacagcattcagtctcgattggctgaatctgaacgaattaatgtccatccaattgtcagcttgatctagatcgacatgaggcaggggtcccagccaagcgtacatgattgcgcccagtcaccctcatagtcacctctggccataagcgggagaagaattagtggtgtatattaaagcatcaatcaaataacagttaagcaatcaaggttcagaggagacaatggcgacagatacccatcattcttccctgatctttgggattcttattagggaattgctgaatggcacgctacaaaagatcaacggagatttgaaccacatgatttacgtaaagattcgtgtgcccaagttcttctcctccagctcccatgaagcaccggctactggtgacgacccgatgaacactagtggagttagggtttagatggggggggggggggaggtggggatcaagggggaaagagggaagagatcaccgggcttagagagatgatcgtaggagatggttgtctggcgatgagcggtggacacgacaggcaatgaggcaccaaagccatggggatggtggagggcagtcggccggggttggtggcaaggacaaagtgagcttatggttaggaggagatggtcggttgtggacgaatacaacggtggggagatagggaagaggtggtgtaggggcatctcttagccgccgcctcgggaaggaggaggagagagatgaaagggaaatgataccgactggggccttgcgcggcgttgtagatgccctctgtccaacccgtgaggttgagtgacggcacagtcgggtggcagcggggagaatgcacatgcacaaggaagaggtgggggaggacgggggaagggaaacgaacttgtgggctactgtggttagagatgggaatgagcatagaaggaagagggattaaggttaggtgttgttgaacgaatctcaaaacaatccaatagtgcaaattttgcgagatttcggaggcggtttttctatcaaacgacatatagatagtctctatttattatcattgtacaattttatggtagaagctatagatgtttaattctttgaacgaaaattgcaaaaatctgaggttgtccgaactctcaactttgctagtagtttttagactctagctttgcgcttaccacttggcaaatatcatcgtcacggtgtctgatcttatctgttttgtgctgtggttctgatcaaggtacagttagctttgtctttgctgaaaaataaatatctccacgtgtgcacgaactcatccgccgcacaaattaggccacaaattaatctcaagtagctcagctcacggccggcatcttaaagacctaaacacatcggaaattatctgtagaagctctaagcatatatatatatctatcatctctagaacctcttttctgctatatcctatctgaaaaggattcagaagcaagtcagtaggtagaaagtcattaacaagtaatacaggtttttaattttaataacaaaccttaaaaagtgaatttcaaaaaaacaaactttagttttaatatatgtattcttcgcgctttaaaaaaccaatactaatcgataagaaaacatcaaaatgaattctaaaactatgtttttatatgtgcctaataagacgaagagtaaacgattgagctatttgaatagattttctttcgtagagtttgaacaactcttcactgaattcaaacaaattctactccatggcaagaccggaggaagcattatattgcatctgaactctgaagggaagacaccgcctccaaaaatatcagggaagcttagctaaaaatgccaccatgcgacgtggcgacaactcatcacgcccctcgtttccctggcacgagccttccacgtggcaacgattcgccatcattttaaatgtttttatcgtctatttttgaaatttttgcgtatttttccggtgaatttaaacttggccagatcacttctccatccattttaagtgtcgccctagctgctataaaaccagccgagacgaggcgagctgaggccaaccacggcggcggcggcgaacgatccatcagttcatcggcatggacaagaacggcagcagctacggcgagagctcgtcggacgacgtggaggcgccgctgctgctgccggcggcgaggggcgggacgatggcgaagggtgatcgtcgacgtccggcgtcgtccgcggcggcggcgtgggtgcgc

SEQ ID NO: 8569 - DNA, 31261 bp, Oryza sativa
gaaaaagacggtatcatagcatgggttcggtgtaggaatgaaacacctctcctatatgatgcccctaagtaccatatattggaatacaaaattaagctatgtgtaaaaatatctattatcttttctcatactgggtttcaaaaagacatttccctactgtctctttattcaaaacttatatacaactagccctttcgtccaatggacatggtcacctccatgattgtcccttttggctatgccattcctccatgacaaccttgatcataagctctacttgtgtaaagctcaacttttctcccacctttgcataggtgcaaaggttaatgatggcttattactttttttgcggggtatcgcgcgatgtggctgccaaaccagcattggtaggacaagtgcctttgagatgccctggccctagacacttgaatcaatggccaatgagccagagggggatgaggtgagccagggtaaaggcatatggtaggacagtggagtatcataagggcccggtagctttctgtttcatctacaccaacacccaaccatccgtaacttcctacttggagggccctaccgatgagcgagcgatgatagcccatgagggagtggtgaaggagaggatgggtgctctgtgctttgtctgggtggagacaagttggtccaagagggaccgttggtcgcgcgtaggtaggagtgtgggaggcactcatgactacttaaactaagttttttgaaatgaatcgcacaagactgtgaggtttcaccttgataaaagatcatagctctgacagactataatcaggaaaacaaaagaaaaggacaagccacaccacatgcctacaacacaagcacctattgtagatgaacaaacaggagcataaccttccaacacactaattccatccacgcctttgcatttagggcagagaaggcaagagagaaggatggatccgctctcccttacaagaccctccaaagtgaccaacttgaggtagctagggcgctgccacaagataacaatttgtctggacgaggcattgttaggaaatagattttcaaatgattcctctagggaggatgtgacaccgaaagcgttgccgtcgaccgccctagagaaccaaggcatggttttcacctgaagcattccaaacatggagaaggaaagagattccatgacaatgccctttggagggttgcgcttcccaccctctcttgtcattttgtccaagtcattaccaacggcctccaccatccaagccccttcaatgcacaaccatcaccccagggcccactgctggccagcctcctcgccacttccttgtgcgagccccactatcaccgcctcaaggcaatgccaccactcgtcgttggtgaccagacatgaaaaggagaacaaactccgccgccgccacacctagcctcatcaagatgcttcctcctatctgcgcagaagttggcaacaccatgccctttccgtcaccaatggccaagctcaagtggatggtgagcagccacgaacaccacctcaccaagggtcaccacagtcgctccctctcctcccatcaccgcaaaagcctccaacattgccatgtctcatcatcggtgatcaagcatcacaggaggggtgcagtggccaacgttgccacacctagtcatcgcataaacgctctgatcccacccattcctgcacctccatgtgggcgggcttgcctcgccggtccgtcactctgtacccacaccgtcgcagcccaaccgagttgcctctcatgtgccaggatgccactggccgccaccacctcaggtcacctcaccgtcgttgccgtagtccctgttaaatatgtgatccgaattttaggcctacaatatattcggattagtttcctagtaggactccatgtcttttcctattaggtgtctttcttttctctcctatatatactcttgtaagccgtacagaaaggggtgacgttcctattgttatttccatacgtttgtaatcaactattcaatagtgatcattgcttgtcagcatttccacataaaattcgtgtctccattgtgcatatattttcgtaccagtcccaatgagccatcgcggcagcccatcaactagatcaagtcaggggaggggtcatttggacttggtctctccaaactccaattagctaatgtcctctctctctctctctctctctctctctctctctctctcccacacacacacatacaatcaactcgattgtcatcgatgctacctcttgcctttgcttggactagggtttgcaagcttgacccaccaacacatactgcagaaagacaatgaagtttgacgacttccttttgtgtaaggaaagggcaaatggcaaacgacatatttacaaacgaaaaataatttataataaaacatttatatacatgttcttaacaatctaaaaacaaaaggctgaaaaataaacttcaataagaaaacctcaaaataaacttcaaatttaagaatgaaaattcaaattttggctgataagtataagcataagtaaaaaataagactgcaagctccaccaatcagttatgggggataaagagggtacgatgaatttaaatccagctgacccctcaggtacaagcaagtagtagatgagcacacattttcctttcgttaatttaatgttttatagtacgctagcattgacttgacctctcctagtgcaacttgatcttcaaattgaacactgatcgacgtcgacgccttaactaagctaacagtgaacaaactcaatgcacactttagtggttacgatggaccggacgtcgacgaatgaacatccggtgtgcacattgccagctggtacgtactggctcaatcatctcaatcgcatataaaaggtagttataagtagcactttgtaagcaggtttgaggcacactgcgaagaatcaaagatggagaaacatgcagtagcattagcagcattcacttttctagccgcccccctgctgcagctgctgttgtttgtcgcggggaacggcagcagctgcaccaccagctgcggcaacgtgagcttcgagtacccgttcggcgtggaggccgggtgctaccacccggggttcgatctcacctgcaaccactcgtacagccgcccaggctgttcctgggccaagaaagcagcaccatgcatcaggtgctcgagatctccatccccaacggcaccgtgcgcatcaacagcagccgcatggtgtttgcgtctgccgttttagagaacagcaccaccatgcggtgggaggtgggtaaatcctacttcctgtcggatttaaacattatagcgttggtaggatgcaacgcccaggtctccctccgcgattggggcgatacactcgtcaactcctgcatcacgtcgtgccctctatcactcgactccggtaatggctcctgctcaggaattggctgctgtgaggcaagcattgctatgcacataccggtctacagcattagcgccaaccaagtggtggacccgggtgcaggacctgaccctaatgaaccaaattttttcgtgtacatagtagatcaggcgtcgttttatttcgacaccaacatggttactaagggcatcagcaatactcctgaagcgctcccagccatgttaaactggcttatactcagcaattcatcagcgtgctcggcatcgaccaatgcttctgcaccttcgtctgcccccgaatgttgcagcgccaacagcttctgcaaaggttacaacggtactactgctgactacgatgggtatcggtgctactgctccgatggctatgaaggaaatccttatgttgatggtggatgccgcggtaagtatgtagtactacctccgtttcagattataagactttttagcattgtctatattcaatagatgttaataaatctagacacacatatatgtctacattcattaacatatatatgaatgtgggtaatgttagaaagtcttataatatgaaacgaaggaagtacataatatgctctagactcttctttcaatattttttttatttgtaattgtatttcaatattaactctaaactcatcatttaatatttcttattttataattttgaattttatttattctaaattgtatttctatatcaactttatactatttttccaatatttcttattttacttatatctagattgtatttatatatcgactccatactatttttccaatatttcttattttacttatatctaaattgtatttctatatgcactttaaagtctaaaatacaattttaattttattatattttattctgaatttcagttagttctaaatttctatatggactttatactattcttcaatattccttttttaaaaattttgattttttttttgttatttctaaattgtatttctatatggactctacccctttgcctttaattttcttttttttaattccaaattttagttggttcaaaattgtatacaatatggactctagacacctctttcaatatactccctctattttaatatatgacgtagttgacttttttttatgatacgttaacaattctttttttagaaaaagttgtgtaattatcatttattttattgtgacttaatttttcatcaaatattctttaagcatgacttgaatatatatttttatatttacacaaaattttgaataagacaaatggtcaaatatttgttaaaatatcaacagtgtaatatattaaaaaaggaggtagtaccttatttcttaattccaaatttcagctatttttaaattgtattttctacatggactctattttttttccgattaatatgagaaattctaaaccatgagaacgaacgtggaggtttttttccctgttactttaataagttaatagattgaccggggatttattccacacctcagcaagtgtggaattaatcatttccaacaagtctccttctattttcgtgagatgagattaactgaacaaactaggctttaactatttataagtgaaaaccgactaacctttgctatcggttttgtccttgattggtggatgctatcaacttacattaagttttatatttattactttcttacagagttattacagtagaaagacttagtcatatttttactgtaaaaagtctaataacgtataccctctgtcttaccggccgacatagtggtaataagtgcgttcttattttagtctacccttctcttatttaatctaacttaatttgttctgttcgtctagatatcgatgaatgcaaatctccacacatctacccctgttacggcgactgcaaaaatacacgaggagggtatgattgccagtgccatcatggatacaagggaaacgcttcgatactgaatggatgtcaaggtacgcatatatactcccatcgtatcaaactacaattactttatgcctctccctattgacagagaagtacgtaatagacaggcagagtagcttcatagagaaatttaataattagattttttttgttaatttgttttaattgacacttgtttggcgaagtccatatatatcccggcccatcgttggggatagcctgccagacaaggccttgtagagttgcataataattttccaacatggcaacccataattttgatactaagctatttagtttcaattccgttgtattatgtaatgtaaataaaataaaatgaagttttactttcattttttttaatagattgtcccataattttccagcattgctacccgtccttccattatatatgcttactaatttatacttcttctgggcaaatttatttgacgttgatataacttagtttagttcattagacatcaaatatttcttaatagagagagtaattgataattttatttttcccgtggtatttgtctagatattaacgagtgtgcggaaccagaaaaatactcatgctatggtggactctgcataaatacgccaggagcttttgtttgccgctgccacgacggaagctacggtgatcccttcacaaaaggagggtgccgttcatctaaaggtgacattattgcacaactatactacgtaccggctatatattaatctatctatgtatgcctatgttaattagaaacttcgaagatgtttcacgttaaccgaagaaacagtgcacaactctaatcatccgccgaattaatgggtgaattaaaaagaaggaacccctacgagttacaagttgattatcagtaattttaaaattcaaaattatactaaaaatatactgacttgagagttcaaacgcaggtaaaacattatatttattaattatgtgttctaaaattattgaacattgagaaaaacataaatcgagacattcacttcttcatttttattttataaataattgtattaataaaatataatgttaatgtagaatcgtaaagggtatttctttaccccaaaagctagccactaagaatgggttgaattagttagtaccacaaattttgacaatttaaccctttgcaaaaactatttttacaaatgaaccaccatcaaaacttatttcaaaaatgacccttttgttcagcggcaaatcgtgtggcgctgaacttagatacctcagtgccaaatagcacggcgctgaatgtatgttggcacgctgacttagcctcccatccgcggtggcacggcattcagcgacagttgacgtgacgctgaggtgtctaaattcaacgccacacgatttggcgctgaaaaaaatgatcatttttgaaataagttttggcggcggtttatttataaaattagtttttgcaaaaagttaaattgtcaaaatttgtgtagttagtacagtcttcagctgcgactgtgccactctagccatggctacagtgatgggcacgaaagaaaggggtcgatcgaggaagaactaagggatatggtgacaaaatatgtcaacaaaaccattgccaagtttactttcaaaaaagaacaaaatcattgccaagtaagatgtttaactagacgaaattcttttgtgtgcgtacgtgcgcttttagccttcttttcataatgtagtatagatttttcaaaggaggtgtaccgaggcgcaccacaatgccccaattatttatttttatcattgtgctaatgtaactctcgttccgcaattaaaagttcatccctgcataatcatgaaattagtttcttaatgtatcctttcttcaggtttgaccattggtctaatagtcagcggtggttcagtccttctacttctagggcttgctgctcccttcatagttcgcaaggtcaagctacaaagggtaaagaaaatgagggataaattctttatgcaaaaccatgggttattattacaacagttaatatcacgaaacacagacttcgccgaaagaatgatcattaccttacaagagcttgagattgctacaaacaattttgacaaatctcgtgaggttggtactggaggacatggggtcgtgtataaagggattatagatctacatgttgtggccatcaagaaatcaaagattgttgtgcaaagagaaatagatgaattcataaatgaagtcgcaattctttcccaagtgaaccatagaaatgtggtaaagctcctcggatgttgccttgagacagaagttccattattagtttatgagttcatttcaaatggaaccctttaccatcatcttcatgttgaaggatctatatcattaccttgggatgatagattaaggatagctcttgaagttgctagagctctttcatatctgcattcatcggcatcaatgccaatattttatagagatattaaatcttccaatatacttcttgatgacaacctaacagcaaaggtatccgactttagagcttcaagatatatctcaatcaatgaaacaggaataactactgcagttcaaggaacgattggctacttggatcctatgtactattatacgggacgacttacgagcaagagtgatgtttttagttttggtgttcttcttatggagctacttactcgaaagaaacccatcggtggtacatttgataatggcgatggtcttgtttcacatgttatctcacttctctcaaaaggtaatctttataatataatagattctcaagttaaagaagaggaagatggagaagtcctagaagtggcaacactagccacaacatgtactaagtttaaaggagaagagcggcctacgatgagagaagtagagatggcactggaaagcatagtttcaaagaaaagctccttctgtaacaagaacagtcaatcaagtagtagatccgatgaaaatcgaattttagctctttacatgtcgatcgaaggagttaccaaggacaaaacaattacaattacagaaagcagcacggaaggggaaataccattgtcgtcaaggttttctcgataatcattctctgtcctgaacgagaacgccttgcaagaaagccggaaacttagttacatcgatcctgttctgttctaaatgattgctaaagtaattttgctgtaaaacaataataatgcaacagaaaaattgtgtcgtatcagaactttgaagtacttgtggtttagttcatgttgattaagcatctgattcgatcagtttgctctaatggactgaaattgcagagtgccgtttgtgttttcattattcattgaattattctgctagcggctgcagagcccatcggctctgtaggcgttcatttttacagtttatctatcgcacccgcgaagaaagataatttcgttctttcttatagaataaaaagggaaaaaactcacttctacttattttttttaacatggatggaatgaaaactatgtcctatcaccctcgaagcggtgaaaataatgcttcggcccgagtgtccgaggctccggacgcctctccgctcggcccatttctctctagaaagtcgagtcctccatcttccctttaccattttttctccgctccatctccggagaattttcagaatttgccatccaatacgcactatctttaggatatgccatccaattcgtactacttttaaaatatgtcactgggacgtgaattttcttcactctatgccactccgtccgatgtcagtcctcgtcgtcgttcgtccgtctgctgccgctcgcatccccttctatccgtcggtgccccctcccctcccctcgggtccattcgccggcgctggccccgtctcgccgtccatcctccggcaccgcccgcgtccccgtccaccggtgccaccaacggcgacagttggactcggcagcagctcctcttcacagcatgtccactcgggggcgagggcgggtggagagttcgggggttggggcggggctggggtcgttccagcccaaccgctcccgatccaccccgttgccatccctattgacaagcttgtttctcatccagctcataaggttttttgttttgttggtcttttttataagtttctaatggaacatctgcaattgcaaggaacttccaagctgtattagtaggatcctccacaactcagcgcgatttcaacaaaacttgagaacttggcacttccctgcagtcctgtactgttcgtgtaataacttatacttcctccgtcccaaaaaaataaatctaatacggaatgtggcacattctagcactacgaagaaaaagattactagctttttaggagtagttcaaacgaaacaacatgtttgcctccctttgatccttgcagttatcaccatagatctgccaaactgatatgttctatgccgaacagttaactgaacttacaatggatattcagttatacattgtcagtgcaccaacacaaggtgactgaatagtaattcattagtaactaagttcagatcgccttatgagtccgatgtgtttatcattcctacaaggacagattcagacgatgattctagtggcagtgaaacatgcaggatatgaagagtggaactggtgcagattgtagagagaactgatcaagctaggtacgctcctgttaatcatgatatattatgaaaagaaacagaagagatcagaagggaactttttcttgtagagtatgcaatcttgctgatcaatttacagggatcactgatgtatctactgttgtaaagaacatgtgcaacaatggaaattcagaactattgctttcttagcgaaaaaagataagaaagatatgtctgacatgcaagaattctgatttctggaggtgttgcactgctctgaaaagtgcagaataccagtatatgactataagaattttgtagctgtctttgcctcaacaatatcaagtgctttgttgaggtaaacagtttcagaatagctttgttccttctagaaaaaaaaaatcccatgaaatgtttttcatgtctgctcaaggaaatgacagggaaaggtggaaaagaaaatgaatcactcctgcattttctaaacctgaatctcagccagataatttccatccaacggatgagacgagcaaaccaggggttcggagaacaattcaccgaccccaaccaaagataccccctacccatcagcacagccgccggtgaagttgccggcacttgtgtccatcttgaaatccaaaattttccctggaaaattttcggatggatccaagacacctgcagcagtttctctttgaaacacaagattttaaaaaatagaaatatataatgttactcctgacggctcattgaatcctacagaaaatgaatccacaagtttgttttctaaaataaatgtttcgtactatatagataaaattttaacaaacatgcacttagaatatgccaatttcattgaatagagagagaaacaatgtacaaaaatatgaaaactgtacaaaacagaaaaagaaaaaagaaagccggtaaatcatttatattttggaatgtggtcaatagcactatcggagaacatgggaattttgagaaaggagaagagaaacaataagatctacgtatcttcctgataaattttctttaaaatttctataaaataagctattcgataggaattttaaacaatttcgagagggacatttcttttctcgaaaaggaccctataggaattaatgtgttccaaagaattttaatcccctaaattttctttatttttttctttgttacaaaagagccctaagttccgaacacggtgaaatgaaactgaaacgaaggcaccactagccgacaccaccggcaggcagctcgcagccatctggcccatctccatctcaacctctcacggacacacggacgatcggtcgacggatggacaaaggaacagccacaaaaacaaccagttaatttccatctcaatccacgcaacattggtcactgatatatataccctctaaacggtttacatatcagccatacttaaagttagacaaaaaaaagtactacagtacagaggatatgtgttccatactcgaccatgcaatagtcacgagctgcctcttcgtcgtctagagacagacaaacagcttatcctacccgacactactagaaaaaaaaattcgtagacgatgtgcttttaacttttcaggcggtctttttttttttggcaccatatgtccgcctgcaatataggggcgaggggcaagatgactgtccgtctgggaagatatccattttaagagctccgcttatatctttgtaggcagcgtgttatctcgtccgcatgagaagattgacctatatagtattcttcctccccgagttgagctttgtagagtttacaggaagtttctctattcaaaaacaagcaaaatatagaaaggagattttgaacttgaaattttcgatgaaattttctacaataattagatcatacatttgcgcgacagcctcaagcacgcggatatggatcctctgcagtactacacatacagtagctgccactgacaggtggaccggtcccacatgtcagtggtagtagcgtcccacatgtcagtggcagctactacatatacagtactgcagacaatccccactgcaagcacgcacatacgcaagcatgcaaaatcgatcgatcgatcgatattaggtcgtcgccgacgatgacaggacactcccggtcgattggccgcgaccgtttgtcaatggaatatctctctttctttctttctttctcgacgagtccaatcacatcatgattcatgcatggccatcaacggcgtgcgtgcgatcgagccgatgcatgcgggcgcttgccggccgcggcggcgacggcgatgcgacaggccggatcgatcgctggtgttgctcgctttttcttccctttccggcgaggtcgatcgacaacgacgacatgaatgaatgattcgtgagtcaaatgtacggtggacgaccatgcaccaatcagcccggctagtgctagtgctagtgctatccccacacgaccactctctcgagttcccctagatagatcctgtttcttttttcttttcctgattcatggacgttttccatcctctttggttatgaaaatgcgccgttttagatattggcacggtctcaacatatatttaattttaacatgtcatttttaattttttatgtatctgtacagctcggaaatacaattttaactcctatcgtaaatatttgcacatataactggaagagcttacgatattaaaagaatgcgtgtttttttttcattttaaaagtttgactttagagatagtatgttttcatggtcataaccagactagcatagtacttcctccttccaaaaatctgagacctattttattctttggtttctctaaaaatctgagtcatatttggagtcactatgtgctaaattaaattgttgaccagaaaccaagaagccattttagtacttattggttgcatgttcattatttttgccacatggtgagtgagttaattgcttcttggttttgatgaaaaagaaataggtatcagatttttggaaggaatgagtagcatataatattatggtgatgtttaaaaaaccaccattatatctctattaatttaaagcccattcgctgctccccatatatatattagcacccaaccattgtcttcaccaaaaaaaaccaagcaattgattaataaaaaaaactggctgtattagttgctttcctcactcccagcccatttctaattatacaggcccgttgtaacatatcagtaagttactcgtattaattagtattaaaggcataaattaattttcctgttatgagtgcgtcttgttaaattaacatgtggtataattggaagaggttgtactgtacatggtgtttcatcataggtttgtagaatctcttgttaaataatacagcaatcatgtggagaaaatgtgtacttttgggtgcatatagtacaattagtactaagcaagatttgtccatcgcatactagctgtcggctgcgcatctctgccttcatttctcagtcaaatagctaatcatttggggaaagtagatttgttggaagcaaagaagccttttcttttatttcttctccttttatgcctgcctaatttcactggcctgaaagtgaagtcagttgtcatacggagtgacatgacaatagatagatttatttgaaggacttgaggtaggtagatgaaagaaagcctttgtttccatcctcccctattcagcatgaccgaggttccatcgcgatttttgacattatggtcctcatataaaacttattttataaaatatgctctaaaaactaatttagaaatgagtaaattgcgtattagatccccttatgagaccattgtggtagcctgaaccagggtaaagcaacattttcatattggactggttatatttaccaaatgattcactttggtcctggttcttctatacctagctagcgtcagcaccgtgctcgtgccaagctctcctagggtcagctacttagcattgaaggcgcatacttatgatggaggtcaatctccctatctgggttcgtacttaagcttaggaacgaacaagagaaaagagagaaaaacttcccccattgctgtggagagggtgtttagtggtcaggtgggggtgtgagaagagcaagtttccgtgtacatccttggccaaggacatgagcgacctgcttctcgggctggcttggctttggcttggtgaaggtgtactgatcgatgtcggcagtgaggaggattttgtggagatcgtagtgggggacatagtagtattccccccaagggcattagctgtgtacttgggatgtcaccaagcccatggacaagctctaacttgaggtcatgcaaggcgacgggtggtttgcaggctgaaggttgagcacagtggtgtcaccgactagactcaagatcgagcatcggaatggtgccaaccggaactgacgacctcatcgacagtgcttggctttggccatatggagagaagagagccattagagggagagaagagagagatggagctggactgctggaggaagaacgggtccgagttgaaataattggcaaagacagatggtccaaagtgataatgtgtgtttaccccagtccaacttgcaaccatggtaaaaatatgtggcccaacatgcaatttactctttaaaaatagacccatagcttgccgccaaagacattggtatcgatgttatatgtatatacatgatagacgttggcaccaacatgtggttgccaagagtcacactggtgttgacatggctagaggttgcttcaagaagcctagcacagatggtcaaaggtgaaggccatctcatgagatgtagcgcaaaattacagacccaccatctctaggtaactagctcgaccttgccctccatcgacatcgtccatgggcacctggctcgaccttgccctccacagacaccacatctggaatcgaccaagcctctagcctccagacaggttgtccctaggcttgacgccagcctccatctaagacatctctaagctcaatctctgcccaagttgtctcaggctcaatatgtaatcctatgcccgtaccatctcgggcttggccattcttgagcttgacatccatttctgccagcgtagctagccagcttgacatcgggatctgcccatgccctctcgggcttgagctccccccccccttctatcataggctcgagctcagtttccacccttgtcgtccccaagctaggtctccgcatgtgttgtcccttactaggttggacctcacctctgcttgcgacatccatggcagctggtaacgcagcatgggggacgagggtcggtaccagagccattagtaccaatctctaggcacgctaggttggcttggtccaccacatgtgttggggctcggtgacagggactccagctccatggcttcaggacccgaataagtttttcagaggtttgtttctaaaatggctaaagtattaaaagtgcaaaatgtactaatatataaaactttttgagtatgagtaaaacttaataaaagaatatggctaatttatcagtaaacaaatcaaccacaagtgcatttaggtaaaagaatagaacataggactctttggggggcatagctaaaacaaactcaaatgcacctccaagctaacatatattaggttcggatttcatattcctattttcagtaattacacagtaaatttctttgataataaaggtaccttctattctttacatcagctatagatccacgtatctactccctccatcccataatataaggcacaaccactttccttaaatgttccataatataagtcatgcatgcaagcatgcaattaactataacatcttctctattaaattataacttttttaaatcctccactctcatgttatctaatcctattggatgcatgcattttatttattaggatgatccaaactacaagatgataataattatttcttggtctttgggttaaggatggctgtgccttatattttggaatggagagagtatatcacacaaatatttatcaggtgattagatactctatgtatggatagacacatgagcctttttggagagcttctgggagttgcaaatttttctcaaatcaaaagttttcctcaacagttagcttttcgtccaaattatgatgatatagttgcataatctgataatgaattagaaaccagaaaacattttttcagcttatccagatcttactctataaattctcactaataatctaaagctccttaaaacatccccatgaagtcctagctatcgatatgatccaccgctatctccgactttaactatgacaaaatgcagatcaatggaacatatttggctaaaaaaaactcttaaaaagtgcaagtgtaaacactagtagatgctaccagcagctataggtcttaaaaattttcaaccccctaggtcgccaatttctcacattggcaggtaaacttttgcagtaagtaggtagccagcatcagatccaaaagtcaaaaccagcagctcaagaacacaggcagtatctcgtatatatggactaaacaaaggtgatgaagatagcgacgctaatgccgcgccttaattagtaattaatagtgatccacgtttcgtgctgcatattgctctaccctttgtatatttctcgtcatacgcttggtcggggagagtgtgaatcccgaggacggtaaattcttggattcgtgtccatttcttaaaatggattaattcctcgagcgatgttgccgtggcgctgtgaacggagcacacagcgctgtagccataggaattttacagaatttctacagtaactttgtaagagattgctggttaattttttccattataaaaattatccaatgtttctttttttttaacgactcgcacaagacggtgcgaagttcataaggagttaagggaagacgtttttttccatgcaagttagttgagtttccaaataattgattcatttacaatgaaaaacagacacatttaatgttatttgggaattcaaattagcaattcagttatttacatatgagtgcttaagtttttttcgtgggttcaaaggaagcatagataatatgatgatgtgttaggggtacatgacttcagtcatcagggttaacaactctactaatcaacgtataaagtttggtgtccacatatattacgcatatggtgagtaggctttcgataagaatttagtaaagctacagatacagtaggcgtgtgtttgaaggcgcacttataggtgtgtgtgtgtgtttgtgcatgagtatatatagtgtgcgtgtgcagccaagaaaaaataattcgaactaagatattattatctttatcccctaaaatggggagtactttgaaaacacatatgtagtggctgcaattgtctgtactactgcaaatttactatgcatagagaaaggtttgatacatgagggggaccataaaaagttaaggatattgaccttgtttatcctctaaagtcgaaaacactagcaaaacaaactctaaattgtaagtctggtaagctaattaagtggcttgaccagtcaaaaagagcttacaggggagtaacaggaaaagggaagctttgaacagttgtggtgtcaacaggttatggacaaggatgtgatgcaacataagagagaaaacaaatatttatgagaagtgtccttggtggtggttgttagggcacaaacaagtagatgtgtagaaggaggctagctgtacatcaccagcatattaaaccaaactacaagaaaaaaatgacaaaatgcaagtgtgtataaaaaccagtagaaataaatgacaaaacaatcaaatgtatataagctagctaaaaaaaactattagtagttctcaacaaccacttctcaatcatagaagctatgtcacaacagaacacaaagtgcatgactggtccattagtcaagagtgatcaagagtctcaaaaccacacgctaaaggcacctaaaagacaaaaaggctatgagcataacgtttgctcaatgattctttgcaatgacaggagatatcaattttgcattgcaaaattatatgcaggactaagtttcttgaagattttactctagactgacataatatggttactggaaactactgcatagagactagagagagaaaattcataatatatttcagtacttatgttagtaaacagtaactgcattgcactccagaaccagggaataatctagattctagagtagatagagacgtgtatgattcacatgtatgctcatggtctcatggatgattcttccttgaagaacattacaataacatctcaaatgcagaagcaaatgattaaattataaagctgtaatattgcacttgagctccataccaattaaaaggtgactttatacatatatatagtcatatatatgaaatcttcaggaccatctcaatttctggtgataagaccaatggccttacatcataatcaaacgagctaaaagacagtctcagcaagctaattaaagcagcaagaacggcaacaggtgccaaggagaggaaagcagaaaagaaaaagaaagaaaaaagagaggatttgaattaattcagagagagaaaaaatgcctggccttcctgcataccatcatatgatcagtaccatggaacggtttcttcttcaccaaaactcgatctcctccattttgttgagctaagctcgcatggcggcctccatgccttggctctgcagaagaactactgagagaagacgacggcggcggcggcggcggcggcgacgacgaggtcaccggaatggcctcccggagacgaggaggagcagggaagcatggtgaggaagggaaggcaggttgaaggagatggtggcattggcatcctcctcttccttcttcatatgtcccaatgaactggtgctacttgcacaaagcacaagcgtgtgggttagagagagagagagagagagtggagggagggaggtttctctctgcacctagatgtaaatgtatttttggttagaatactagaggtttttaagcacacacaactagcttaggctgtgttcgcatgcaccttttcccatcccctcttcttcgttttccgcgcgcacgcttttcaaactattaaacggtgtattttttgtaaaaagtttctatacgaaagttgcttaaaaaatcaaattaatcaattttttaaaaaaaattagctaatacttaattaattacgtgttaatggaccgctccgttttccgtgcacaggagttaggttcccatctcccccatccgaactcagccttagcagtagcatgagtttacacatcaggatcatctgtggccgcagtccatgtggacagctatcagctcatgttcactaaccataccataaaaaaaataaggttttatggagccctctactgtatctttttctaaaagggtgtaaaaactattggatgtttacctctgttacactttaccactatcaacaattcaagaagaaaaatgaaatctagatgaacaatactgcaatgttgttttttctaggtacaagagaaaaccccgctctatattattgttgtacaaacccagatactgtaatgttgtcatataaagtaaatgtgaatggatatataaaacatctaatgcgtcatatttccaaaatacaaagcagtggaagtataatttagcagattgctagagatatggaggttaatttgattggaggggacaaatataaaatgcataaaaattgtacataaggaacttttttatattatttagtaacgaacaagtgacaacttgcatgtgtatgtttgtctttcacataatacgaaaattataactactcgcaaaatggtttaaatctattgttatttgtcaaataaccaaagaagaaaacattgctacaactataagaaaagaaatcagttgcctttagactttagtaatttgtcagataaccagaccatacacaaatgcaatgactaccaatgagctcgctctaaccagaccatacacaaatgcaatgactaccaatgatgcagaaaatcaaagccttttaggagagataagggagaagattgttcccataaggagctgaccaagagaacgagttataaggctttggcttgctgatcaaagcagaagtgtaggggtccaaaagtgaaagaacaccgtcttttttctccaatctcacgtgggatcaattccatctttcacacagtgaaagtttctaagagaagggtttttttaggcttgccagttagcaggggtgacttctgttttgccattcaaatctctgtttgagaagagggttgaacaatatgtgtatgcatgtgctgttgaccagcaccttttcatgtggaacacaagcaatagcaaatccctatttttgtaagatatatgagtgtgtttaaaagtaaatctaatcatttggttttccattaaaaaaaatcaaacctttcctctagattgcaagcctgcagttctaatcatgttggaagcctagaactgtaagaaataatagttggccatgcttgtcttgggtttgagtcgattttgaattttaggtttgatttcttaaaagaataattttaattagctagcttttgtacttgttttctagcgatcatgatagccagacaacaaaaataacaatattcaaaatcacctctagatttttatcctagctccaataagcagtagtagggtacgattcatatgttgatatgtggtaacacgttgcgattccacatgtacatgtggtgatgtttgtgcatgtgcactttccttgtaattgtaaaatataaacttgcaaagaagggataacctagtaaaaaaaatgcacttcctccgtttcatattataagactttctagcatcatccacattcatatatatattaatgaatctagatatatatgtgtctagattcattaacatctatatgaatgtgggcaatgctagaaagtcttataacatataacggaggtagtacctgattttcaccaaaacattgagtgatgaaatcactggtagttgcaacctattttcttcatccataatcgaagaccgcaaaaagctagatctaagagtgatccatggagaaggctcataggtgggctaggttggtgatggtgcgatgacgtggatgaatagtcaaaacagcgacgagggaatagagagaaggcaacttggtagtgctttatatattagggttgccgtaggtacttgagatccaatggtccactattagagttgtcatatataataggtgatccaacggtctaaagagcacataacctagtagggaaaaaacattgaaatggtacctttacttacaatgtttatttctaaatgtctcagagaaaatataaattatagaggataaaatacaataaagattcctcacatgaacagctaactagggcctacctcaccatattcgccctcttatagcgaaactaggtgcatggaaatattgttccctcgtgttgttatctcacattatttttatggataaggaagcaaaaacagatcgcgtgagatatcaccatgagaagaaatggaacagtgagatgtccccatggaaaataaatactccctccgtcccagtttagagggcgctaaatatttctaccggtgtcccacaatagaaggcgcatgttcaaatttgttctgtttctcccgagattagccccgttaatgatgtatgcatgcagtttcaaattggctgtgcgtagagcatgcagagagacgggttgggcccaaccagatatatgcagtctttttttaaattaggaacttagcctattgaacaagaaacttagttctcaaataacccaatctgaaattcgctcctatggagattttaactcgggaccttggagtgttattcagctcactgcaaccactaggctatatgccctttcacggataccaacataagcagaataatttttggcatagagagaaggagtagaatctggctacgtgtgtgaggaagaaataggaccaaaccaaaccgagaaagctactccctctattcatagatataagtattcgaagtatctaaagttcgttcacaaatatataagcattccaaagtaaaacttattcatcaatcacctcttatttgaatttcgtcttaccttaccattaaccacccaccccatttatcctttgttttaaaaaagcaaacatctctactaaacaacttacaaatgtctatatttattgataggagtataatagtccaaataagatgaggactgaggcaggggcggatttacaacgggggcggaggggtcttgagactccactaccgctcccgggacagtggagacccccctaagcccccactaaatttttttcccatagatccataggatgtggggactggaggttcgacttatgctgatgtagtttattcagctcccactactatttttttctagatccgcccctggactgaggagatgagaaaggtagggaaagggcaaggccatgggccaccatgcaccgcggcacaaagcggtgtacagagcaacaacgggggcaccactttgaccaccaccgccgccggggccgccacttcacggcttcactcccctcccggccctgccgcatcacgtgcaccccgggcccaccaccggtggtaggcccaccgtcgcaggcccccctcactctctcagactctcagtcggttggttcaatcgcgacgcgaattcgctcgcaggcgttgaggtcagtaaggaggaggggcaggaaggtcatttcgcgcgccatgaattgcaattgcccatacggaggtcgcacgtgcgggggatcgggcccaccggtcggacgttggcgggaccgaatcccgcgacatcggcccggctcttccaccgataatgcccccgcggctacacaaacatgatggtccatgactcgatggacacacagcttccattccgattcctcccaatcccgacgccaacctccgtctccctcccgtccatgccatactacagcaagtatagcagtagcagcgttgcgttgtcgccgtcccaactcccaaaccggccagcagcatcaccttaggcttagagacaaaacggcaactgtggagaaatacaaggggcgcagcgcaccaatccaccaccatgacccaaaaaaaaacacacacacatcatcagagtgcaaccaaccaaccaaccaacaaggaaagaggcaaaatacgtcctagtacatcaacaggcgtggattggcaaggagagttttggaagtttcctgtccagaaaattggtagtagcatgtagcctcagcgtattctaaaagcaggccgtaggacaaaacaagctcgcaccttgaaaagataggccgaggcacagcacaagtagctgtactctacagactctacacggtggctcgtgacaagagaagaaccaagtctggtgttttcaccttttcaccttcctcgccaggttgaagcacaactgcacaagtggtctttgctaacagcggctgtcagtaatctttactagggcttgggttaatgtctcactcctctagtcgtcgagccaaccagaggagccgtgcatgaaaggcggatggtccatgcctctggacagaaattctggaggtgggtaccatccttgccacaagtcatttcttggggcgaactggagtccagggaagggaattcttggagcaggaacgaacggtaatgcagggagatcactcgttgtctgtggcagatattttgcaaccactgcatcgacctcagaagcagcagggggtgcaggtagtgaatcttccagctgtctgcaaccagcaccagcttcaggtgtccctctggacagtgtgtcttccagcctttgatattgcaacccagctgaaagcctgcctcctccaggaagtgaaacgatcggctgcccagaaaagccaggtacgagttcatccagaggaggtggtgtgtcttccagcatcttgtattgaactccagctgcatctgcaggtctctctgtgagtggtgaattttccaggctatggtactcaatgccagctgatgtcacctcatcacaatccgcaaaaccagttggttgttccacaggtgcacttccaacatgatcgtgggcttctgaaccagtatgcccatgctctgagtttgacatagtttcggtttgtttttcacaatcgctcttgtcagatgatgaaatgctcatgtcagatccacaacccatgcctgcatgatattcatgggttggatcatttcttccctcgtagttgcaaggctgccgtgatcttccattggtatctgtccagtagtcccctggcgagctagtaggatcatggtatgtgtcagacaacaactgatctataacagaggcatttagtggtgcctcttcttgtctttctttgttgtcaaggtcatcatccccctcattagccatttgtgcatgccctgtgtttacaacagacctttgagtatcatctaagcaccacacatttttactgatgtgccccattgttttagctatttccttgtgtttccgagcccaatcactacggctccatagagaaagaggaggtggtgacatattccattgttccataatcttgttatcagcatcaagcgacccaggcaaatagaacgactacagttttccaaagaaacagtcagaacggaattttgcaacaccatgtcaaggataacatgcaactgtaccaaggagagtactatcgtacctttcctgcaagctgatgagaatcctcccatattagctcatatggtgggtatttcctgtccagcctaccagacattaaaaaatggagctgtgttaacaatcaatgacagccacaagtatatatggagagtgggacagtacctttcagtttccttaggaacaatgagtatgatcagcttgggcttgaaagtgagggctttattaatgaattgattagcaagagaagctttaaacccaaacggaggattcaatcccatgatctgagggaaatagcaaatatcaagtagagaaaactgagactttctgtgagaacaaataaaatgaatggctgggttgtgagtataccaatcgacatcctgtgggcaattcatctggttgaacggtcatccagtctcgtctctcaaaattgaagtcattctagggaaagaggtatgttgtgtcagcttcaacacaggatagggtgtgacaaaaatatttatcaggtgcatgactaggccctcatatatgtagcttttacccttttaatctccccggtatttccatcttactgaacgtatctatttcatgcatggtaacttgttcaatattaaaaaaaacatcatatattacccccacctttggttgaataagatcaaaatttttatagaagcaacttttttcagaagcttcaagcttttccttcaataataagctaaaatcatttgagccacagcaaaagtcaacaacctaaaacagacaggaaaaggaatgtgtagtgaattgttagaagtggcacatctggatcatgtgtaaaggtcttctatttttattatgaacccaaaaaaattggtacaatcaatatcagatggaaaactaaacatagcattaagttggtagatcaacagcattgcaagcacgattacaaagagtcaaatcaagacatcaataaaatagaaaatctgccatcatctacttctcttgaaacacagtatgaagatttgagaggttaatccaagggtataaagcaagtggcattaaacacttgacagatcgagcagacggtgacacataaatcctactattacattattgcaatcatttagtatctatgctaagcagctagggtaattgtttgcatagtatcgaaattaggacattgaggttatccattgtcatgactcggcataatatcaaaatccatagagcaagattagcacgaataaatgaaaatatatctccgtgttagtttttgagagccagcaggctcttcccagactcccagtacaaataaacaactgcccgagctaatttacttcatttgaacctggatatctaagcttggcaaggataaagcatcgatacaatatcgctacaatcgaacaccagaatttatgcagatgtatgacacaaaaagcaagcacattgaaacctgtatgttgcatcacttatgcacattcatgatgaccaaatttacataacaaagcagaacaaacatgtaccgtatcaccactttcaatataccattgtagcctatctacaatctgcataatttaaacattgttatgtcagtactaaaaacagcatcagaagaaggtagaaactagagtatataatagttaagcataacaataaccccgaggtaagaataaccactatttttcagtgctaataaaaacagggcatgaaatcaaacaacagtggttatgaaaattgaaatatgaagtttggttttcattcatcacaattgaattcacaagtggtaaaaagtagcaaaaggatatagatctctagaaatttccattggtaataccaaatgaaacaaattcctacttttgtttattggtgcagtggacatatttatgcaagcaaatcacaagacaagattgacacttgaataagattttaaaaaaaatgtgtttgattcctttgtccacgtttaactctcagcacataaaaatacagcaaaatggtacatgccaaggaatggtagaggggtagcataatttgttcttgcttaattttaatcatggcaacttcttctctaaacagagggaggccaaacagttccttctatgaaatgatgatcatctctccatcttgagacaaagggagtggtaattaaaatatttgacaagtgatgtgtaccactgcatatgaatgtgcagaggtccaaacataaacctcattgacacagtaattgtctggaactttggattcacaagtaatatttgcagggctatttgataattggaacattgtttttccaagtattcatcacgaaacaatttaattcatgcagaaccaaacaatttatagttgagtaatgaagagtaaactgaacaagagttgaaggacgagatatagatttctttttccaattacaaaatcaagtacaactttgttaaaactgacgataatgagcaaagaattggcaagaatatccatttaaaagaaacttgatcggtgggggaaagaccacccccacggctttttcacgaagaagcctcagcagccaaagccagccaagaaagtccatgaaccctggtcccttgacacgaggacctgccccccatggttcgggccttaatctgtgctttgaggcccctgtcccgtacacgagggcttgcccacaggttgttttctaacacgtgttttaaccgaggggccagcgagtgtcctttttaaaaccaaccctgaaaacttgctcccaaggggagttgaactagacgctggtaggtgctactagagtgttgtggccactggctacagacccgttcgcaagaatatttatttcatgacaagactgttttgggttaacatttaaaaataatatttataacttccgaaatcaaaatgttatcttccaaaggaaaattaaaaggatgatagatcagtacagcaaaataaccaacccacagtattactgatctgcataccaacctgctcgagtttgtccagtttggtgaagtggcgcccataagatgtgtagcgcatgccatgaagaaatggtgcaagatatatattcagtttattctgcagacaatagttcatgatatcatggatagaagaggttttgttatttctatacagactacaaacttgcttttagcatatatcactccacacaatcataagcaattacaagcatgttagaatcataggaatttttctattatctggtgtgatgttgaccattctcattgtgcataaagagaaacaaactataaggcctattacatataagaatgagacacaggagttcataatattcagcagtaaaccattgttacagcaaggaagtgtgttttcaatatattcatgtaccttccaccttgcaagttggaaaagatcactaggtgcacatacagatttgacatcttctatggatgcaccattttctaacatatgcagagcagcatttatagcctgcaaggacaatatgtaagaatcgaccaaattcatggcatttcttttaaggaagcgcagaagagtacctcaacagatctttgcaccattcccaatgtaatcttatcagtattcttcgaaaccggtgtgtgtgtagatggaaccactagctttttttgtatatcctcaatggttatatcagatgacactttctgtgcgaactcatgaatcctgaattaaaggataatctcagctcttgcggattgcagtaaataaaaacacaacatcacctaagttcagcttcaacagacattttaaagggtatcatgcaaactgcatgtacaatgaaattttgtctgttgaataaaccatggaacaaatcatttctgaattctttgttagcagccagaaatccaacaaatttgaatacaaccatttaatcatccacaatggatgctaatcttgtcagaaattccaggtgtccccatatgatttgtaataaatttctgtattctgtttacctcttcaacttttctcaatgtgattcagtagtcagtacctttacaacagagtgtaaataaaccccaaagcagttaagcaaaataaacttggcactcactcactggtggtacaccaatccaaaaaattgcagtgtatttttttttcaaacatagttgaacagtaaaacataaaaggagtagctatggtacatggtaaaattttccaccaaagattagttttccctccttaaatattgcttctgcttcctaccattcccactcgtaggatgatcagtggattatgtgataagtttacaagattgcataaaactaactacacatgtaccatagccactcccaaattataactgtataatttttagtttcaacagctttactagagttgtttttatgcggaacaaacatttggttttcacttttgcagtcaaagttgattgcataacaaaaggaaacaatgagaactgaatgaaagaggaaaacaattaacagtagaagtgcgcaagatttacctcctctcagtgcttttatcaataacagggaatgagctcaaggggataaatgacggaactgatgttttttccctagccacagcactaagagcacaatgttttgtacctccagacacaagcactttcctctttttggttatcacatcacttgaggaaaaacggttcactgtaccaaatgattttttgtcactggacaatggggcaggtggacaatcctcaagaagccgtatcttaaccaccttcttgttcattccatttacatcgaagggctttctcgtgacagcaggattatcaggaaatttaatatgatctcttgtcggggttctaagtttaggatcaatatcatgtttcctatgcaaaaattacaagatttagtcagaaatttgtgtacttgaataacaaacgcaacaattttataaaaaaaaactgagaaatcatacaggcaaaatattaatattcggttattgggaagaaggccctcccacgccctttggaaatgaaatacaccattgtcaacgaagtcatcaaaggcgattttcctatgtatagatttgcatgtattagtttaagaataaagttaaataaatatcaactcacaaagaatgcattcatgatcaactcataaagaatatgcattagtaacccacttcctgcaaaatatgaaaaagagagaaatccttgccttggcaagcatcttctatgatatgccttgggacaccgtcggcacacagcaaactgtagctccttttcatccttgttttcaccatacttgcaaacatcacatttgtgcagtgggcatgcaaattttaccccactggctatctttgttgtatattccaatgctttggcttcattttcagtaaagagtaactgtgcaacgcatttagcatggtagaaataaccacaattcgcagatgcacagggaaatacctaaaaaataaaagcaatttatcaggtcagaagatcaaaagaaattcagacagttttaaaaggaaggaataaatcacatattagacttatagaataattttgaaggagtgcaatcaattactaatcttggaattccataacaaaagggctaaaagagattaacctcaggagtatctgttttagctgaacccaacctcatgcatgcaaaacattgatatttttcaagctcacaattcttgcacaaaaaaggattcaatgcctgtaaatatgggaaagctaagtgaatgttaccatctaatatgtgtaaaacatgtgaagtaaaaacggtatcattcatgagtggaagattcagaacagatacatcaaattgacgcctagtgtagcctagtgtttgacaatcttcaccagcatccctgacggcatgaaaagatctgaggcacttgccttcgcagctgcaagagtgtcgcagaaatgcacatcacgattggtaagttatgaatgaatacatcacagagcatttttcacagcaaacaagtgacaatagttgaggttcaagcctctaatatacaatcaataaagaacacataaattttacgagaagtacaaagaatgtgtaattttctattaattctggccactgcatctaatgctgcacaaagtcaatgtaaatcactacaaaccgtccacaccaaatgggattcacaaatttaagacaagaagctataccaatatatgatatacaaaatttcaactcgcacataaccatactagatctccattcatgcatcttgaagagctccataacagccctctccaaaagtgctgcttggcacaatagtgtttttttttacgcaattaaaaaaaattgacacaatggcacaatagttttagccactaagaatgtgtaatgtttgctcccatccaaaacatcctgctgtaaaattgagcaaaaaaaaacttcctctacacccagaagttttgctacacagcacataagatcttctcaaagtaaagtccatcaccggtccctaaacttataccgctgtgtcatcccggtccctaaactcgcaaatcgaccattcaggtcctcaaacttgttcgactgtgtcatcccggtccctaaacttgcaaatcactcatttaggtcctccaacttattcagttatatcacccctctccctaaact

SEQ ID NO: 8570 - DNA, 95313 bp, Oryza sativa
catataacgtaaaagttgcagttttgtgataatttcccgtgctattgttgcagcaaactgaaacatgtcgctaaagttgcagcaaactgatacatttgtcactaaagttgtagttttctgaaatttactcaattttaaattttatatatgttcttagcgaattcaaaacgtaaaaacagtcatgtttattagtgattacaaaataatttataagtaagacttttatttatcccattttagcggcttactgtaggaaaaaagaatgtagttattgtaggaataaagaactatgatgagaaaataataaaattaactctaaaattaagttttgaaatttaagttttggttgcggttgataagctgaagatgaaatgacggaggtgtgaagtctccgttttcactgcaattctggctttgaaatgcagcaatatgtggtcatgactcatgataagcttgttcttggctggatcctcaagtgtccacatcttctctattgtgcagggaacagggaagtagccaaggttgggtggttgatctgtgcctgatttaagtaaagtacgcatgtgctgaatctctgggattaggagaagagtttcaggatggacaaaaaattcagattcagaagataaaagaaaccgtcattaagtagttggattaattactcagtacagtatttaataaccgaccggttacagacggcaagcaccagaaccctgaacacaagggaagaaaagctgcaaaactgtataccccaggcagcaatgacctgccatggatgcaaccatgcaatgctgatgatatatatgccattactgctcaaggtgtggtgagcctaattgttaggccatctgcatgatggatgatagtgggtttatggcaattattcgagggcattatgaataaattgaatgttacaaagttgaaaaggtgtactaaaaagtactccctccatctattttgatagtcatattttcaaatttgaaaaatttatttttgataggcatatttcaattcacacatttaatgcatgactatctattcttccacatatggttggctacatgagtattgagaaatataaatattaatgaatcgtttgtttacgagaaatgactagtagcatgtttaaatagatgataaatagaattatttatccttagtctgtgtgtcaagataaaatatgactattaaaagtagatggagaaagtattatataacaaaaagatgatgaaaaaaatgtttatcgaaaaatcgtaccatttaagagctcgggaaacgtgcacgggataattcataatccatcggccataccgaacttgctcttaattgtacccccaataccatcaatccctgattgtaggggaccctcctgaacagattttaatttggccaacattcatgtgcaaagatgagatggggaagaggccggtgagaaatggacgccggcaaggacaatctgggacagcattgcatccaatccattcatctacctcaccatgattatgctccttggagatcatgttcttgcctccagcatacatagctcctgctctttctttctttctttttttttctcttttattttcatgcaacttggctgccacatgtgtgtggccacaatgtctcatctactagctcaggtagatctgcagggagagagagagagacatggaaagttccatgctggaaaccttgtcataagtccgcacactgtacaacagtggtcacaaaatatggtttgtttggaacgcaggaatttcatggtaattttacagaggtatatgtatttttataagtttaacctgaaattaccgttgttccaatttccaaatggcaccgaaaatgtttgatggagataattgagtgtaactttgtgaattgggtctcaactagaagctaggatggtccaagtccaattacttgaaatgtctccagtagaaactgtgatttttttcatgtgaactgtgaagctttgcgggatcagaaaaatgtttattaaggatgagaggatcttcttggccaacaagatttcaactttgttgttactatcgtcgttactgtcatgtaacgtactaatactttgagtggtttagtcaactcaaatcaccaccacttgttctaagtttgacagtctcaagtctgaaagtttgtatgaacgttggacgtgcccacagattcatcacttgcttttctgactaaaatagcacagtttttccctttcaaaaaaaaagcacagtttactattgacttggtttcagtttcagacttccaggagccaaataaataaatagatacataaaagtaagaaagaaagaaagaaaaaaacaaagaagaataaagaaaatacagatggacacatatgactgttgctatcaatagaagtgtagccatcttgtcatcattattgtccatgtaatcaagattagacgacagtagggtggtgtttatcagcttaattaatccttaagaggagcagtgtgagtaatcttgtctgtacctgagctaatgaggacaaagagcagcatataagttaaatcaccttttgacaaaaaggctatgccagaggaggacattgtatatgtataatgggaaaaaaaattcacaatccagaatccaagaaaagatataccaaaaggtctctcccttgctgaaagaagtttgaaaagtggatgaagactgaagggatgatagttctagtggttgttcaatataaaacttgaaatttttgtttttagaaaaatgaaacttggtcaatatagagaaataatttcttgatgacacttcaatttttttttacaaaaatgaccccaaactgtgctggatatacaccgttgctccgtatccagtaaagggacttcagcctaccaaaaaaaaaacatatatattcatgtggcctgttgggttagtattgtcaaccggatctgattaactaaacaatatttattccagttttaagattctttggcacttgcagatacaaaagagagacaattttgtactgttgtaccacatgcatcttgtgccctcatctcactctttgttcatgctctgtcaatataggtatttagagccatagtgcctctcaattcaactttataaattaaagcacaaaacaactaattagaaacaaaaaatgctactcatttatccaaatcccttagaatatggaaatatatgactcttggattaatcatcatttatctcattccgttgttaaaaccaaatcacataatcttttttagaaaatactggtggtagctgtgaatctgccaccccaccgcccacctactcctaatcccattgtattatttacaaattaatccttaaaattcttaatataaaagacaatcaaattcaaaatgaatgaatagctgcatacaaaatcatatgtattatttatttatttattttacacggtattataatactttttattcattaattataaagctcagtagtacatagaagaatatacactcttattttttttaaccttgagtaatttcccctatcataggattccattatccaaaagaagaaacaccatgatagcaatcagttagactaacaccccaaccaaaccccactttggcactttataaaatactaaaacaaatactttttttcttcattttcaaccccaaatctccaagttaacaagaccatacaaatcatatgatactccactcaacaagtgagaagagacctcaaggagtagtaggagtagcctacaagtctacaagacgaggaaacatcaaaaaacacatcaaaaaccctatacaatccgcacttttgcgaagcggttgcccaactctgtgctccgccgtgttgccgccgccgccatgggctcctgcctctcctccgacctgcctccccgcgccggcgccggcgcgggagcgtcacccgggtggccgcagcggtggcggaggaggaggcagcggggggtggagcggggcggggctgtttccggcggcggcggcggcgtcttctccatcggcgtcggcggcaagaagctgcaccacggcggcggaggaggaggggagatgacggaggaggagctcgcgaaggtcgaggggagggtgtgcgtcaacggcgcgagcgcggcggcgtgcctgcacacgcagcaggggcggaagggcaccaaccaggacgccatggtcgtgtgggaggtgagccaggcagccatggtggatggcttctgagtcctcctgatcattggtactagtagcgttttccttcgcgtgttggttctgaaaatctcgcccgcctttttcctcgccgtgttgctcggttcagaacttggtgcttgcgtttactcgatctttccgaagtcttctttgaactttttttttcttcacggtattggctttggatcaatagcggatttgaattcggagtgtgtgtatattcgattcacagggaggagcgttttagtggagtgcttgattcgaaatgtgggatttgactttataacagaataagcaaaacctcttctatttttctagtttgttcttcgaaacagttcgagcatttcttgatttggtctcactgggagcgtcttcttgctttgttggatgacttaattcgaaatgggaaggattcagctttagattgttttgagatttaatctgaaaacgaggagtttactggttctttttgtatgtgaaaattgtggggggggaaagctcactttttctgtattattgtaatgtttcctgaatcctgataattttaaaagaaaatctgataaatgggacgtgttagttggaatattggagacttggagtcgtctgctcgtgcttgcgttgattcaaaactttctgtatagtccaagcgagatcctttcctgtgacccttggcaaaagcttctacctttctttgtattcttctgttagtttaaagaagagtatgattttggctgtttcttcaactagatgctcttgacaggtcaagcgattagtctggtctagtaatagctggcttggtatatttagcttatatcctaatcaactaatcgactcccttcattttcatgatatgtaagcaagtagttatgttgactccatcacacaattggtggagtttacctaaagggagtggtgaagtacaatcatggataattttcacttttgttttggacctacaactaggcagctagctaaacttatctagctacataggaatatcttgtgagcttgttttaggaagtcaaacaagtaaaagcagccactttatgatatgcatggtgatcatgctcttcagaggacagtaaagagaatttatgcctaaagattctcagtataatgctattgattgctaatattcaacgaaaataggtaagtacttctttattggagtgaggaggtacttccttgacaaatagtttccatctgttggaattgagtttttattttcttccttttggcttgggatttatattttttatattttttcttgttttgcctcgccttctgttttgaaatgtgagttataacagaaatcatatttctagtcaactttcaacatgaatatgaaatacccttatagggactgttcgatgtcttgctaatagaacctcttagcataggagtatcctcatttactaagggtcagttgcaacaattgctaatcgcatggaacaatgccttgtgagggttccatcatgggtgattggatgctaatttgataccttttccttgcctagttgctgactttatccatctcatttgtgctatttgaggtctgattatctgattctatcctatgtgcatttctcacattgttcacccaactacctgtgtctaccgttctttgtgtagggaatactccattgtgaaaatatgagcatactgaatagaatcccacaaatacagtttgttagaacccatctatacccttcagtttattttcctgaaaagtaatgtgcattgtcgatttgcttttaaacaaattaattatagacattaccagcttatcacatcactggtactaggagcgcaaacaattatctgacctagcccttccattcttgcagaactttaatacaagtgatagtgtcttctgtggtgtgtttgatggtcatggtccatatggtcattttgttgccaagaaggtcagagattctcttcctgtcaaaatacgcacactatggaaaaccagtgccaacgaggacactagttcccaccaaaatggaagcatttctggaagtgttaattcagaagagtcacctgttgttgatgatgaatggggtgaatatgctgatgacagcgagaagcttcctgagatgtttcttccacttaagcagtcttattttaaggctttcaaattgatggacaaggaactcaaaatgcaccctacagttgattgcttttgcagtggatcaacagcagtcacgttagtaaaacaggtgagggatgcttctaaacttgttctagtattcgtagataactgaccagcatttggaacaaaaaaaatagtggtagatattgaaatcaaaatgacagaagaactggacatggcttattttccagggattggatcttgtggttgggaaccttggggactcgagagcaataatggggacacgagatgctgccaataatctaactgctgtacaactcacagttgatttgaagcctaaccttccaagtatgttcatttctcacttatcatttcagtgggtacccttgtgttttcaaaactgaactttctctttaactgcgcatttaggattttcttcttttcctcctagatatggcttcagtcaaacttattaacgcactaagtatagttacttgtctggattggtcactctttttggttaatcgctaatcttcatatttcttatttaggggaagctgcgaggatccagcagtgtaggggaagagtttttgctcttcaggatgaaccagaagttgccagagtatggttgccaaataatgactctcctggattggcaatggcaagagcttttggagacttctgccttaaagattatggtttaatatctgttccacagatatcctatcgtcgtcttactgaaaaggatgagttcataatactggccactgatggggtatttttcttatcatcttattactttcttactactacttaatatggtgttgaaagttactaattccttttgtgaatagaaatgcatcatgttctccaatccctacttaatccatggggattggggaatagtttgatttaacatacaaagatgttacagccttcactccttcagctgcttcaacttgtaatattggtaaactcaatgcatgtaggtttgggacgtcctctcaaacaaggaggctgttgacatagtagccgcagctccatctcgtgcaacggctgccagggctcttgtcgactgtgctgtcagatcatggagattgaagttcccaacatccaagagcgatgactgcgctgttgtgtgcctattcttagaccatgcaaagtcacctgacttgattcaagagaacgagagcgaggaagaaactacagaggatgttgcaatcccagacaccgttgctaaggttgaccaagacattgcacaaggagatgcacatatctccagtgaagagcaaatcaccgagccagcattgcagcactcctacacattaagggatgttgatgagattgtaccggtagaggagcctccagtctcaaaggaacctgaaagatgtggatctgcccgcagccttgctgattgtatatccacaaacgaggaggaggaatggtcagcactcgaaggtgtgacgcgggtcaattccctcttgaaccttcccagaatactttcaggcgagaagagatcaaccagctggaggaagcggcgatgaacgattcccccgcttaagtcaggctgagagcgcatttcagtcgaaaccggcaatttcagccaggagtgtgcaaatctcttcggtccctgggattttattagagccgatttttaggtttcttcacccagattgtttcataccctgtacactccagatcgatctgttcttccttttgttctcttgtcaggaggtgtttcatgcttgggcttctttacttgtttttttgtgtataagaaagtttttgttctgtgagaagccttctgtaaaatcatgtaatacctcctcccttctcctctcttggtggatggatgttcagttcacctgctgtttctatgctggaacaagaactcaattctatatgtattagctcatgaattttcagctgcaagtataaaagcttcctaattttgcaccttgtctgccaacttggttgatcatccttacaaccgaacaccttttcttcagaatctttgtagatggccaagatgtcaaataatcgaagcccaatttaagaagtgttaaattatcaaatctctctcttttgaatcacccttgaattatgcttctgtcaaactatgtaaatttcatatcagttcttctattcaaaccgtctttatgtcttctcatcatcctttcgattgttaattgcaatcggatgtattgtaaaccttgtagctggttacctattatctctatctctactattataaaaattgaagatatttttgctaaaattttagtgcgtcgtctgtgtttgagtcgttttttaagttcatggatcatattttgtatggaatcggacacagacattttgttaaaacggacaagggctttttaaaactgtgagactctaccaacgatggaaaccatgcaaggcaccggtgtgaaacccaatcgtaatcaaactcatggatggacatagcatccacatcagtgatcgatttagaacaagtgaagttcgtaatagtgattataaggatattaaaataaaaatcaatgtaaaactgagcacatggttaactaaaatttgcaatctctatttctatctttatcttctttactattataaaaataaattgaaaatgttttcatcgatactacgtcgtccgtattttgagtcggtttttaagtttatttttttaaatacataaagagtcgtataagaaatcattttaatatgctaacttgatatgtgagtcggactcctaattgcttgagaattcttgccacgttataagaaagtaagatacatgatatggccatcatcccaataaggatttcaaattaaatatcaatactatcaaaataaaaaaacacatactttttagacaaaacaatctaacaataatacgattaaaataacctttcacccgttgcaacgtacgggtattttttaagttaaaaaaaaggaaaatttaattgtcttgtatatgaaacctgcgcggatcgcaaatacgaccagcgaaatcggtcaaaaaaaaaaaaaccaaacatccccctgtttcccttcaaatgcgctttcatccctggaaaacgtattaaaatccaacataatacgctttccttctatgaaagcgcatatacttcatctactgccactgacgtggtgggccccaccctacatctcgtcccacaaatcaaccaacccctggtcgtcgtctcctcgagggctcgaggcggcggctatctccctcctttcttctcttctctctcgtttcgaagccgacgcgtcgcggaggaggaggaggaagagggcaaagccgccgcggggatttctagggttagggtttcgaggttgagagggaaggagggagagaagagcgggtatcagccatggggatgaaatttctgaacaagaaggggtggcacacggggagccttcggaacatcgagcgcgtgtgggtggccgaggagaaggagaaggaggagcagcggaagatccaggagctgaagaagcagcaggacgaggagcgggagaaggccgccttccgcaagctccaggaggacgccggcctcaagccgtaagcatctttgtttgctgcttcgatttcgattttttgtttcccccttttgcttcgatcgcgtttggggggaggaggctagggtttcaggagaaattgacgctggcgggagcgcagggtggggggggggggggagttcaggagaaatcggtgttggcggtggccggatcggtgggcttttgggcggcgttctagggtttcgtagttgtagccttctaggccgcttatgttttgttttgggacgcaggtatccgcggttttagttagattctgctaattggttgaggtaatttggtgtaagattactgcttgcgatgagagtttcatgaagctttagctaggagttagtgtttggatctgttcgtccaactattttggaatttttctgtgcctgattggtggggagataataatgtgcatggtgttattttttttctgcaggaggcaagagagattggacttcctctacgagtcagggttggctgttggcaaggggagctccgagggattccaagcgctgcaaccatctgccccagcagctgctgccgccgcctcttcttctgcccaagcgagtgccggctcttccaaggtatcgcgaccgtttcttctcggccatgtgattgtacttatgttagtttgcagttctaaaatattttttttggttgtgcatctaattccactgatattatcaaagaaattcgtatagtaggaagatacttggttgatgtgacagggcaaaggtttttcttagtaggaagatacttggttgattcttagtaggatgcgatgcttggttgattcttagtaggatgcgatgctcaaatgtttagctgattgttacaattcttccattatagcaaatgggctgaggttgctagattatgtgctgctgttgtaaacttgtaatatgatttctcatctttgaacttgcagaaaaacgataaaatatttgccttcttacttgtatgcaaaagcaaagtgcctcctactgtctagttgtggatcattgaataagttggaaactgttgtttgtggtatggatataagaagttaattaatctttccttgcttccatggcattttacatttttatgttgtcttttgaattgttttgtgttttagacttttagtcaagggagtataaaagtgtaaaatatcagttatttcatgcgcactatatcacccattggttgtaataaaatatctattcatcactagctattagaagataattgcttattttcttttgtttggaataatttcaggcagctgctccaggtgcattatttgaggataagccccaatctgcaaatgatgcatggagaaaactccacactgatcctcttctactaataaggcagcgggagcaggatgccattgcaagaataaaaaataatccaatcaagatggctgagataaagaaatcagtaagctatatccttcttttgatatggaattataccttctgagcatcttaactactgtcaaactcttgtaatgtcaaacatattggaaggtttataatcaatcttcccctgaacatattccctgacataacttcgtcttgtgtaggtggaagctgagaaaaagcaaaaggaagaaaagaaagagaagagaaagcacaagaagcgccatcatcacaaatcaaagagtaagaggcatcactcaagtgagaactcagattcagaggaaagtgatggcagggatgagagaagaaagagtgttcaggcctcagagcataagagagaagagaaaaggtcaagacatgataagaaggatcacggacaagattcagaagacgatgaacgaaggaaaagacggcatgcaacgtcagaagatgatgagccaaggaagtcacagaaggagaagaaaggacagagggaagattcagaagatgacaagccaaagaagtcaaggaaagaccgcagaagacatgattcagaagatgaagaaccaaggagaaaacaccagaggtcagaagatgatgaaccaaaaagaagacaatctgaggtttccggagatgatgaaccaaggagaagaaggcaggagatgccaaagcatgacgaatattcacgacggggtcgttcggatgctgatgataggagagggagacactatactccgtcagatgataggagagggagacactatactccgtcagaccacaacagtgcttatccaaagcacgacagttcagattcaaggcataggcgaccggaatatggacgcggcaattccacttctgaactaggttcagaaggccaacgaaggcaggaaagccagcagggcaggaacggccctacattcaaccgtcgacggggtgtccagcacatgtcagaggaagaaagggaagctcgacttcgtcaaatgcaggctgacgcagaggtccacgaagaacaaagatggagcaggctcaagaaagctgcagacgacgatgccaaggaggcggcatctgtgaacgcaaaccaattcagagggaagaacttcttggaagaagaaaagaagagcatatttggaaccgagaagggcggaagcgccacgatcgaagagagcatccggcgccgtgcgtattattcgcagcgtaatgcccatgagagcaatgcattcaggcggtgaaatccctgaagcagagcagcagctcaggcggcctgacctcgttgatgtcagtgttctgcatttgctttagcttcttttgcctttctggtgtattgttccttgtttagtatggaagaatttttgaatgttgtacaacgcattgtccagatgttttgaatccatatgttttagtaacaatttttgccaaaatgaaaatcctacatgtgtattatagagggtttgctaacacaaaggtatgatttataagggctttgtacgctacttgggcctatttattaggggtaggactaggcctgtgggctgtttagctaactaatgggccggacttgctgtgccttcttgtcagccccacttcctcctccgccttttcttcttctagtcattgtaccgtgcctttgtcactaggtccggagacatcagatccatatgtcagtgacaaaagcactgatccagcggctgtgggagattgggagggccagcggtgtggctataggggggggggggggggggaaagatggggatgtatatcacgcggcgatcgccgagttcgtggcagcggtggcgctgctgtttctgtaggagacggtggccacggtgatcggatcgggcacaagagccaggacgctagcatcgatggcgaggaatgcgacggcatcagcctcctcgcgtcgcctgggccttcacctcggtagcatcatccgagaccaccacccgacatcagcagcaacactcgcttcactccctgcgtctccagccgcatccgcatgatattgtaaccgaaacaagagagtatctccttttttccaataagagttagataaatattaagatttatgtggtacgcttttcaaattattaaacggtacgtttcgtccgaaaactttttatataaaagttgctctaaaatatcatattaatatattttttaaatttataataattaaaactcaatcaatcatacgttaatatcacctcatttttttaatcttcatcttcatgaaaaaaaaaaacaccacgtaagagaccacacaacaccaccaaccaggccgcctcttcccgcccgggaacggcgccgcggaccgggagacgaggaggggcatcggcggcgtcgccggcccatgcttcgacgtcgtgatggattacgtcgacggacgggccgagccttgcgcgtgtcgtgtgggaggagctggcgcggggaggccgttcccggaggccaagactgatgtggcaactcctcgatggcgatgcacgtggcgggggtcatcatctttgatccggtctgcaacttctatatctacccattaactatttaatgacattgtaatacaacgctgaaattccatcaccgttttcattcccgtaataatccacatcaagaaaaaacaatccgcaatacgtataatttttttttaaaaaaaactgagagtaatacccgcagacatgctgaaacagtgaaacctgctaccactttattttctgtagaaaattacaagaacgtgttgcctccttttgacatattcgttcgatattcttttattctttccctctctgtgtacagaattacatgtgacaactgccttctgctttgcgtttcccacacctacggaagaatgggtgcccatcttgaattttatatacatgtcgcgccttgttaaaatgaacaattcgtatacacgaaccgaaaaccacaacacaacggccactgccattttgcactttcatcattccaaaatgtgcagcccccatttcgctagttctctacttccttgtaccctttatcatgggggcgggcctgaggagcaagtgcaatgcctagaatgtttggactcacaggggaaactctttctgaagaacgtcaaggttgcgtgaatcacatgcagcgatcatgtcagctcgtgaagcgttactggtttttaaaagagaaaaatgttagtcaattaaatcagcgttgaatttaggtagacaaagaaatgatttaacgtgcttggaaagttctagatgtactcaaattggaatatcaactggttgcaatgtttcttgagtacttgcaagttatgagtacttaaaagtgagcgacaattgatgttcttttgaaataaatgtatctctagtatcctccaaggaacttcaaatatctcatagataattaacaagacatacctaagagaaatccgcaagtactgccaggcattgtcagcttttggattcatagcaaccgcccgtacatagtatcgaatagagtcttcatacaatccctgcataacacggaaagctggggtattacatctctgttgccactttgaataaaagatatttgagctaggccgtggcatcattggatatataatatatatttgtactcatcctttattatgctctgtaaatcaacagttaacattaatattaccgaggctttgaatggatggtagtatttaggtggatatccaatgcacaaaaacttgaagatcttttcagaatcgagtggaaaccatgatagccaacatcttattatgaaaagcaaacaagtggaagcatacaagctcactcataaaaatgatggtttgcaagttagttgagtaaatgaataatgctgacagacaatgataaacaacattgagatatggttttgtacttgcatgcaaggaaattgttgaaactgcaattattttgttaaaaatacaattaccgaactaatggtgttatcaagtggtagcatcatgttagagaagaattacctggttggcatagctaatccccatattagcccatgcacgcacataattgggctttaagtccagagcctgaaaccagcagcaattgattatattagttccagatttacataccataaagtgctaggatacttgtattacacaattttctctaaattggagattcatcaacaagttctacacttgcaggactgcagtagaccaagccgtaaaaggatagttgtaccagcaaaataagtgaaggttcctccctaatggtattacaacactaatgctaggtgaagatgtgtctgtactcagcaggattggacaccaaaccaatggtattacaacactaatgctacctaagcaaacagtttgattagaattgattggttttactgtaatgctagaagtacagggatgcggcacatagcttgaactgaatgcactcttactatgaattatactgaaattgggtacccatagaggaatggacagaccgccagagggtaaaggtcatattttttttccaaataaaaatccaaaaggtccagatacacatcatatatggattattgccagccacgaattatatcctgttagatttgcagttcacacacaagtgaatgcaactgccataaacatcgtccgaaaggaataaccagagcccaatgaaagagtggatgaagtagctattctacacagcatgatcgagacaaagcactgtacttcttcaaccagactagttcccatgagttacaatgggattggaaggaatacagacttttcagttttttctatctggtttttctggtggataatgtaagtggggttttttaaggcagggtgtttcttttttatgtgggatgtacaatggtgggataggaggacggctctgcttttacagtagtagagatatgtaaatacgctatagcacttatagcgaaacattcaccaaagctgaaaaataaaatatcttacaataactaattacctgttgataggccaatattgcatcagcactctggatgctgtttgcttgggtcgcacctagcttattccagagagaatagtcttgtggtttcagctgcagcgctgtcttgaaagcagctatagctttatcatattctcttgataggttgtacaagactcctagaactatatggacatcagcatcctcaggtgacatttgggcagcctcattaaacaatctaataacctgatcagaggtaaactgcttagtgacaaaacgaaatgacttttttagaaatatcagaaaacatatcatacatgacaaacagtatggggtgacaggaaaaaaaaacttgaagaaaaataaaaggaccgcagaccaacagaactctagagcatacatctagaacatctgtgcaggataccatttggaaggtgaagatgccattattatttatttacattatggaacagatgggatgcacttacatcaggaccataaggtgaatcagttggctgtggaggggcgatacccccatatttggggtgattctgaagccacctatgaagatatcttaatgcttctccctgctccaactctgcatcaattatatagaaccctcaaatgtatacaaaaagcatcaaggcatagaacctgttagaactaaattttagaatattaagttaatgctagaaggaaatagacctttgccccctcaaagataaattagctttatctagttgtttaaaacttaaaagcttgtatcaatgaggaaacctcgttacttctaaccataatttatgccgcttcatttctttcaggagcatcttagtagattatgccggacactgaattaccatgcactcaccattcgtgtgactgacaccaagtgcaagaagaacttccaggtttgttggatcagcttcttgtgcacgcatcattgctgcgattgcctgaaagcaaagtaatagcatctccttgtgttaaacataagcatggaactcatagatcataatgccatatcacatggtgcttaaaatttagctaaaaataaaccataatttcatgacagacaatagtatgggttcgtccgttcaaattccatatatatcagtttatgaagttcttgcaagggtatgcaaaaacttgatagagcataattcacgtaatttctattgagatccagcacactgcatgctcctaccgaaaaaagattcataaaaaaaatattctaataaaacatgtgatgaaaacaagtgatgcacacaagcatgcagtgcacctgtgctgaaaaactaataatgaaaagttgaaaataatcagcacatggtaatttacatctacatatatcctcagtgggagagacacaatcacctgttggtcatcatcattttcagcatgtgttactccaagtagtctccaaccttcagcattatcaggattcttcaaaacttcagcctctaaagcaagaacagcttcacttaggaggcctttgcggaacagttcctggccttcctgcattggattagggtgaccaacgtatgggttcatgtctgaaaaaacataaactcctcgagatgcaccagaattctgtttggaagctgataattggttctggaacctaaaaggcacaaacagagcatgtgtaagtgtaactgatgaagaaaaaaaaaaggcttctgtcaaatagaacatggtacatgattgataaaaagggaactttatggttgcctataattaacccaaaaagacaagatattggatcaaagaagatttgatattcttatggtattctgtctggtctaatgattggtgtggaaacatatcagaagcaacacatttcaaccttgaagagatagccatgacaaaacaaggaaaagagatttgtacttactcatctacccatggatcagcagagctttcaccaaatgttcctccactgaactcttctgcccattcatcgtcaacacgcattttggagaactcatcaatccagttctcgttgaggccaccctgattatactcagtagagaactcactagcccacttatctgctccttgtgacatctggagaataaaagtaagtgatgccacatcatcagtgcacaagcagcagtatcagtgtaatatttatacagtcaaacatggtgtagcaccggaagaattgtattaatggcaatattatccaatcagaaactccagtaactggactgcaagtatgaacagaatgaacatattccaacaattttattgtatatttatattactcatttatcagaacataaacttacaaagcaaggttccatgttataaacaccacaatttaccagtacttctatagttttatcagtttttgtttatgttgaccaaagaaaaccacatccccatcaagcatgtatttacacacatccagctctctgcattacctcttcatgaacaaactgatccgcccaagagtttgcattagcattgtactgggtttgaaattcatcagcccagccactggattgggatgctgaaccttgttttacttgattatcttctataataagttcaccacggctcatctttgaaacaaactggaagaacttagagttcttccagaaaaaagtaaaacaaaagaataagttcaccacggcgaatctttgaaacaaactggaagaatttagagttcttccaaaaaagaaacaaaaggtatcatcaggtgcttgagagttgagacaggctgatccaaatgaccctatagcataacaaagttgctagcagtatagccagctgagatgaggttcagaatcaactaaagttggtattaaaccacagatgtgcagaactgcagaatggcacaacatatcaatgtggtgtcctaggacgcattagcaaataatatagcaacaatgcccactacaccatctcatctcagcacgtctagtagagtctcccctttcactcttattttatgctgacagaaatagcattgagaaaaggaaaaaactttgtcaaacagaaacctcttccattgagtgttctatattgagtggtattctacagacctgcatgcacacaagtttttaaactaatgagtcttcacaacctatcggggttaacaaatgacgagttgtttgtaaaaagtaaaatgccagaagcttcctaaagtacactggatgacatagaaaaagttatttcaagtgagatgtgcataaaataagatatcaatggacccaattcattagcaaagtggtatatcaatatattcacactattaaacctgttatgtgcaattccacaatcgtggggcacataaattggttggaattcgtagtaataaaataagtagcgtggaaactctagattatatgtcaatttatggtgatttaggtaacaagatcagtaaacttaatcctaatggattcatatcgatattgagcccaacaagacacatttaggtttatcctagtaaagtttacattggtcaccccaaccaagttgcaactacatacaactgtagataagatcataagcagaaaatatcaaagggaagttatacccttcactgttgaaaataattaggatgagttgttgctcaagcagatttttttctcaccagctaaaatatttaaaatttacccattcaaaatgaaagtatacagacctaatagagttaaataaacaaatcaaatcatcatacatacctgaaattttgggtcattattactagctaatgtctgtgcaagcatacgagattgttccatggctgccaggtttgccatattcattcctcctgtcatggccatctgagattgatgctgcaacaagacaaaaatagataacttaaatcacaaatcctagaaggcttatcacaaaattatatagctttgttttacacccattgtaaatatgctgcacatgctagggaaaggatgatatctaaacatgataacggacatagcttatcacaaaattatataactttgttttacacccattgtaaatataaaataaaattagacaattagttaatatccatgaagttaaccaaatggtacatgtgaaaatatcaaatagcccatgcataaggctctgacctgttcaaactcagaggcccaaccattggaaccatattgctgctcaaaagaatgagcccactcttcagggttattattttgcttgccaaactcagttatccatttgtctgcagcattgtgcattggaccagatctcatggcgctttgggactgattccaatactcctccatctctgggtatggtccgtgcatgggtcctttcattcgataattactgtcgatatcaagtgaatgcagcaatgtgtttacctggtacaggtgagaagtgtcaaattaggtcacagcagagaagataaaaacgaagccactgcaacaatctaatgaaatgaaacacaaatgcaagtgctttagcatattcactgaggtaacaaaaattataagttaacctgtgcttggatatattcttcaggctggtcagccaaaatgtggcgtgccataatgcaactacgatcacgtatacattgcttgtcactttcagacaaaccaagcgctggtactggaacaggttgaaatggcacaccagcttgaccacttgctaggaaagaacgtaggacaccagataagaccctttgtggtggacctgaaccaattttgggagtcagtataatgtgcttcagtatgttatcaagtgatgaatatataaacaacaataaaataaattggaaagaacaaaaactacaaatctaccatccatgactggtggtccaaaggttggccctgtgctgttaaaaatttgctcaaattctttaagctgtgcatctggcacagcaaattctgggagtcctggaggccgaaaagattcaacccaatcatgagaaggacccccacggatgaaatcagcgccctagaggtgttcaattatagttagaaatgctcaaaagggcaccaaaagcagcaaaccgaatgaccattacccgtgcaagtggcagttgatcttgcttgaactcattctctgaaccagggatggtcgataagggagcagctgtccctaattcagatgttgttggaacattaactgcagaccctggaagttcctttattgactgcacaaagaaaagggcacatacaaagttagcttgattattaatgcaatctggatgttaatcaccccaactttctactttattacattagaacagcgtaatcccaaatttccgcttcattgtattatagacccataagcattattgtctggaggatttaacttttaactttttaaggtacaccacttatatttggaacatccatttgcaattatatagtggctagaattgaaaatgacctattactacctaggaggtaaattagtcacctatggttattactaccttggagtaggtaagtttctcctcaacatacatctaagaaaaggaatcagtatgaaatttcttgtggtgttttaagatgtatttttctgtcgatgatgacaatcttttagttcaaatgaaagaataaaacaaatctgtctttcacactttagcatgaaatctcttgtgatgttttaagatgcatttttctgctaatgatgacaattttttagttcgaatgaaagaataaaacaaatgtatctttcctacttccttggaagttgaattggaatcatccagaaacagtctaatttcttgtgatgttttaaccataaaaagcgttgaaaatattgtacaatattcatggacaatctccattgcatatatttgcaatccggctgataatggaataaatacatatatcagttgtgtctagggtgtcaatgtgtaatgcaaatgttggcttaagggaagtgattaatcacatttagagcgttgcaagtgcatcccttttgttccatgaagggctaactgtttccagttggttagtagtatttatgccaaaattgaccttcagagatgaatggccatgattaccatatggttcttacagctacaggaatcataggtgcaccataaaagagctcttattaagacttgtaaaagaggtaaagataaactaggggttgacgcgggccaaccatgcacaatccttgtcccacactagtttaactaaatggactaagtttcactatttagagacacctcatgatctacttacatggatcatggaaagcactgaattgtaccaacactttaggaacaggcatgtacttttcagctacttcaccagaattgctcaggcaacttcagttccaatctaggccaaaaccccacagaatcataggtaggcgacatgacgaaacacagataaataaactagccaaaaatcagggaaatctatactaccactcgctgtcgtgaattatgataggccatctgtcacccaccaattcacttactgcacaattttatcagatgaagcagcatgatcaccaacctaaacatcacaggatcgaactaagtagtaactaaatacatccagaccaaaccaacagtacacaaacatacatcgaattacttccgttttaacttttaagaccagtcaaacgaaattgcgtcgtttccaccaaacaatcacatcgcggaggagaggaaaggggagcgacctaaacggcgccggaattgatccatccccaaccatcaaccagccacagccaagcctccgaaccgcgagcaaaaggccagtagtagtagagagcaagtgactagggctagggctaagctttacctgcgccttggacgactggccgaagatggcgttggcgaggttcccgaaggggttggacgacgacgccccgtccggcgcgcagttgccctgcccggtgatgaggtgccgcatcgccatctccgccgccgccgccggcgagaggcgttccggtcgaggtcgaggtcgaggagagagagaggagtcgtgcagcgtcgcggtggctttgtgggaggggagtagtagcggtaagcagttggaccccgataagaccaggacacgtgaaagatcgtgctactccatatacgtatggctggtttggttggttgagaataccttttctttttccttcaaataattttaattttaatttaattttatctttgtttgtttttttctcgcggtgaaaacttttgttttttaaatttagtttctatacgatgcgagaagggtggagacaatcgattagttttaaattcgtttcgttaagttccacgaaattgtgaccgaattttctgagagtctcctaccactgaataggagactttgtactgtgtctcacagaaataaattttgtccggttaagttccacgaacttcccgtagaatatcagagattcgatattgggtgatctttttatattgtagattgtaaatttgtcctcatgaattttgacattttgtttattctatttgatcactcatcttattcaaaacatttttacaaatataaaaaacgaaaaaatatgcttaaaatacattgaataataaagtaagtcaaaaataaaataaataaataataataattattttttaaaataagacgaatagttaaatagtaagatatgggtacgaaatttccgagggagtgagcggaatacactgtaccagcacaaggatttcctctaagcccatgggggcccaagtaagcccaattggcccaacacgagacgcatacgtacaacaaagcccgagaaggaaacctaagcacaacccaaaaccctcccctctctctctcgcctcaccaccgccgtcgtcgtcgccgccgccgcaaccctcgccgccggcgctaggctcgcgactccgacgatgtcggcgccatccgaccccgccgtggccacccacccgcaggcgggcgccgccgcggcggcgtcctccagcagcggcctcaccttcaagctccaccccctcgtcatcgtgaacgtctccgaccaccacacccgcgtgaaggcccaggcggcgtgctccggcgacggggcctcgtctgcggcggcgggggggcagccgccgagggtgttcgggtgcgtgatcggggtgcagcgcgggcggacggtggagatcttcaacagcttcgagctcgtcctcgaccctgtctccgggaccctcgaccgcgccttcctcgagaaaaagcaggagctctgtgagtgaaattccggcgaatcttctgcgctttttgttagggtttcggcgaaatctagtggtacgagggtttgattcgtgattgcggttgtggccgtgcagataagaaggttttccccgacttctatgtgctgggttggtactccactggaagcgatgtgcgggacactgatatgcaaatccacaaggctgtaagttcttgttctgttcttagggcaagctagcagaaagaagtaatctatctggtcagcaagtgcccaacctgtctcattatgacaatgtgcttggttgtttgctctttttacagaaatagaatatgggggcttggtgtaatgttgtttagttggcatggttggcagtgctagcatctaatatctgtggggtttctggttgaattctgaaagggatggtagaagaggacatggttttcctagttttgtggctacaccaaattatattgttatgaacatatactgtttattgttatgttatagcatcatattgggtggtggagcagatggtaggcgcataccgtgctatttatggaccaaagaatgttactatgtattcaaatattcaaattgtgcgatgcaattattctggccatataaattgatgctacaattttctaaaatatctgctgtagtcatgtgtcatgtattccaaaatgttttatgccttctttcattgccaatttgccagcagtagcagatagtagtgcttatgttgacattgcgtacatatattctctatgttgtgtttttactcaagtttctgttagcaaatgaaataggcatgactgttaactcttttataacctcattgcttataaacatatatattcttttgagatctgctctgtacattgtttttgttcctctttgtgttacttacttcttttttttattatccagctgatggacattaacgaaagtcccgtttatcttcttttgaatcctgcaatcaacctctcccagaaggatctccctgtaacaatttatgagagtggtaagtgaatctgacttcagcttgtatcattataaaatatattgcaattgatttcacagtttttatatggtttgggtttttgttttacttttaggtgtacgtcaattatgcatgtacctgagatgtactccaccttttacatattgcccactactcctagaagtcttttttcccccaaatgccaccttttagcatcacgtatatagcatgtgtgaccccttgatttctcagataattgactcaaaccagttcggtgttctttcatggtgctactgttattttattgttccatttctccgtctgtttattattctaatttcctctttaccattttctgttatttctttttttttgacatgattttctgtaatttcaagagttgcatgttatcgatgggagtccgcagctcatctttgtcagagctaattatacaattgaggttagtttttttcttgtgtgtgttgctttttccataaataatttttgttaagacttaacgttagtacgtttgatttaaagactgtagaggcagagaggatatctgttgatcatgttgcccatctcaaaccatctgatggtggctctgcggcgactcaatgtgagggttcttcttatcatcagtttatgtcttacagatattgagttgtactacccaatatattgtttttggaaaaatgatactgacagatatatttgagcagtggctgctcatctgacaggaatacacagtgccatcaagatgctcaatagcagggtccgtgttatccatcaatatcttgtttccatgcagaaaggtattttttgttgctgttgagccctcaaaatatgtctgctattcgatgtgcttgaaatatagttcaaaatatgtttgccacctgttacttcaaataggtatcaactgtaaatccctttaccatcactgcaggtgatatgccactggacaattcgctgcttaggcaagtctcaagcctagtaagaaggctaccagcaatggagtcagaaaaattccaagatgacttcctaatggtctgctaacttgataatattctctttatttttgtttatcaaccgttgtccttcatgcagtgatgatcttctctgaattttcaggaatacaatgacaccctcctcatgacttaccttgctatgttcactaactgttcaaggtatgcccccacttattatgcaaactacaaagccttttgatatgaaagaatgtcacaacatcaacaagataagattaaaaaaatactttatagggaactcaaatcagcttgtgatttgtacacttcaatgtattatcagcaaatttaatagattcactaatgttagtaaatccgtacttgcaaatgaagttatctgccaagagatgaagagaagttgaatcataatggttgtttactcgtttggcattgcacccatgtcagtgtattaatactcttgtaacttgcagcacaatgaatgagctggtcgagaagtttaacgcgacatacgagaggtcgactgccaggagaggaggccgaggtgctttcatgtagattttcccccttctgcatctgcagctggttctctgctgagattttggaaatagttacccatatggccaggaagtttttgcgtataatctgttaggaactatatctggcagccatcaagtttcttccaaactcatgctccctcgttcaggattgacacggcaaacatgttgatattcttgattctgtgcctagatcgttgtttattcctcattcgccaagattgacatgtaaagtttatccccatcacccccatggtagttacactatttgactccctaaatggatatggatgcaggtttcctgagttatgcttgtaaatttctttaggttaactgtatgtatggctgttggtgttcacgcagcttgaggtgatgtgatgcgttatgtatggctgttggtgtcaacgtagctcgagctgatttgatgcgtgattgactgatggtcatggcaaaattaaacgggactgtctatacatcatttaatagaaaacccccataaaaatcttgcaaattgcagaccacccgattactttaagatccgtgcaaagaaacacaaccctaaaaacctcctcatcctcctttctccctataccgtgctgccgctccctagcgtgatccgcgcctttgttgccgccgctcggcctcgctagttggccagaaggcgtcaacggcgccggcgagcacccccccccttcggccagcctcttccccctcccctccctcctcaagccaccggcggcgagatgcccccgccgccaatgccggcccaccgccattctccatcaccatggcttcggctccggcgcctcgccggccgctcgttccaccacctcccatacccatccctctaaacccggcaaccaccctcttcttcctactcccacccccaccccaccccaccccgggaccttaattagtcggtcctctgctggagtttaggttgtcgctggcgccggagaagaagaggagatcaccggagttggaaaagaaacctagagcacgaatcgcgaagcacatccaatgatacaaaatttgcaagatttgtgtatgcgttttctgtcaacagaagcttaacaattccgtttacggtggcgaaatgacctttcatgtttcaagctaatgtagatcatgaagctgagcccgaaaaaaattccaagctactagaaaacaaagacgatgaaaaccaataaatttccaataagaattcattactttattacaggacacaagcagccgaccaatcctaagaacagctccttgtttacaatctacaagtgcaaagaaaaccaaccaatcctaagagctgttccttgtttacaatctacaagtgcagagcaaaccaacaaatcctaaagaacagccccttctaacctacaaacgcaagagatgttccacagttatgttacagaacggatgaaggaattacagaatcaaacccgaacgacaatcttcggtttattgccttcgaatgtcaggatggcactgattcctgcagcccatctcgcaggcgttgccacagactgttaatccaggctttcgctccaggagctccgcgacagttggactgcagccacggcgttccaacatgttcttcccaacaccaagccacctcaggcccctaaaaaatggcggctcaaatagtcccaggaaattacgtgacagcctagaacaataggagagatccagcattcttagggaacttttacccaaattgtgacgcatagaacctagagtttcaagagaagaatcattgatgaggaggcagttccggaggcagaggctgctgatctgctcgcagttcttggcaatcaacgtgacagctctgcctgatattctaggtacattcccgatatccagtgagattagagttttgttgatggtgccactcccgcacaacaaagaagctatgccattgttgctgatccttttgcaacctctcaaacataatgaagacattgggcaccgcccattaccgagtgcagataatcctgcatcggtaatgtcagctccagcaagatccaatagtgttagcttcgaaagctgcgaaatagaagccaacccagagtctgcgatgctcctgcaacctgataggtctagaacttccaacttggtgcaggatgagagtgagatggctgtttcactggttaatagactacagcacagcaacctcacttccgtaatctttggagctgcctcatcaagatcaagacatgtcaaatctgacaagtatccagtactgacctcaaatttcttcaggtccttgcaagactgaagaagggctgcatacccagcatccctcactttagaaaacccagcaagtctaatggttttcagttgcttgcatccgtcagcaagcatcattatcccaaagtcagttacccttctgaaggtggacgaacaattctgcttaccacgtgtcagagataaatgtgccaggttgtggcataacccaagtgcttggagcccaacgtttgtcaggtcattgtgcaaatctggttctttcattgggttatcttctaggcacaactcaactaagttatggagactcccagtgatgaacgcaacaagttcatcagttattatgtcaagaactaaagagagtgattctagagtgttgctaatagatgtcttcagacttgtgcttataggaaatagcctctttgcctgccaattcgacacaggctgtagcaatagtaccttgatggtactaggaatgggtaccaatgactcaaaatcaacggagcctggacctagcagaggaaagaacttgagtgaaagattctgcatggagagaaaagaacgtcagattagattatccgaccagattaacttttcaaagagttccatgtcattgttaaaataatatggctaatattatgttatctatactttagtattcacacattctcagcctaaaatattatttacaaaatactatattgctatgaactgaccatatatgtacgcgaagaacagtattggggttcatctgcaacaaagattcctcacctccaggtaaccgcatcctttgacgatgtgtgctatggactttcggcagatcccgaaatgttcatcatcatctgaagctgccatctccagcacaaatgatctggatataaagagaagaattcaacatgcttcaatcgacatcatttgggccaatatacaacctatggaatgtacaaatcaatttcccctaatgtttgtcacacaaaaacaaagtttaaaaatcaatttcccctaatgtttgtcacacaaaaacaaggataaaccgagcagtgtgcacaatatcatgcaacaaattcatcaattcgattcccctgatagaatacaatttcgtgggcaatcgtgcacacagaaacaaagccaacgctgaaggaagaaaccacacctcaaatttttgcatctctcaccaactgccacaaagaggtacgaggagaaggacgagcacttgagcagcgagagctcgcggaggcttcccttcgcgatggcgcccaccgcggagtcatcgaggaggctgcagttgacggcgaggcagcggagcgcgccattgcccgcgagaatcctattcaggatggcattcgtcggcgggaacatctgccaacaccaacaccaagcgcgtttagggggggaaatcgatttggggcgcgggggggaaaggggaagcgagaggagaggatggggggagggattgagagatgagccccctcaccgataggtcgagggaggtgacggcggagaaggcggcggcggcggcggcgcggagggcgcggcaggacgacgcggccgagcacgcggcctccagctccagcctgacgaccacctccacgaggagcgcctccgggaggctctccaccaggccgcgcgcggcgctgccggaggcctcgccgccgtccccctcgccgtcgccggcgacgacgagccggcgtctcttctccattgctgctccccgtttgcttccgggccaggggagactggagaagcgtatagatgtgaacacgggccccgggatataccaccagacatctggggcccacgagagggttggtgtatgacatgtgggcccgcccaaatgagaacttttcttcttcttcatttgggtcgtttatgacaaacgattttattcacaaattgtcgcatgagttgagttaatcatgtactccataaattgtcgcatgagttgagttaattatctactccatttgtttagaaatatagtagtttgtgtcattcaagttttatttttttaagaataatgctactcgtgcgtgtcaacaaattaaaccatcctcatttggtttctccgtccacatccttatgttaaccaatcataattacctctctttttaatttctttaaattctccaattaaaaaactctagaagcgattatattttatgagagggagtaaatgattcaaaacatgttgagaatatgtatgccatttttttttcttagaaatatacttgagctaaattcttttacaacaattcttagaagataaaatcccatccatagcaaaaaaaaaaaatccctctaatatgacatttgacatttgtttagtctacagatgcatctttgaccatattttaaaataagtttatgatattgagtaaattttgagataaatttacgcataccactttcacgttcttaaactaaatatttaaaaattcatagatattcaaattttaaaaattcatattgtctaaaatatcgtatatttatatcctataagggagtaaatatgaacgttgagtagcattgccaagagtacaacaaaatgtaaatgatccaacattcaacaaaggccaaagttaatacaaggaaaaactggagcactgagctacatttattagtataattaatgaatgtaaacaaagaacaaaagactgaaagttataatgtacatttacttgtgtagtgaaatgaacttgaaaaaggtgtagtcaaatgaacatactagtaatacacaagtatcactgggttaactaatggctatactactagtcaatggtagattcctaggcttggacaaagctttcttcagtcaatgttatttcaatattacgtttttttctctctcgggcatgttcaatctcaggcctcaaaaccaaacaaacaatgtcaggcattcctggttaggaaaaatgcatcgagatttcaggggatcttcaggcaccagtcttcctcaggcaccaaccaaacacacccctggtccatctgaaaatctgagaacaaatttgctttgtagtgattgatccatatgctaggctatgcttgtacatgctacaaaacgttgaggtacaaaatgtttatctgccaccaatccgagaaaaatttacttcccggagattgatctatacgttttttttttcccttcagtgctccaagccaacagaacaaatggaactgtcaacaaaatgcctgcctgtagacaaggggaaatgataagtgattaagtttgtaatcctagagaaaaagttgcaatgctgcacaatgacaatatgagcgatggtgaattgatgattaagaataagcaaagggaaccattgattcaattattcgatttgtccacgaagttctaaaaaataaacaacaaagatatccacgtgaatgagcaatagctggagaagctttccaacattattttgattgataattattcgattgcttggtttgaagaataacagaagagatgggcaatagatgaaaagatgataatatttgccaagacttcagtaactggattactgaatatctcaatttgacctggttatcagtaatacgattctgtcttaccttgtgtcatcaattgattctgagaacaatgctgcttgaataaccacaagtccaaaatttcattccccatagtttccgctgtcctgtattcccaacattatttcctcactgttctcccattcagtcaggcataaaatgagtgccaaccaagtgttaactgcaaacaagagcaccattatgaaagggaccactagtatcgatcacattgaactcaaagaatctgtgaaagggacatagttatcgaaattgccatatctaaccttccagcaaccatgtatctcaaagtttgtttgtagatgatgaatcatttggaatttcgaaaggtacacttggcttatgttttaagatcatttatgttcaaattgtgtaagtcagtacttttatctcaattgaatagcttcaacaattcatttacattacataatccaacttaatacagaactatgtcctgagattactcgtgggaagctttgtaaagcaatcaaaataaaacaaaagcagcagttatagaacttaaaagccatggaaattatcaacaggtgtcaggggcacagaactttcccttaaaaaggcataatctgagttcatacaactaatgtaactcctatcgcttgtcaaaaataactcataggatttcactactccagttttttatgcctactcatcaatatcaaaataatcatcaatctggagtgagaagcacttctacagaaagtaacaactaaagaatatgtttcccgtgaaataaataaagtattatatgaattcttgcctaagcttttttgaagatgaccgtatagcttgaaattctacacatgatatttctttattctagcaatattaatcacaagaatttctagaacttttccgtgttagaaggttttgaagtaaaacaaattctccttaagagcctacctgattcttgattttttttttctattagatattaatgttcttatcttagttagatgaactactgttaaacagctgaacattgctatctaagcattgcaatttggctgcaaaaataaaatgaatgaatgaatgccaacaacagccttacaattacatgtggtggacatacagcaaaaaattccatccagcagtcaaatactcaaattatcttctggtgttcccaagagacaatatgtcctggaaggttttcacttcatcatttgaataggaaggttttcttcctattaccaatttcattatctctcttgcattcctgtcctttgaaattgatatgaggccttttagcagttggttaatagtatcaacacttggaaaccagtttttctccatgctgtctttgcacagcctgaatgccaaatcaaactcccttctctcacagaggtaatgcaccattgtctggtaaaccttagcatttggcttgcatcccctcccatgcatcgcaccaaatactgtcttagccatctcatgctcgcccatcatgaagaaacccttaataactagattatacgtgatctcatctggccttaagcctgatgcatacattttcctcaccaaatcattcgcttgccagccccttctcctgttaaccaagaactggattctcacattgtaactggcaagtgttggcatgcaacctctcaacctcatgagattccacagaccatccccgacctcacgctggccacacttatagaatgcatccatgagtgttgtgtatgtgatgacatccggtctcacccccgccttctccatttcctgcataacccgaaatgccgctcgaagttcccccaagtcacacatcattttcaccactgtattgtacgaaatgtcatccaactcaaccccatatgtctctgaactctcgaacaactgaaggacctcatcaaacagccgcgctcgcagtagcaccttcatcgtggcattgagtgacttggccgtgcgcgggcatccatacaatcccatctcgcgaaaagtgctcagcgcgtggtccggcatccttgccttgccgtacagacctatgatcctgaccacgaacccttcccgcctcccctgaggcaacgccttgtgctgctcgagtatctcctccactaggtcattccgtcgagcacctgccaggcgcgccaccgcgtcctcgaacgcgaaccggttctcaatcaagaggcggttgtgcgcgttggccctgaacagctcgtacagccgcaccgggtccctctcgttcttgatcctgaccagaacggggggctcggcaggctcgacgccggcggactccttggtggtggaggggtggcggcgccgccacttggagctggcgacggcggcgcggcaggaggcgatggtggggaagtccggctgggagtagtgcgcgtgcgcggagaacgggtggtgcgaggtccgggagagccccgccgcgatgacggtgagcgcgatggcgtcgaacgcggcgcagagcttgcggatggcgccgagggagagcatctgatccgccccgatcccgaggccgccgcccgcgccggagtggtagcgtcctcggcgtgagctaggtctctcgggggtgggctcagcacggcggcgtggaggcggcggcggcggcggcggccatgggcgcgggatgcgtaggtgaggaggagagggaggagagagttccacggctgcgtgcgtgcgtggaggcgcaacccaccgcgaagtgtcatgaactagcgggccttcttcgtctacggcccatcaaggcccaagttgatcgctgtgcttagttattttgggcgctttgcccaacttgcaatttatgtatcgctggtggtcaaattagttgttagggcatcgatgcaaattggtattttctagcagattgcggttactacactatagccatcatttaagggttttttctatgtaaggcctagatcctaaaaaaattttggccaaaaacgttacattaaatgtttggacacatgtatggggaattaaatgtgggaacaaaacaattacacagtttaaatgtaaattgcgaaacaaatcttttgagcctaattacgtcatgattggacagtgtgatgctacagtaaatatttgttaatgacggattaattaggcttaataaattcgtatcgcagtttacagacggaatctgtaatttgttttgttattagtctacgtttaatacttcaaacgtgtgtccgtatacttttaaaactttacgcccaaagaactaaacacaccctaactcatctctcctgtatttcttgttctttgcacacaatttggcatacagtactatgatagcacctcgattgacatcatgatttgtgaaaaagattgtgatgtattaagtattaaccactcatgtttgttgctgtgaatctcagcatgtgacatcatgacattaatcaaaggcatatgctgagatttgaaaaatgagtaggttgttcttcgctctgcaagtttagtctatatgtttagaagagccattggcattaatcaaaggccagtcaccattattgctttctaggaaaccatcttcgcacctgatcatcgacgccacatccgattatggcaaggaccagatatcctggtccaaagacatgaaaagtaagctcgagaaactggatgagtccagttcacagattgagagcctggttgtctgctgctgaggatggcaaggttgagctcatccctggcctgcaatcttggctttgacagcttcgttatgctgtcgaagctgctgacaagacagcgtgtttgatgagatcgagtaccgatgtaatccctgatgaggtgactaattgagagaaggtttccagtgccatgaggaaagtgttcagtttttttttgggagagtggtgaaagctgatcctgtaatgcagagcctgcaagagcttttttttttgccagtgaaggagttggaggatatcctcaggtggatcctgaaggatgcacttgcacaacatgtattcaataagaaagaactggaagggaagtttcatcaagaattcaagatatggatccatgcctctagtagacttgagacgataagcattgccaaaaaagatggtaaagtcagtgacaggtgtgaattatgacgtcaacacccttgataaagctcacaagagactgatggacattgatgtataaagagatttctgttggtgctggatgatgtttggaatgaagctgatcaggaaagttggagtaaagccattgctccgctaagatgtgcaggccatgggagcaagatgctgataactacccggttgggttcagttgctgatatgattggaaaagttgttgggcagcacataagaatcattttggagggcttataaaaagatgactacttattactattcaaccagcatgcatttgcagatgttacaggcatcgatgagcatggaaggttgctctcaattggtatgaagatatcagagaagcttaatggaataccgcttgccgcgaagacaattggtgcaatgctgaattcttgcttaggtggtaagtattggaccagaatactggaaacaagaactttcgatatagaaaacaacgacgttgacctgattacaaaaggttacagtggcctcatgacaactctgagattgagttacaagcacctacctgaaaacttgcagttttgcggcattttcccattaagttgcagtggcctgaccagacttgaaccaattttttcatgagtgatcacctttcggatcattgaattgtgagaaaggaacacttggtcggcggttcaaaggcggcaaagggtgaatatgagaaccttccggttggaaggcggcaaagtgtaatcacaacaatagcacaagcatacacaagtaagagtatgactctatgatgatgatgagccgttgaggagctgtccaatatcatggattagctgtgccctcaagttgtccacgctgtccatggtaacacctcgggccacaactccaagccaatgcgactctgatcctccagcagcgtggtttcgccaccaaccacagatcacctcagcacatttaatcatgtaaagggcacattcggttccattgttttgcttaggtgtcggagctttagtgcatttcgtctcaggaggtaggtaaggaagcagtgatgccgcaagacggcgtgcagctctcaaattagcatcaccaggactgctgtcatggtgggctaagcatggtctgcctccaaggttgcggtcaaacactaggaggctccagtgtgtaccttcacccaacagatggggatcctgactgttcactggaaaaaaggactagttttcgagaggggagtcctagactctgtagctgggttgacacaacagtagcatctgagtttcctagtagatgtgacattgcaggattcacaagcaacacatcttcgctgtcaattctatctgataacctgttgaaagcatggaccacaactgggtcagtgaaaaactcctgagagcaaagagagcgtaggtcatctatcgtcactcctgccgctgattcactgcttgttgggagagcctggggtgatagattttctgtgttgctgcttatcagagaactgctagcggggagagcctgcagtgtttcatctactgaacagccgccaatctgagaaccaacacttgtgggaagagcttgtggtgcttcattaattgtatcaccgtctatctgagcttgtgctgataaattttggtcaggcagcttaggatgattctccacaagttgattggtacaatcaagatcagtagcatctgaggagtttcctagcagatgtggcattgcaggattcacaagcaagacatattcgctgtcaattctatctgataacctgttcactgggtcagtgataaactcctgagagcaaaaagagtgtagatcatctatcgtcactcctgccgctgattcactgcttgttgggagagcctggagtgatagaccttctgtgttgttgcttatcggagaactgctagtggggagagcctgcggtgcttcatctactgaacagctgacaatctgagaactaatgtttgtgggaagagcttgtggtgattcatttattgtatcactgtctatctgagcttgtgctgataaatttcggtcaggcagcataggatgatgcttcacaagatgattggtacaatcaagatcaaaacgtcttgctttatgcattttcaacccaagctcctcctcgaggtatgaaaccagctcatcatagtatttctcctggtcctgtcatatgtaaatgaaataagttgacagttgaattgataagccaaatactatctgcctaataatatgcaaaggaatcgatacttacatcactcaaactccatcttaagaaaatttctggagcaactggaggacctccaagtttgcctccagatagacccttcttttttgtcaactgttgctgacctctcctgtgcactgcactgcgtggcgtgggctgtggctctcgaggcagtggaatatcctcctccccatcaccgccaagatctacatacaggacaccagctcaggtctcgtggtgggggtggtaatgcagtatgtttgaaaattccctccaaataagcatcgacatgaagataaaatgtgcttttcagaagatcatcaaaagtaagcaattctcttatgccacaatcgtggggattgtatctttgattgctaagagacctcataacctgttggctgattgaactccaattgacgattagcctcttgacccattcaaaaccatcacctaaccgtgaccccgtaccatgctccatggcatggcatatcctttttatgcaccattttgaattttgattccaaaaacattacgaccatcatgcccaatgaaatcttgaacccaattgggactcttctgttgctaggctgataagaggaaagataacgaaaacattttttgaacagttgcagattcagccatgtattttctgtcccatgtggggatatttccttatgatttccattgaacggaagcttatgacattgtgacgaattcatataactcccaagattatcatcagaccgcatctcataaatgcctctgttgttgaagaacccaacaagccagccagttctagcatcaatcactagtacaacgtattctgcttcatacctaaggacataatagaatgtcccgtggactggtgttgtatatagcatcattcggctatatgttaccctgaaagcagaattccacaggagccagaatctgtagtgcccctggcaatgtatgaagttctcaacaaattcatgttctgttccatcaagatatagagttactgtgttctgccaaaggaggatgaaggtaaaatagaaagatcagttcagttgcattcacaggttgaaaatgggtagatcaattcgttagcagaccgtaaattacaggagatagaaaaaaagtgatcgacgatcataccctcggtgtgagagctggtgttttctttttgcgcctgcccattatcaacactaagatacttcctccaacagcaacaaggtcagcaaattatcctctgcagccacagggaaggcgtagtaaaatcaaaataataattaagaactaaactacatcctaagaatcaaaacaaatcgtgctatggtaagaatcaaaattaactgtgctccctccagccgcagcagaaaccagccccaaacaataaaaagaaattgattttttttacaagaaacaagcccattgtggtgttctctccagccgcagcagattttttttttgttttggaatgcgcaaaagaattaagcatcaatcagccgcagcagcaatgcaccggcagcagcagaacaatttccaggagaccgacaagaaaaactggaaacaaaaccaaataatcgaaacaaaccgagtttcaaaataaaaggaatccccggccattctatgcaggataacatacaagaatggacctcgaacatctgctcctcctcaaacaaggcacaagcaagaagaagtatgggagccctagttacgacttggtgacacatttggctaatgcgaaatgagaaaatttttaaaggccatcccccgaatacccaccaaatcgaccaaacggtagctgccatcctagaggatattaacgatagagagttcacctttaagccgccttaattttcttccctttagctttgttcgccactctgttggtttttttcctagttgtttgtatttgctgctactatcctatgtgatgtaaaactcttctctatccttctaatatagccggcaattctcttgccgtttactgttaaaaaaagaaacaaaccgagttttctgattccagtgattcctcaagatcaccggcagaacaatatctcccgcgacgaggaccatacagaatagaaaggacaatgcagaagagaaaatgctgcagagaggagtccgaccccaacaaaatcaataactgatacaaagaaaaacaaaatcaaaacaagtcctaattttttcatcagaatcagctagttcagagatttcttgagctaacagttggattattctctatcaacaacacgatcttgcgacacaatgtccccaagaacttgcggcacaacgcccccaggcgatccagagcaaaacaagaagaagaaatgggagatcaaccccaagaactatagaactaaaggtgcagaacggcccgaactgatgcagcagaaaggagaagaccaaccccaagaacagagcaaaacatccaagaaacaagaattgtcgatgttctttcgaggctcaccggcggaatagtatcctccagaaactagatggcgggtgcgggcaggataggctgattcttccaaagtactggacaccgtgatcgtcgatgagtcgagctccctcggcttggttccgctgccgcgctgagcgggaacccgaagcttgaagacgattgttttttttttcctttcctttttttttccttgggaaaaatggttgtcttgggattgggcgcatctggtgcccctcttcttgataactgggccgggctaaacgagcatgttgggctcgctcagccgatccacacacccacaccctctctgtcccccaccgcgtcggccgccgccgccgccgccaccaccgccgccgccgtcgccgtcgatgcttgttcatccccaggcgccgccatcttcatcgacaggtggaacatccgccgctctgaccccgaacgatagcagcttgaacttgaagtgatagcggcgcatgccgccgagtggcggctggcgagaggacgcatggtcgagcgcgcccgtggggacgtcgtagccggcggcgaccaccgtgtgctgcctggcgtggagcggccacgaacgcgacgccgccccgtcgatgtaggtgaggtgggtgggggttggggggcaggtcgcgctccgccacccaagcgcgctttggtcgagctcgtcggtggcggcggagatggcgtcggggccatcgccccactccatgttcaccgccgcactatccaatcatccgtgccgcgggagatgatctcccggacgatgtcgcgcgcgtgagccttgccctccgagtccacggcgcggtccagccatgctcgcctcatgctcgatcgggtgcccagccgcttcaaactccgccgacatccctgcacgtcgagccacccccaggcgccgatgttgtccaccgcgctggtcacctcgaacgcctcgtcaagcgagcggccagccaccgccaatccggccatgatgcgcagtgagacgcgagagcggattgggattgggggaagggaggtggagaggctctaaccctcatcgagcgaaggtgcgggtggcggcgtgaaagcggagcgggcgagaccgatcgaggcgaggcaacggttcacgcgcgcggtggccgtgcagagcagcaccggcgcggcggcgcattggccgaggtggcggcggctggtggggaaaattgggatttcgcgtcgtggtcctcaaaattggatttcacccgaatgcaactgtacaggaggattcaataaaatatcactcttaattaaaggctaccttacataaaagttacgggccagtttaaattgctaccctaccaaaatttgctctggtagaatagcaaactaaacacctctattaaaacactacctatgctataaatttagctttgcccatgaacttgtctcttatggacatattttggcttcaatccaaataaacattttcaactttaccctaccaaaattttagtagtaccaaaacttgctcaaaatttggcactaccaaaaatctggtaaggcatgaatcctaacatgccctgcatctattacttttaccatcaatatcaaagagaatttaatttatcttgtgtgtaacaaatatcaaagagtatatacactcatggaaccaatgagtatccttctttcattcatcactcaacggtccagattgtctcggtgaaatctcaacgattgagatcgctcccacctcccacctccctcgattgcgcgctcctcttcgccccctctctatcgctctcacgcgccgccgcccctccccaaccccgactcacgcggcgccaccgccctcgactgtcgctgctccgccgtcttcgcatccgtcgtcaccgccaccgatccccgcgccaccgctgtagccgccgccctcgactgccgccgctccgccgtcatcgcatccgtcgtcccaccgccaccgattcacgtcgccgccgacgccttcctcgcctggtcgctgccgagaccttcctcacccccgcgattcccaaccctaaccgccgtcactgccaccgctagcccccgtcgaccgtcgcaccgtgccgcgccgcaccgtctcgcccttccaccaagcccccggactccaacgtcgccgctccacgccgccactccagccccgatccacgccgccgcagccgcatcaccgtttgtttccgccatgggggcgtgattccgcgcgacggctggaggaggcgaggtcgggcctgccctccatcgatggcggactccgcgtgacggctggaggaggcgaggtcgggcctgccctccatcgacgctccacgccgccgcagcccgcagccccgtcggcgccgttgctgcgtcgcttcatcgccgtcccgacctcgaaggagaaccggcttcgagtccctcgcgccgccactgatccagggctcctcaaccctgcaagccgtcgatcccgcctgtgaacaaggtaagagtgcttctcgatcccgttcctgtacatgaggaggcgacgcacagcgcgtgggagggcaggcggaggcgaggagaggcatggctgccgtctgccgggctcccgggcgcagcctcacagagctgcggcatccacgccggacggcgccgcggcgtggcggggcgcagccgcgcaggcgtgcagcacaggcgccaagcagggcaggggcagggcggatggcgcagcagcaccaagcagcaagcaaggcaagcagaagcagtagcagccatcaggccatcacgcccaatctcccatcagcagaaaatggacagaaagagaaaagggaaggcactggcatcacaaagaggttgtactttttttttatttgacaatttcagaacattgcaatttcaaagtgtacaaatttattactgaaattgcaattaaatattttatttttaggatgcttgtacattttgtttcactcattgctttttatcttatcaaactaatcaatctttgctatttgtttttcagattctacatatgtatctatcctcattagttcatatatgtgatgtacggctgaaagcttgaatcagtgaatcttgaggtatttttgagtacctacttttatatttacacttatttgcaaatggatgatgaattgtgaacttgtgattaagtgcttgtactatgacttgctgatataatgttacattgtacaatattgtgcattgaattttttttcttaattcttgttctgtgttaactctcgcgtgtggtagtttattggccacacctaaattttttttctgtcctccgccactgttcatagagatgcataatggctttaggaatcccctttgttgactaaatccccattgttcattattaaacattgttcactgtgcatggatatctgtgatgcaaaactctaatccaaagcctattttgcatttcaactaaatttcacgtgttaatctcattcgtgtggtaggatttttttttggggtttcattgttgtcattggatgagatacttcacatcttgttaacatttatcgtcaatctttcattgtaaaattgtggggaagaaatggcctatctcagataattctattgtgtcaatttttctatgtgattgcttatatctagcaaactgacttaacctttcatttcaaatgatttaatctataggacgaaaattcagattgccgaagaaaaattcaggctgacaggacaccatgtcaactgctattgtttgctgcacaatcaacgaaatttttggctgattctactaaatttctgtttggtataggtaatttcttccataatgattaccccttacaaatagtgcaaatgtatacttcgtgggtcaatcttcgcactgttgtagaatctgatgtttaaaattgcctgcatccggtttacaaatcaagaaaaaaaattgccctgattactgtgccaaccatattttctttgagggattgaccaatctttttcttggaaaagcttaaccctgttccaaacgtaatactgcaaaattttgctcaatttcacatgcacaccacagtgtagtcatgcattaatgattttgatttcacggtgtgacatgcacatcacattgtggacaagtacattgacagaccagcattttgatttcacatatattcttccctgttaaagcccggtcatcctaatcgatctgggatctaagaattagatggtatatgcagtacctttagtttttcttgcaattgactctaaattcttatgacgttcagttcatataaataactatatcctacagaatagatgaacctatttttctttctctagggcaaataactgaagagtgttggtatttgagttaaccactttttacgaacctaacctgctgcagttccacaaccatggatttaaatagattgttcatgtagttcctattttttcttgtatcctacgttcacagatcatttattaaattttccttgtatcctacgtttacagtgttgcatgaatcaggaaaaatctgattgaaggatctaatatttgaggactcctgctctgctgttgactacttcactccagttattcaaggtatcaaagttactctaaaacagtattaaacattatgttttgcattgttgaaaataaacaaatgttcactgtgcattattaaaaagtatgttttgcattgtgtctttgctttaatttgaataaagaaatgttcaccatgtaccgagctggactgaaattacttgaatggatcatcaccacccttgtctgaagtaaacagtacctacaacagataatgctaattgcgaatcattcttggcaattgactgcatttgtaattgattgttaattaattttaggcgcactatactgcaaatcatgtcagctttcctgagcatttgtaatgatcaatgattaaaacaaattattattattatttatcttcgtagcagcaagcttgagatattattggcaaatcatatccaaatctctgtcaattacgctttcatgcagcagatcagagtaaaggttagcaaatcatatccaaatctctgtcagatgctattttggcaatatttccatgtattacatgcccatacatgtcaactcacaagacatacaaggcaatattgttatgtctttccatagatatcatgatagcaacaatggtaacattatcctccttagcctatatatatgtgggtgaaggagtgtgatccaaaaaaaaattactgatcctccttagccggctgcatacgactgctcaacttcaactcatcatcttggtatcgttctccaagctatctcttatgtgttggaaattattatatactttagtttgcacctattgatctcctatttcttatgtattgtaataaggcatggcatccatggatgatgtggatttttcaccacatcaagccacacctaaggagtcaatgaactccaaggatgatgcgaaggtgcagccttcgtcagggcaaacaccaaacaaggggaattattacatggggcacgcgaatgccatcatgatgatgtttcaatacatacgtgatggttgccggcgtgttgagagttccatggaagactagaagtgcaagaaggtagaaaaaggacacggtgagaaaaggaaggtgggagaagggtatgatcctcgctggtcttctcccatcgagataacaatgaagatctgcaatgacgacgtctccgatgaagcaaccgagaaggaaacatgatttagtattgtcactactgtgttttggctttagaataaaataacatttcttgtgaattacacaagaaaattcagtaaacaatgtcgttcaggcctattcagtactgcttgtgaaatgcacaaccaaattcgatgaaactttgttgttatgatgcctattcagtattgcttgtgattgagttgatttctgggacctatacaaatgtgctctacctcctgttgaactactatgtatttgtttggcacggttggatgcatagcaatgttcctttatatttgttttccatgtctttttatataaggagacatcacacaccaattgtggtttagatctcacataaataaattaggtcggccaattttctgacgttgtgtagcactattgatttctgtaactcttttgctttagatcaaacacatgtaattcttttgctttagatcgaacacattttatttgcttcagggctccattaatttaaagagctgaccaatcacatgaatattgatttatgaacatgaaagcgtataaaaaaaaagcaaatataattaacataagaaaccagtatcgctaatttgctattatgttgcctattcagtcatgataaaggagtaaaggactgctagatgtcaaacttatgtgtatggtccaaatcctgtaatggcccattaacaactaaaatacccattataaatacttatatgcaatactcaacctaagtgcctttgatctgtcacgtttatcatatatcttaaggcacagatatatgcattatcatatatctttaatatcatattattatgcattatgacatggggcacaaatatattggtatatcctattctaatattttacttgcaatatatttgatgtatgatataaattgaattaaagctcaaatgcacagttaatataataatattttttgctaaacatgaaaattttaaaaattattaaagacaaatagagttgcaccgtagcgtttagcacgggtatattactagttaaaataactcatcgagttatgatcaagcatttaatttacctcttcatttaaatcttaaattcataaagactacaaataaaaataacttatttgaaaaaactcaaatatgaaataaatctaactcttgtggatggagggaatatttcgaataaaattgccgctgactctccttttcaagcttatctcctaactccggcttgctcattggtgatgagctgatgatgggctcgagtgtgggaaggtagcaaccttcacctcctttgttgcctcggttttgtcgctctggcgcaacccccatggccgatgtctacctagcaccatggccgttgcacaccgcatagaaaagtcacatcatctttatctttttgtcctcgtagcttgaccagtccatggccgttggcaagcccaaggactttccataacggccgctgcatccgcaagctcctttgcgtccccctcccacctccaccataaaagtcttggacgccacgcggtagctcatccatacctagggcatgggggatgcttatgttcgagtgtcccgaggagtgcgtggaagctgctgggatggtgggtgccatcgtgcagctcacgaaggcactgaggtcgttatcaccattgctattggctacctcattgccaccgagaggagaagggggcaccaaagagtggtgtgtagctcacgtgacgcggctagagaggagctccgccacctcatggttgtggtgcagcttgatgtgagcgggctcttcagctcggcgccatggcatttagtggtagttgataagggcatccatcaccggagcgagaaagaagagatggcctatagagaacccatgttgttgaaagtgttattttatcgaatcctttttgcacagtggtatttaggcgaaacctatttttgagggtggcataatcccaaatttctcatgcataggggaacagaagtttgcctatgagaatattgactactgtgatgtccctccattgtgatatcttaaaattacttgtaattttatattgtttggcatgatattcagcttaaaatcacttgagacttctttggttccataaaaatattgaatgggatttagtatgaaactaatctcctcaattctctccgacctgtctcctgtaatgaacattgtttatgcttttttagtaaaaaggctggcgcagagcctttgatttataaaattctctccaatctctccctaagcctattggcccataaggatattgaaagggacttgatgtggatttaatccccccacaatcctctccggtcctttttcttgggaattgaaaatatttttgacgagtatttattaaactggtgatccttgtataaatattactgattgaaccagcaaccgtagttttattttaaattgttgatttaattcgtgtgccatgtccattttccagatatggtgagttaaagattttcctttttaagtatatagtgatttagtggcatggaatggggattggggaagaaaatgtctttgctcagaaaggtccgcacttccacaagattaactccttcatgctagcatgatatgttttatgctagcatgatgtgttgatgtttttttggttagcatgatgttattgaacaaaactgtatgagttcattaacttctcatgcctctttctagcttgtagacattgacgattaatgagaaacgtccaggggtcttccggctagctccataaggtggtgggctagatgatctgggttcgaagcctcacctcttctaattatttgatattaggttcttccctaatattcgcgtttttgacattggcgattaatttgcaacgttgaaaagcatgagtgaacgcgtgctacttatctctgatgtggcgtactttaaaagagacagcgttggagctagggaagaagcggagggggagatgccggggatggaagaggagtatggcggaggaggaaggagtggaagatgcagatattttcaacaactgactaccaactaattgtttcctactatcttaagcttcctaaatgggtctcaataacatatgtttcttttaccaaattgattaacaaagtaaaggggaaaaaacaccaataggctactgtgacatcaaatctgaccaaacaacatgcacatctatattggcgaaataatgttggatccgttgaatagaacctgcatgagtggtagccttgaaggcacaatagcgatggatttgattggatccattttcgccggcggccgctaccacaggcgtaatcttgaaatcaagaatcaacacagtgcgcagctgcacagcaaccacgaagtttctgagttttgatggattaacaatggtgccatcgaagagcttgatttcctcaggtatttgactgacaaagcaagagatggataagtgtatgccgccatgaattagcttcggaatcttaatttgtatggtgctttccttcccattgcgaagaagggctaagctgatatccacggcgccatggatgccatggatccgccgactatacaccccatgaaatggtgtaaggtcgctgaaggcggccaccccgtcgatgagctgcaagtcgtccttttcgtcctctcctttcttgatcttgaggtcgtactcgatcacagcaggattttccagcgagatgcctcgcttaggacctgacaatcttataagcgagttgggatcagagtagtggccaggcaagacgaaaggatcatcccggccgcggttgaagatgtagttgcgcagggggtcaaagagatcccgggcagccatgaagccatagatctggaccggggcgtcggcggcggcgttggacagagctgctatcttgatggagaagatttgcatcatgcggcagccatggtggacgatgcaagccgtccagcatggctggcaatggtcggtccgagccgacagcctcatcggcagcaggctagtctcgcgggtgtcgtcgaggcagtagaggctgtggaacgggtgggagtcggggtcgtagatggatccgtcgctgtgcttgacgccgatgagctcggaggcttccatcatgtcgtcgtcttcgtcgatgtcgtacaagaattcctcctcttcctcatcatactcccaattgttctcctcctcctcctgctgctggtcatacttcttccccgttttgattggagcgagggaacaaggaataaccaacgcgttcttctcttcgttctcatgtgatgacgactccggcggctggcaatcgccggcgccgcctcccttgtccatggatcgatcgatcgatcgactgaatcaccctccggctgggacgctgggtgcgtggtttgtttgggggtcatgggattagcttgttgctgccttttatctgatctgatgggaaacaaaccgtgtccgattccgaccggtgaaccgtctccgagtctagcgactccgtcgtccctttcccggttttaccgtcgtcacgtcctgtgccctggtgtttggagtggcggctgcgtcacggatcatccgactggtaaaaaaagaggaaagtcagggctgccttaatccgcaaagctgccgagggaccgacccgtggaatttgctatatatttgtcgcgtgattttttttctacgtattttgtcgttttttcgaccgtatgatctgcgccgcgatttgtgctgatttcaaaggttgctaaatgcaactgggccaccatttccttccggcccaattatccttcctccctcctggcccgacatttcctcctctttctttcctcaccccagcccagcccatctctacaagccgcctccatccttccccttagcaaggccggcccatcctcccatcctctctccggccagccaaagcaccaccaccttccttttttctccccggaataagtccactttcgatcacccacgcgagtttgaatcacgtcctttgaaccgtaataatagaaatcataaccacatctttcataactaagaaaaaaaatctttcataactaggttaaataaggtcctgagacagtacaagtgattgttttgattgatgtggcatcctagtcgacaaatagaaaatcaaaaaaaaatgtgaagcccatatgtaaagtggactccacctctccctacttatcccctctcttccccaacaactcgtcggcgacgagaggagaggcgaccagcgagcccgtttgcgtgaggtggcagttgcggttagaggttggcgatgccactggtgtgtagctcaagctcgccgtccacgggaaggtggcggtggtggtgggcaaccggagaggatggggccgcagctgtttgcaagtgaccaagtcatcgttccgcccatttcaacactactgtcaaatttaaagttagcatatctctggactatagaatagagtaaacacaaattttgtttctggtcctgctgattcaacaatatcattccatatttccatttaaactttgcagccaaaataaaacctcaactactactatttaccctctcaacctccacactaaagttgttctaccagcagcgcgcacactttattctctcctctttatgtcagcattgacgaagcactgtctgtcatagtggcatatcttaagctgtggtacttgctatctttcttccctgatgtttgttcagttgagcagcatgtgcatgcttcacttcagcatcagtttgacatctctgaaaaggcctcacacctgccggattcctatgacaaaaaaaaaaaaaaggatcaacaatggctgaaggataatctgctccaggcttcatctttcacgcaaaaaataactatttttcaatcaagtttttatttttttaaaaaaatgttttcccattcatcaacatcagttcgtttcattgccgtttattaacttcagtgctggagtgattttatagtctttaagggtaccatatttccaccgtacatttgatatctcacggtactaagagatatatatatcatatttgcactaaatgttttggtatctcttggtaccttttaataactgtaaaatttctctcagcactgtacgtaggtttgcatgtatgttttgatttggcctgtttcagattgtagtttgtacgaatttgatgagaaacagtttcgaattactacaaatctgatgaaatcgccgcgaaccgtacagaaacttaagtaaagtattagtggtacctgatgaaatctgcaagaacaagaacatccctgtcagagggagtaagacaggagtgtactggagtacagtgtactcaacatcatatttaaagcaaacactgtaaaaacattgcctgctccaaaatccaaatcagtgtcttcacagtacagaagtgcctgacaaagctgacagattcttgtgttctgcatgtgtagattcgatcaggaatgccataatggcatggatcgcgtttctttatcatcagatcatcacttctactctaaacaacagtacgattggtcctgctcctacacatcaccagctagtagatcacaaaactgaaataaaaacagcttgaatttgcatcagttaatgttcgataggttgtaaaatgcaataagatgtccttccattctgcgcatttctcaaaaaacagataattttctcagcttacagcattagtttttctttaaaagaacattaccggccgtatatatttttttcaacaaaccaaattaaacccatcatctctttgaaattgccaatttttttggcatgatcgaattaaatcccccccccccccccccccaaaaaaaacaactaaagcaatgaaattgatgaaaaccataaacttcagatgctacgaaaccattttgcctaatccaatatgaatgtggtgcgatttggagcaatagacatcatcgttgttcatgaaatgtaccgtagacaataacatgatataacctagaaaatgaggagatcctttcttgcttccaaaactctctttcctatttgcaaattatcacatcattgatctcacaccaatacaagtagattatctagttcatcagttctaatcccaatctgccggccagaaaaagctgaggatcctatgccacgtacagacagcagaggtaaaacaagcaacccaatcaagaagctggacaaagctgtttgccacaaagctcagctttggcctcttgtaatcatgtacgcaagtacggaggttaagaaaaaaaattctttgtgctaatcatgctgttataaactcgttccgtcacaagctagcacacctatatgagataaacatcccgtgtgaaagtatatcctgcgccaaaattccttaccacattccggtgtttcaagtgtataatcattaccttccaatttcccaattatacttacaagacacgcacatatattacacatgctaaaaagacataatccaaccacaaatattctgatgtatgatctcaccacattactacgaaagcattatcatccggagtattatgtttggtatcgaaggtatcaaatctggtacttatgatgatatcgtgcaatggtataccattcgtactcgctctagtaagtctgagaaaagaagatcgagttccttcacaaaaatagagttgagacattaggcgtgctgtttcagtttattatccctgcatctgcgtatttggatacatgaataaattgcattcagaattagaccgtgaaacgaccgacccggcgagattatcttcttggttaactttggtacgtaatgagagaaacatggattgtacgacttttaatgcgtaggtatggtgtgagatgatgatttgctgccgtagtgaagtttactcccataatctccaccacgtgtacgcccttgactggaccgacctgaagagagtttatctaatttactgacaaatttggtttaagcaagcaatcacaaatgaatcacaccgtgctgttctaagatgtttatgtcctcaacgtcgtcaagtcatatatagtaatagctaaatgctgtggatagatataaattaatgtgtactccctccgtccaataaaaaacgaatctagaatgatgtgacatatttcagtactatccagattcgtactaatagaatgagtcatatctagtattatgttggttttttatgagaccgagagagtacttgatgtttagaacattaagggcttgtttagttggtaaaagaatttgcccttacatgtcacatcggatataaggacagacatttaaagtattaaacgtggtctaataacaaaacaaattacagattccaccaggaaactgcgagatgaatttattaagactaattaatctgtcattagcaaatgtttaatgtagcaccacattatcaaatcatggcgcaattagacttaaaagatttgtctcgcaatttcctggcgaactgtgtaattggttttttttctacatttaataatccatacatgtgtctaaacatttaatgtgacagtgtaaaaaaattgtttggaaactaaataggtcctgattgtgaggttttcacaacaatgtgtccatgtggatgctttttgtatgatgaccttgtattttagagatgaagtaagataggaccaatatgtacaaggactagtttaaaataattgaactaatagctggtataaaaatatccaatagagttagttaaagtgatagattatttattatcaccattattgtctgaagtatagatacaaccgttggatgcatcatcacgaaaacatttttccccttctccatacaactccaattgttccttcaaatcattaatgatttatatctattttcttttattggtcatccaatacatttatctagatgctgccaatgcaacctggcttgcataggtcccttttaatgcaacaggagactccacactaatactgttcctaattcctgcatctgtttttacaaaagatgatcgagcagctctgaagaagatttgttaatagttcatggatcacaaagcaaggcatctcaggcatctggtgccatgcatgcatttcatctgggctatgtggttgaagccctgcacaagtatgcatgttcagatgtttcagtttctgtacatgttcaggcagaaagctagccagtcccaagttatattcagacattcagtgcccagttcagttgctgttgcccaaactccattgtagcagtgtgcaggtttacatggagcttggcaggcagaccacatgcatccatgcatggatcaggaactcatggtgcagtgcatataaacatggagacaaaagcagcaatcaggtcgagaagagaagataagccttcgcttctctgttggatcatacatgatgtggacatagattttcatcctttcgaagggttctcttacatatcacttaaatatttttttaaaaaaaataaaaaaactaagatatacacgtacaatttaactattacaagttgtaacaaaaataacaaatttcaggtatttgttactctctccgtcctaaaatataagaacctagaactggatggaacatttcctagtactactatccagattcgtagtactagcaaatatcccatccagtcctaggttcttatattttgggacggaatgagtatttgagaaaaatacaaaaaagatattgacaaaacaccaaaatctaaaaaaaataccatcgataagtgtgattctataaaacatcattgtacaaatgactttgtcttaaaaatatcatcgtatcctatagcacttaaggatggttaataatgtaaccctaacgaagatgtcatttttaagtcaaagccacttgtccgatgacatttttttttgcaactcgcacttgtcaatgtcattttttaagaattggacgtttgttaatgatattttttggattttctcttgttgtttttatcacaggtcgaaatctatagagcgatatatctcatattgatttattttaatttttttaaaaaaataatgactatttaagtgatatgaactagtgtctctttatggatggaaacatttttccctgcgtgatacaccagttctacgctcagtgctactaggaggctagcagccacttgctgctgctagagcccaaagaacagtactgtcagttcagatcagttgcaacttgcaaggtctccatcttagtggagtactttagttattcgatcctataaaggtactccctccgtaccctaatataagaggtttttgtgattttacttgcacttgcactttaactattcatcttattttaaaaaattagaattattatttattttatttgtgacttactttattatccaaaatattttaaacgcaattttttgttttttatatttgcataaattttttgaataagatgagtggtccaagtaaaatatcaaaatcgattatattaggggacggaggaagtaattacaaagtctaaaggaatgaaatctccagctagataataaaaaaagtgtgttcttttgttttaagcaggtttggtctgaggtgacaaagactgtctgttagaagtttgcaatgcccatacttttacaaaccccttcatgattagcgattttaatccacaagtctgaataaattccagcatgtctgatgtagctcatagaagcatttcagcttgtcttaatttttttctgtcctcatttttttaatcaaatgactatttcattgtacagtcgtaaagccatttcaaccacagtaatctgctggtaatttttttaatgtcatataaatttcataggtagtgatattactgctgatttcccaccattcaactttcttaaattaatgcctaatatatcatgattatttttgctggcattggtctctttaagcatgtgggatgtatatttgtgggtgtgagtgtggtgagcgtgcgtgtgtcttatcaataatgtaattttaaatttttttatataaactattttataattttttaagtaaatttcatgaaacctcacatgttatgatttaagttgcacaaaatcacaacggctctggtacatggcatataaccatagatattacggtcataagatttcaccaataaaaatagttaacttacctacaatatttaaatgatggattaaaagaattcatatatttcggaacttgtatgcatgtatggtagatcaaagaaaatttagttaatggtgtatataaaactaaatgtcatagtaccagcattacgtgcaagtgtgcaacatgccaaaactccaatagttttatgcaaattggatcataacatcgtggttacgtgaaatttactactatctctgtcttaaaatataacaacttaatactcggatgttatatatcttagcaatgtaaatcttgacatgagacatatatccataataagtagcagtacatattgtgggatagggcgagtagtttttttaaaaaaaaaaacgaaacggtttaaaaactaatccatagttagcaagtggttaagtgagcaaccgtttccatcaaagacggggcaaaagtgagcggggaagacgacacctccgcagctcggcgcacaaagcctgcaggaaacccatcacctgtaaccaatccttccatcttctctgccttctccttcgcttcaccacctcgccaaaaccgccttcccttcccttctcttcccttccaacctctcgttgcggtttgcgctagaaaaaaaagagaggagagatttcaagaaaccgtgggggagaaagaagcaggcaagaagtagcagcagcagcgagtgaggctaatctggtcagtttcagaacagattctttgttcggtctctatccattgcaagaacaggttttgttttttcttttccctttttttgggatcagagtctctccatttctgatgctgctgctgctgctgatgatgatgatgatgcaaggcttgtggcaacttgtttggtgaaagaacaacgagagggatactgggatagggatcaaaggcaaaggtttttgtttttaccccgtggtaattgttcgttcggtttgtgatgggatagttgctgggactgtgaatcattttgccccttcttatcatacagacaggcgcgtgatttgaccagcttgtcgtctctgctctgcctctatccatccatccattcatacatccaaccttgggggttcttgattctttttctcatttcttggggaggcttaattgttgctatcgccctccgcttcaggtgtccatttgaattcttcgtcgtttctttcgtatttaattgccatttgctgatttgcctctttatttcggtgggttttatggtaataaaggtgtggttcctttatcatcaaatttgaggtgttctgggttttctttggttcttttttggagcactggatttgtgtgctcttgtaaatcaaatagagtttgtggtttggttcgtattttacacaatcgagttgtgtttttattttagtttgtatcgaaatatttgcatacttgtttctagttccttcaggcttcagttctcttcattattataaaaaaaaatttggtcctttcgtccataatttttttcacaattccatttttgaatgtatgagcttgaattatgtgacttttcagtttgagcttgggattgtcaccttttcatggacgggaccaacaaccatggagcactgatggacgattggatgcttccctcacccagtccaagaacactcatgtcgagtttcttgaacgaagaattcagctccggtcccttttcagacattttctgtgataatggcagtaacaaacatcaggatggacttgggaagagcaaagctttcatcgattcaagccgggaagaaactgctcagctagcaaaaaagtttgaatcaaacctttttggtgccaaccagaaatcaagctcaaatggctgtctgtcagagaggatggctgcaaggacaggttttggtgtcctgaaaattgatacatctcgtgtcggttattctacaccgattcggtctccggtgacgatcccgcccggtgtgagtccaagggaacttcttgagtcgccggtttttcttccgaacgccattgtaagtgacttcctcacctcaatcagtatttgctctgtgtaatgttcagttactctactcatgtggtttatatggaggatatatttgtcagtaaatggtgaaatctaaaccaagatacctattataaaaaatattctaacgcaagatacagcatctttaatttctcttatgtctctgcagcttcgtataattagtggaattttggagaagaaagtgactatatatgttgatgactgattaatcttaatgtcatggttttgatttatgcaggcacaaccttctcctaccactggcaaactgccatttttgatgcatagtaatgttaaaccatcgatccctaaaaaaactgaagatgaaacacgccatgatcgtgtattcttctttcaacccattttgggatctaagccaccaacttgtccagttgcagagaaggtagttttctcaaacaatgttgttctattccctatttactgcaaatctgtaatcactgctcgcctgctcggcgcagtttgttttactgttccagcaaatctgacgagcaaaatcaaattatcagtgttttttatgcattggtctgatgatatttatacttttcagggtttcagtgttaatcatcaaaaccagccttcagtgacggataatcaccaggagctcagtcttcagtctagctcaactgcagccaaggatttcacttcagcaactattgttaaacctaagacatctgattccatgttagacaatgatgatcacccttcccctgcaaatgatcaagaagagaatgcaacaaacaaaaatgaagagtattcttcagacctgatcattacccctgctgaggatggatataactggaggaaatatggacagaagcaagttaagaacagtgagcatcccagaagctactacaaatgcactttcacgaattgcgctgtcaagaaggtggagcgttctcaagatggccaaataacagagatagtctacaaaggttctcacaatcaccctttgccgccttccaaccgccgaccaaatgttcctttctcacacttcaatgatctgagagatgatcactctgagaaatttggttccaagtctggtcaggccacagcaacttcatgggagaatgccgcaaatggacacctccaagatgtcggtagtgaagttctgacaaaactgtctgcttctcttacgacaacagaacatgctgaaaaatctgttatggacaaacaagaagctgtggatatctcatcgacgctctccaatgaagaggatgatagggtaacgcatcgtgccccgctttctctgggctttgatgcgaacgatgactatgttgaacacaagagaaggttggctagccttagtcactaatcactcaatgaaccaatcttcactttgagtagctgattgttttccttcaattttattcatttcagaaagatggatgtttatgccgctactagcactagcaccaacgccatcgacataggagctgtggcgtcaagagctatccgggagcctcgcgttgttgttcagaccacaagtgaggttgacatccttgatgatggttaccgttggcgcaagtatgggcagaaagttgtcaaaggaaacccaaatccaaggtcaattctaatgccatttttctcttttggaacaaattctttgcagttcctctaatccttcactacaaaagtaaatgtttagcttcacaatatgacactgtcatcgaaggaacatttctctgtccatatgtgtgcatccatagttggtacaaagaccggaaattactcgcattatctaaaaaactccattttgtatttgcaggagctactacaagtgcactcatccgggttgctcggtgcgcaagcatgtggagcgatcatcgcatgatctgaaatccgtcatcacgacgtatgaaggaaagcacaaccatgaagttccagctgccaggaacagtggccacccaagctcaggctcagccgctgcaccacaggctaccaatggtcttcttcaccggagacctgaaccggcacaaggtggtggtggtggtagccttgctcagtttggctatggctcagctggtcacagaccagcagagcagtttggtgcagcagcagctggtttctcctttggaatgctgcctcgtagcattgcaactccggcgccgtctccggcgatcgccgtgccggcgatgcaggggtacccagggcttgtgctgccgagaggtgagatgaaggtgaacttgctgccacagtctgggaatgctggtgcagcagctagccagcagctgatgggcaggttgccaaagcagcatcctcagatgtaaaaatggcaggaacatgagacaaatggtgtttgctgcttatgtatatgaaacatttttggtgcttttgttaggagaatggagtgttattgtagctcaatttactttcgggggaaaaaaaagcagatagttcaggcaattgtaggtagtagaggttctagaaaagataaatggctttggctgagttctaaataacttcctcctttttcattagcatgtttactggattgctaaactatatattttctgtaaaaaagattatatagtatttttaaaatttataatacatactttaattatgcgctaatgatcccccttgttttccaaggcgtctacagctacagccgaactcagcctcagccttaataagatcagaacttctgcgttgacatcttaggctgactggttttacaatcaacaaattcaatcttgaattctgggagcaaaaaactgcagcaaaaaaaaaggtattttataactttacaggagtaactggtccgcagatttgcattatccagtaattgacgtgcagcagaagatcggacagaaacaataaacagtcaccatttgcaatgcttttttgcgggacagaccaaagtgtacccagtatactgtcatgtcagaacttcgaaacagtcaacgctaacaaaagcgaatcacaccatcaccgcttatatattttctctgcacaaaaatgtgcatatgtggcaactccaagaaactttacatttgacgaggatattttttgagtgaggaggttttaagttaaccctaatcatgttgaaatgtcactttataaatttggtatttctcttcactaaaacgtacaaccaaaacttcagcacttctttttgctcagtggccattaacagctgactgctggaaattctctctttgataaatggctttccaccgctcaagctcttccctgcgaaataatataaacaccagaagttagaaatgggaggagaaattgacccctttctttgggaggagggccagttgcagacaattgcttatactgttgtacaatatcaggttctctaatgcactgttatatagtcgactgcgttagtgctatattatcttatgatgtatgatacaaaagataattgccaatcttgtaggatacaattgtttagctgattattgtgtttctaatgaagcaattaatatatgatcacttatacaaggctactttgtttaagtaattatttttgtagaccactgtctacacctgaacagaatgtacagatgggacaagtgcactgacattgagtatgggagccaaaggagacaaaaaagatcaattaatctgcttgggcatgtttttagattgtttagatctgggaaatatgtgcatagatacagatcattgtttatgtctaagctctactgaaattagctagtcccgatcacttatttgagtttgaccttaaggaacttgatcccaacacagttattaaagaaatcattaagtatcggaaagaacaaaagttgtgtatatatagtccacatcgtataatggataagctaagtcttgtgtaccgaggtggtaaattcaagtgccattgggcagttggggccaattgagttatctagtttccccaaggcaattagctgttccaattattggttcacatccaaaaagaagcagccactgcaattcaataaatgaaagaaaaaaatacaagaaggattaccttaagcaccaccctattgaatcataatgaagaaggccaaggaccttacgtcttccatcattcctacggccagccctccgttttaccactggaagttgcttgatacctttcacttccatgagcaccttagcagtgctcagatctgtatctggaaagcaggtcactagtcctctttcattgccgtggtactgaaaccctctagtgaggcatgatgaaacaagagaagaatttgcctgaaacaattaaagcatgtaagtatgtgcatcgctaatttcgatattactataagggcctgtttggataggggtgttcaaatttaaatactttggttataagtttaactgcacgtctgcatcctataaaattccagatccaaagcatcccttaaaacggcaattgctaaattaaattataggctttaaaggtgtgagattttgcatacatccaaagtagatgaatttgccccattccgtggagtatcttcacttaattcagattcaaatcctttacggcgaatgtcaccaatcgtaacaattccttcaagaaaatcttcactgtctactacaagaacacaattttgctgcttatcatgcataagccttgttgcctccttgatagtcactgtaggtgtaaccttaataaattgctttgacattgcttgtgatacctggaacactcgttgttagaaagctgaatgaccacaaaaatatatcaaatttactaaggatgaacttgacaaaataataaagagaatgtagaaaagaggcatggaacctttaaatcatcaagaagcatatcctcattgttaataccatagcggtagggatcatcgtctagaattgcaagttcaacgtcatctctgtctggtcgtctccggtctgtctcattcctatctgtaggaggtaatagtgaagaataaccatgccgaggagatgtagcctcaaacgcctctttgttgccagacattacaacagatggcacccatattgctaaaccaacagctccctgtaaattaaaaataagggtgagcttatgtcacaaggagtgtgcaaactttcatgcttagaagcaaaatagcaaatatatgggatgagacatcaccatcagaggcagtaaaattctgtaatcttttgttagttcgaatagtagtagtactgaagtcaatggaactgagcagactgatgctagtgtggcagccattcccacctgaattaagcagacagtcagtatacttcgtttctatcaaactttaggctaccttcctagctcaaaaaaggaaacttactagtgcataagcttgagggtgtgcaacagcagtgttacccgggatggcagagtttattagttctgctgctgagcctccaaatacagcaccaacagcagcaccaatcatcaagcttggagcataaaggccaccaacaagaccagaacccttgcagagtgcagttgctacaacttttgcagcagccaactgagctaagagccagattccaggggctgaggcactttttccagtatgtaaaatttcatcaacattggtgaagccccagtacagtattccagggtaccttagagctattaaacctgctccaagaccccctaacgcagggcatactacagcagggaggctgaatttcttccttatcaagtcaaaagtctttgtgaaccaaaccaccaactgtctgaatgccacactcactaccccacaaagcatgcctaggataaggtagagtggtaactctgcagaatataacattagtgatttagttggttgcatatttaccagttagacatatcaacatgaaaacagtaatagatacacagttcggcgttcacgtcacagatataccagaacttcaaactattcaattgtgaatggcaagaaaacaagatcggaacaataagaagctgctaaaactaacgtgttgatggtaagggaaccaaccacaaaacttcaaaaccatgagcatatacaagtgtataaatgcgtgatgcatatataaaatagattataaaggcaggatatcacgagtcctctgctatagtagtaagaacaaaaaaaaatctactcaagttcaatacctaactaagcaaaatccaccttcagtaataccaggtttgatcagaataagataaaataccagcagcagattttagttcatacgtcgggacaataaaagctgccttctcccctagcaaaacattggacacagttgatgatataactgatgccaatataatcatagcagtggtaaatggcggtgaattctctgctcgaagtggcctcagtactgtttcaatagcaaaaaaacatccagcaaccgcagcattaaaacctaaagacaaagcaacacaagtgtcaggagagaataaagaaaaaagcattggcctgaagatactggatgttaaagagatgaaattgcaaagatacgtggtacaacaaagatctatagtattgtatttgtagttccagttgcttgcagaattagtttatcttccttttcttgttaacttgtactaacatcttataatgctaaaaggcagtgggaaacgattccaatctgttgcaattcccagatgaatgtaaaaaaatcaaacagatgatgattatttaaaattacctgaagcaatcccagcagctgatccggcagcaacaagagcaattctccgttccctattgttctccatcatttcagcacatccatatgcacaagatttaccaatatcaacgcttggcccttctggccccaatgaacatcccgtccctagagtaattgcagcttgtattgctttgattgtaggaaaaatcgcagccatgaaatcaacaccttccctttgagatgataatgattgttttatctgctcaaatatctccagtaatccgtgcatcataccaacaacaactccaccagtcactggaattaacaatatcctatgccatgtatcagcaagtctctggaggcgaagccaagcagctccctctgtgggtgtgcctgcccatgcccattcatgtatgatatgcacctgaaaagaatagttagccactattgaaccagcagattggtatatgagaaaagtacaaacaggaaacttttggtttagaaatgatcatctaaacttgattggatagctcccgcttaacagatctaagttatttcaaggaaagagccttttctagtaactttaagaaatgggggttcgattaattgcagttcagtcaaagtaaaataggcacatactgtattaacccggtaggacttttctgagtttctatctgatcaattcagatctatgaagtattcagagaacacaaacaatgcaccaaaattgccagcaagtagacataatctagtaaacctcagcagattataataccacgcaagattcgttttcacctaaacccatgccataagaggaagactttaactagcaaagacctcatgtttgtatcaactatccccgtggcatcaaatttcacatgaagaaaatacattatcatctccacgaaacaccctaaacggcaggataaagtaaatgtacagtccatattctcacacgagaaaatggacatttagccacgttcaaaacatggcttcgctagaatgccatcccgaaaacgcgtttcgctaaaatgccaatatgaaacgcgtgctcactgccactttgccattttagcccttttgtgcattttcgaaatcatttttgctcctccaccgggcgatgagacaaaattgcccttcatgtcctccgtcgccgctgttgaggaagaggagctcgtcctcgctggccaatctccatgtccaccacaagcagctcaccgtcttcctcccagacggcgaggtggccggcgagtcttccgacatcttcctctccctcgacctcgccacctccgccgactacctcgccgcggtcgacgacggtctccgacgaggtcgcttcactgcggttgacgacggcggctagggtttcgaggcggccccatgttctcgccggtgacggaggcgaaggggcggcccatggccttgccagtgacgaaggcgaagggggatgcggtggagaggcagcagcagctgctggtgagcctcgccggcaacagaggcggagggggacgcggtggaaaggcagcagcagttgctggcgagcctcgccggcgatggaggcggagggggacgcggtggagaggcagcagcagttgctggtgagatggagcgcaagcctccgccgccgcgaggcctccttgacgacctcgcctccgcctccgcctccgccttgttggtgctgtccggcggcggcggccaggggcagccgccggtggttccatcactccgcgcacccgcacacccaaatgccctcgtcggcagtggcggtgggctcatccagcggcgttgccggccatcccgccctcgtcgacggcggctacggaaggggaaggatggtggatggaagggcattttcgtctcattacccactgaagaagcgaaaatgatttcgaaaatacacaaaagggccaaaatggcaaagtggcggtgagcacacgctttatattggtattttagcgaaacacgttttcaagattgcattctagcgaaaccctgttttgaacgtggctaaatgtccattttctcattctcacacaaatcagacaagaaattcctccaaaacaaagtgtacctacatattgaagggtgctatatacagcattgcgtttattcattgcaacctaaactgtccagtagaaatcccctgctcatatatcccatcccaagcaatcaccttaaagatatagatctcgcaagaataccagacttttcctagtctaaggtaattaacgttttttttttcccgcaactttccccacgcagatctctcacttaccccgcggttgaacgcagcgacgcagatgccggtggcgaggccgaggaggcagccgacgagcagcagcgcccactcgggcggcgcgccgtccccgagctcgtcgctgtcctcggacccgggctccccgccgccgccgcccctgggggacgccgccgcgccctccgctgcgtggcggtggtgccgcccccggctggacagccggcggtccaggctccgcagcagctcgcgcacgcggctcctcctcggcgtcgacggcgagtccgggtccgccgacgacggcagcgcccccgcccccgaccgcagcggctccaggtcgctcgcctgcgccatcatgccccgccgcgtgcgagcgagggggatctagaaccgaggcgatcgcatcggagtaggggaaggggaggatctcgcggcggatctcgccggtggcctcgatctcgtcggcggttgggggtggcgatggcgagaggtgaggtaggagaaggggaaggcacgttcgcgcgtggcggtttttgcagattagccctcgagagagtttgtagttgcaattggtgggtgggaggtttggttgggccgggttgcacttgggcctagtggacacctgccaggtccattcactatggttggcttaggttggcataaaaccacttgaacatgttctttttttttcaaaccattaatcacttgaagtttgatattcacctcacaagctattttgtcgcaaatacccactaccctacttagttttttttttcaaaactcaccctagtatgcacatgcttaaatccaatcaacatttcgtaaattgtgagttatcaatgtggtcgctaccaaattaaatacttctacaagtatagtctcgatgtatttttggagattccacgagtagaattgccaatgaaaatttaaatgtcgcactgagtttctctatataaaaagaaaatcaatgaaacatgaaaagtaagtctaatacaagtacttggataagatgactaaggtagtttagcctatgggtggctctacattagtgaaaataagatgaggttaagcatgtgccaatggggtggtctttgcaataaaactaaataggggtgggcatttgcaacaaacttacctatgtggtggaatgtaaaacttcagacaacttatgggtgttttttttatggctttggaaattggattgcagagggaaaatatcgatattgtgcttggattagcttcctataaaatttttttaaatgaaatttagtttttacgaataattttgtgcttgtttacttaccttcttagcaatcatgaaaataaacctatgcactaaagtggcgaagaaatcataaaatcgaatttcaaattttaaatcaacgatggtatttgtttcctgtgtcatgacgaaacagtttggatgttttgcaatattttctgttttacctgtcccacattattgcttggagtatttgcttagcacgtcataatttcagtggagaatccacataaacattggtggtcattgttgcgataaaaaggcgtaatatttcactatttcagcatgtcgtcctgtcactattcactagacgcattaagctagaaaggagctttttttttctttctgtggttgcaaaccaagcgtgaagcaaaaactgaagtattttgaccaagaaaaagatgtttcactgctttcagtgatcagtcaaagcattgctttcccaggaaaaaggatgaattgttcggtgaaatgtcactgaaaaagatccctggggtgctcatcagacgttaccatttttcctgacaatcttgcctcaaaagatgaatcaggaagcaaggttgttcatttgatgtaattgtagccatacatacaaggaaaatctactcaaacatggaatttatggacttatatttcaggcccagattagaccatgaatgcaggattatgtacatatctttcatccaacagatgagattagtcttcactcacctggacaggttactggacactgttctatgctgaatcttgaaagcttgaaaatattagtatatactgctgcatcaagcgtatgactgataataagtatactcatatggagaatcctgacaaacaaaaaacatttaccaatcatgcagattagattagtcaataggtgcaggttctcagaaagcatgaacagcttgagaacatcttctgcttatcagctagagacaatgcttcgtctaaatgaactgattcagtgaacattcttcaccaaagttactatcttgatgaaataaagccatttccctttctgaaagttgaatccagaaaactcaacagtaaagagattaaaagttttatgaaatagtaactgaactgtactgtacatagcgactcaagttacattcatatggcaccgtgaagcttttggctatcatatgaccatcactaacaaaacttgttggcgtcacagattcagaaatgccgagacatgaaaacttctgatcaccctctataagacagtaacaaaggaatacacatcagtacattgcagcaactcacaagggtttcagatatgatctcaaatcttactcctgtatctgaccagctttgccaatgtctcttgagcagccagtgtatgggcatgaccatggccaagcataacagtccggatgctaatgcaagtcctgcacaattcttcgccggtgtcaaacagcccacctcggagcaacagcttcgccctcgtctcgagcagtgtcgctttgagcagcgtcacttcctgccagacaaactcatcgacacggtgattcggttgcagcttcttcctccagcaaagcgacccacggttcaggtcctggatccgcgatgcgtaagacttctccacctcctcaaggacattggtgcacaccttgagcagttctaaagccgagccgcaccgtgagaatgtcatgaaggagtcaattgccaagggaagtgccgtcttccttatgaaatgcaccatgtcgactgccttgagctgaacagaaggtggttcagacttgaaaccaaacacaaggaatgcactagcccataagtggtccgagtacactgaggggttaccagccctcattacgccgttcactgctgcagttgttggtgccaaacctcccctaatcttgccaaagagctgtgttattgggtggaactggatccagcagccaggatgacgagttgcctttcttgccagcccaagcttgacaagtaagagtgctgactccacctcagcttttcgaccatgtggagctagaaagcaatgtgtgccgcatagaaatgcagtcttcagggattcacccaacaggtgcatactgcctttcattggtagcttgctcgctgttgcagctaatagcgtagacgacacaggagcaggagctaaccaagaaccagcgataatcatctttgaggtaaggcttcctccttttgctcggtccatcaatgcaaaacaaaagaccaggacctttattaggaaagaattgttacgacagaagccatcgtcattggcaccaagtgggaacaaactctcattcagtgatattctctcgacagcctcaaacagagtggaaggtgtaatcatgagctcagacagcagtgaaccaacgatccacaggccaaagctcaaccgacctaaccgctcgtcaagcttcctaagaacttccatttcctcaggcggatagtcattcttctgcttcccctttatcaatatcatggcatcattgtatgagagctgtggcagttgcatcggttcaaggttaatcacacgtggtaaacgtgtggtcacaatgacatgtgtcgctccagtgttcctagggatgaagtcatggagatccttaccttcccaccaatccctctcactctcaaggttatcaatgacaagcaagtacggcacgtcgcggaacagctcccgcttcaccctctgaaaagcatcaaactcctgctcctcaaagctcctgatcctacctctctccttctcagcctctgcactgatgtccaatcccaaattcatggataaattgagtatgttttgcctcaaataccgagcttcacctccaatccacaggaccatcttgtaccgctgtgaataccggtaagcaaattccaatgccagttcagtcttgccaattcctgaagaaccagtgatgcagagcacactggcactgccatatcctttgctgttgcaccgaaaccttgacctcctgtgctttgatctctgcttctgaagatttctccctttacccgatgataactctataactggatcaatccaggcctccaatgtcggctccttgcacttgcgcatctccaaactgatatacctggcattcgatgtcctcactgtgtcactctcctcatcagcaaacccatcagacacaccactcgatctgtcattcgcagcggaacccctcgggcaatcaacctcttggatatccaccgtggaaccgaagaacattccttcaatttcacttagctccttctcccttccaacgaaatgccggttccgcggaaaaggcattccttcaggcccttcactctccttctcagcaatgctcttcctgccaagcttggaccgcagcaaggtgaccgtcttggacacgcagcttctccaattggtctcattcgcctcaagcttaaactcatggcaccgcatcaatccttcgaacgcttccttcccctccttatcctccaatttgccgtcgaaaagccccgcgatctccggtggctcggtgtcgaacagtatgggcaccaggttcttcttctgagcaaagaacctgatctcctcgaggctgaacggattgaggaaacttgacatggtgacgactatgacgccgaatgcgacggagcagatgatccggtcggcgatctcatggctctgcgtgtcggagtacttggcccggtcggcgacgaaggaggcgatgccctgcagctcgagctccgacttgagccacttgcagaaccggccgaggctgccattgccgtggtagccgatgtacacgtcgcagctccggagcttggcgttcgacgacggcgacgccacggagccgcgggtgaaggacacccgcggcacggggaacgagaacgacacgcgcggctgcacgccgccgccgcagtcggagaccttggtggccgggtcgatgccgccggagtcgtagcgctcggacggcggcgtccgcgacgcgctcggcgcatcggtgtcctccgagttggagtaggacgccggcggcgacggcgccgccgcttcctgcggtggcggcggcgccgcagcgggagtcgggggctcgaggactcgaggcgagatgtacggcgactgcagcgccgacacgaacgcggaggacggcggcgacggcgagtagaggtgcggggtgatggagatggccggcgagatggggtttgaccggtcggagctgctgctgaatccgccattggtgcggatggtgagcgacttggtggcggcaatggggatatccttgggcacatcaagaaagctcccagcctccttctcttcctccatggctaccaccaaatcacaaaccttggcaagcaatctccaatgcactgcatgatcttgtgctcctcatgttcctatcaaaagatttgggggagaaagggaaacaaaacaacagatttttgtcacaaaatcgatgaaagagagcaaatggagacatggagtaatcacatctgattaaaaaaaaacaaagaacacaaagaactgttctaataacctgcagattctctgattgattctcaacttgattccatttgcatccaaaaaaatgtgtaaagaaagaagtttcaagagagaaaaaaaaacttactggtaaggtatccttcaggaatccaatgccacagaaaaaccactgataatatcaattgttttctgcagaaatgcagaaccacttgctgatgaggggctttagcttcaagaaccaagaaaaaaaatggcaaggagagactggagccggatttggaatttaaaaaagaggccagcttttcccactcaagccattgaatgggacgggtataactataactatcccacctcctgtgatctttgtcctaggaggaggaaatgaagggtggaggccccttcatgacaagcaaagtacaggttcagtttaagggccctcttcctcccttcatatgaccaccacaaaccctaaaaataaataaatgtgtgagtgtggcatcaaaaggagcaagtgaatgtggagctactactagtgctagtgctagtggcacacaactgcaaggtgaagtgatgaagaagaccagcaccatttccaatggtgagatgcaagccaaggccaaaaaccaacccaccaaaacagtacagctcaactgcagcagcaatgccaaagcaggtggaaaaaaataaactatataaaacacttttattaggaaaatttttatatatgtgttcttacctgtttaaaggttatagctgaaaaaataaactataatagaaaaccttaaaattaactctaaatgtaagtttaaaatttaaattttgatcgtggctgataagacaacgtgaagacaataagagtttttcttcatgtccatttgagtccaatattccgtttaagtctcatcttaagatgtacctcctttgtccaaaatgatttaaattctaaagataaatctagacaatttaaatctttttggacgggagaagtatgcacattatactttgtgcacatcctgataggagtgttgttgcatgccactacaattgatgcatgctccctatattaggagtattcaccatgtaggagtagattcagcaaagcaaagggtgattcacatctgaaacagtgctttcaaagtgggggtttggtgataaaataggctagtaagaccttgttttatgtgcattggagggtgatgaccacacactgtgtaactattttacagtgccccaagcttaggtagcaacttaaataatggtggcaatgcattagcctttgggtaaaaaccctaagcaccagtgggacagcatcactgcatgcaatgtgcagggattagggataggaagaggatgatagggaaggagatcttgatcttgcagaagaggacatggaatagtgctactgtgctagtgagagagaggggcagccatggcatggcctcaccttgttttggcctagaaatctggacccaagggagagaaaccaaagaccagtccaactgctgctgcagtaagctctgcacttgccatcaaatgctactatcgctccacacagttcagcagttcatccccacaaacacaaaagccttgttggtttgtctaataagctaaagtaaatattaaaatttgatttttggaacttaatattaaaattgattttaatatattttaaacatagtttctttcagtattaactttcaaattactaagaacaaatatataaaagttttatttataaattaatgtttatactctaataagtcgttttggtttattaggtaataggagtaaccgatgaggcttaggccctgtttagttcctaaaaacatatgcatggagcattaaaatatagattaaaaaactaattgcaccattagggaggaaatcacgagacgaatcttttgagcctaattagtccatgattagccataaatgctatagtaacccacatatactaatgatagattaattaggcccaaaagattcatctcacggtttatagacgagttatgaaattagttttttcattcgtatccgaaaataattttcgatatccagtcaaacgtttgatatgacatctaaaatttttttatttcaccgactaaacaaaccctaaactctctctctagcacatgttgcatagcagacgtggcagagcggcaggtgatggggttgagacatttatgatttgattctatcctgccctttcctgttgaccaaatgggtgataccctaaaggtcatggatccggtcctaaaggttttctctttctttcggtggcacagtagattgttgcaattagcgggaatgtttttagtcatttgaaactttggggaaaacattttgagcttttcgtttttcaaatttcctagtactagtagtaccatgtagtagtaccatgggacggaggaagtgctacatatctgctatatgctattcgtcccaaaaaccagcgtagtaccggatataagatattccagtactaccaatttaaacatacatatgtccagattcatcgtactataatatgttacatctagttttagattcgttttttatgagacggtggagtatacctcttatttgtctctccacagacatcgttaattcctttttctttttttttcgaggacatcattaactctaactagctgttagtgtgtcccaatcctccatgtcagctattatccatagcattaaatatattgtcacataaataaaaatataatgtagtaagagagttaataaagagagataaaaaaataaaaaaaatcatttctcgtgcaagaaaccatctctacaccagaaccaaaaatgaaaacatgagaataggtggataaaatgagagagtagggagatgattggatgaaaatttaatttgaagaaaccattcattgtatatatagttctatgtatagtgtctgtatgactagcaaatatgaagactattttgataatttctgggttaggaatggccttagtttgcagtggtacaaaacgagtacaaaacactttggttctatcatccacgtaaaggcactggacccatcaattatccaccaaatatcaaaaaccaattatcttatataccaattgttaattacaaattaacaaccaaaacacactaatgtccaattttcacatgcttggctttataaattagtaagaatgcaagatgtaattagcaataagaataataattaagattgatttaacgaatgatgccatacgtcggccccgaacgaccactagtgtccaactaacatcagaaccattcttgagcatgatgatttaaatgaagactgtaatttaaacttttgctagtcttatgctatacctccgtttcaatatataagacggatcttatcttttggatattacgtttcgtcattcattttattttaaaaaatatgtaattgttgtttattttgttgtggcttattttattattaaaggcattttaagtataatttatatttatatatttacactatttttttaataagacgaatgataaaacgttaggttcaaaagccaataacatcttttttttaacaacggagtaattacattagcgacttcgatataattaaatccatcgttcgcctctttattcctcaaataatgtaccattcatgctgccatgcacaaacactcaaatctgtacgtatagaccacaggtttttgaattttggtgtactttgtttcttcttgaaacatacggaaggatcgttaatccatcttttgatcagtaaacagtacaaacggtacagccaaccaagcacagccaggaaattaaactgcctgttaactggatgaattcatggagatgtttctgtacgtcttgcagtataaatgatcattcaattctaaagtgttttgaaattataggccctgtttggaagattagcccagggctaattttaagagctaatgtttagtcatgaattggtaggctaaacattagtctaaggtggcatgtttggatccatgggctaattcaagactaaaatgtggagagagagagagagtagaaagagaggagagagaaggagagagggctacctttttatggtacctgtgcaaaattagtcccattagcaccccttggaggggctaatgttttgaggggggctaattcactgtagccaaaaattagtatacatgtttggattcttgagggctaattcatgacttaaaagtgggggctaatgtttagcccatgaaaccaaacagggccatagttagcaggagcactttttaagctcttgggaaagaaaaacaacggctcacaactcaccagctccaatgatagctgagatggcatgcactttatcccaaaacacggtgattagttgggtgctcctctttaatatttttcatgtgaacagtgcgtccggccgttccaagtttccaactggttaattatattaaatttcggccagatcatatcaagcaagagcatttttctaggataatatatatgcaaaatgaaattctgctagcctcttctgcatcaagcaagagttgaaaggataaaactgcattttttttcatcggtaaagtgaacaatatgtcgatgaataccaagcttatatgcgcctgattgttgaaacgaagcatttgctacatgcttcgaaaaatatattctctaaaaaaatgtcctaatgcattgcttagaccacttgttttaaattatttattaagtttatttatcaaaatatttaatttatttttctgggtcgataaaaataacatccaaaatcttattaagaaagaggtgaaaatttaattcatccatataattaaatagatatttcaccgcaaaaatcaattcacgccgtgtttagttacaaagtttttcttcaaacttccaacttttccatcacatcaaaactttcctacacacacaaacttccaacttttccgtcagatcgttccaatttcaaccaaacttttaattttgatgtgaactaaacacagcctcaataatccatttcaaaacagagcctctgaaccaaaaaaaaaacatccatttcaaaacagagcctctgaaccaaaaaccagatataccataattgcagttttcagatgtcacggctggttagctgttgctagaagagtatgggagcacacacacaccaggtgtatgggcccatgccgtcattaggagaaggtatatggaatctgctacatggaccaattatatgttcagtccaagagagtaggcactggctagttggtatataattttgaggatcagaatccagacatgatggccatagaaatcaggatctgggtctcctgctttcaatgtgtgatccaattggccctccctgcacaagttgaagagagtgtcaattctaattggagctgtgggaattgattcataattgcaaaggaaaagagctcctgattagcagagttattataaagactctcatatggctggcttaacatacatatttagacatatataacttgaaagtatgtagtacggagtagtacctgtatctaattaaaatgtagaaagtgtgtaaacttgtgtatggtgatgctaatttgtgcaaaacaaatagtactggtatgtggtatcacaggttcaggagctactctagatttacctcaaaactgtttagatttaccattcttcaactgacaatgcattctgaagtttaacaaactaaaaagccattggatttactcctgtgaaacataccagatggcagctagcggaagcattacaaaatttcagcaaatataatctgcttccatgttccccatcacactggagaaagagcacctcttgtgtccaatggaaggtccaatcaatccaatccatccatcatgccatttgagaaacacactcaggtgacaccctgatccaacactagtctaccacctactccatggaatgcctctcctaatccaacactggtctatccatataaaaacacccctaccaccaacaacaaaagccaactcaagcaaaaatgaagtagaggtagtagtactagcataggaactactaaaggcaagttcagctcttgccttttgctttgcatgagtaacctgaaagcctgaaactttgtttcaggtccagtcacttggattggttccaactccccatctatcaacccatcactttctttatgcacactatgaccactgatctgcatttagcacagtcttaactcctcctaacatcaactatctcaggttaacaacaaaaagtatttaacatagtactaccatggacatttcgggtgcaaagagcagtgtaaggtgatgatgatgatgatgatgatgcagagaacaggctgtgcggtattgcagaattaccaactgacaacagctttgcttcagcattgcaaccaactgagagcagcatcgcagaattaccggggatcatggcgtctgaatgtgcggtgcctcgcctgaatcatgctgtagaaagagagcaagagagagcagtgatgtcctggaccgtagcatcatcatcatcagtacccattgccatcccatgtcgtgtggtttgtttttcgtttctttgtcgggtgatagtttgtaaagttgctgtcacaatgtcactcttcttcaatcttaatacaaaagatgcacaatacttctgtgcattctcaaaaaaatcccatgtcgtgtactcgtgtggtttggcatcgcgctgcttctgaaactgttgcagatgtggataatggatgtggagcccaatcaattggcaaagagctgattatgtgttaaatggcttagtaacgaattattattattattattattattattattattattatgtataaaatatttatatatgtgtccttggcaacttacaaattaatactgaaaaaactacaggcctatttagattgacgacgttttcaatcatacaattatttggtaaaattgataattatgtggctacgtttagtttgttaggcaatgtgtatagaattttgacaacattattaagccaatcctaccaaaattttgacaatgctatcaatttatcaaaattttggcatcatcaaattttgataatgctcattttggtaccaatccgaacagatcctacattgaaaataatttagcttgaaaattaatttttgaaatttaaattttgacagtcgtaggacaaacaataaggctacactggacgggtttcatttccatcttctcgcccctcgcatcgaactgccgttttctcaattatacggaagacgcgcacatgccaccacgcatgcacaaaagcatgtaccgcgattttgatgggagcgctagccatggattccaatttcatacccacacaaacagtttttttttcagctgagatccaaagaggataattgtactgtactactctctatttgcatccgtagaccgtagtagtctttcaaactcaaaagttcccacatgaaagtggggtttatgatgggaggtgcatcaggcaagatgatcggtgcatcgggctggagatttgaagtcctcttgtactgtttgtactcttgtatgcacggatcggtgtacactgctcgcggattcaattcttgcgcgggcggcgcggggggggggggggggggggggcatttgtacagcattcgcctctcgttccattgattgctcttcttcctagccattgttgggctgcagccttatgggcctgacctgactgatgcaacaatctcagtatatgggctgaaagttatactgaaagttcaagaaagatgttgtgacctaatcctcacaaaaaacagatccaatactaaggataaatttgtattgtatgacttcagaatcatccctggaattatgtttattttaagataaagggagtatctatcgcttatatagcaactggaattcatctcaaaatcaatatgaaaggaagaaaatagaaaattactagaaaacagcaagtgaaaaaaaaggcacttttagaattccagcctctcctctaattaaacacgcatcaagctctaatatagtagtactagagtttaaaattttggtttggccctttctatcgcggggtactaatagaactgtaattttggaatattttggtccaacataatttggattcaaacaaaatttggtctagcaatttcaggtcaaatagtttaaccacgggagcagggcgggctgaaattccattccggaattttgaaccctgagtagtacaattgatgctatactgaccttttcagaaaatggaatgagcatccctactgcaactagtacattcgtatagatatataaactcaaatcattcaaacgatccatgcattactagcacagcacattcaaacaatcatttgcagtaattgagaagtggattaggaagcatcttgaacaactaaatttgcctcggaatgcgctaaagagaggctgctctatttgaggaggctgttgtctcggatgttaatttacttctggttgtccatacatccgtggccagcaaaatggctctgtaatttaggatattgcttaggcaatggattgcaaaattataatctccgagtgttgcctgcttttgtcatctcctgcttagaacctcgagctgcttgtcacggcatttcgtgaaccgtgggatttgtcgtcgttttgacgagcaaatcaaaaacttggtgcaatcttttgtgattagttcactgcacagcagcagcagaagaattcctagcctatcgattaggcctgttctgaaattgtgatggatggaattcagaaattctgaacgtattgtgagagaagtacagggtacaaacgttataaaagtctaaaaactgctacgccaaattgacttgtgcgagcacacctttaaaatacatttaccttctaattaaaaaggctgtccagtattgaactgggacgataacttattcttctcataccaaaaccaaaactcctatcaatactgaaaatttcttgtgtgttttttaaatttttgctttattctttctatgtctctgagttttgacttattccatagatatccacgagtctgtgtttttcctctatatgcatttggtggacagttagacttttttttaaaaaaaaatgaccatattatccctcgccagtacataagctctagcttcttattagagataccattattaagtttatttaaaaacttcaattataacaattgaagggggcaattgtttgatccaaaaattgaaaactaaaattttaaatgaattgcaataagatttgattaaatttcaatggaggggaaattacacggagaaccaatttcttttgattttgtcctcttcctatatataccaaaatttgattatttttttacctactttagccaggtttgatgaaattacccatagaaatttcgtcaggtttggttgaaattcatttcaaattttgatttccaaatttagagtcaaataattctcccattctaccttttagaaccagatcgtattcaacttcagaattatatttttttaagctaacacttaatgtgcaagcgaggggcaacaaagttaatctataaatataaatatatatttttttgtagggatataaatataaatatatgatgaccaattcactcacaactaatagaaaatacataaagaggataaaaaaaactcaggagtatataaagaataagatagaactaaggcatagaagggtagagttttttcttcctcaatatagagaagatgacaaagaaagaactccaaaatggactgcaatatatttttttgaacgattatagactgcaaattacgggtcctaattaatcaacatcacatcacttcacttaccaacatacgtgggaacttgaccgggacttgttgccgacggaggccgtaaagctgaccaccaacgacgacgcgagatcgctggccgtccgatgagcatcggacggcggagatgaagcccgtcgacacggcggagtgagcctcccgccacacggtcgacttttcccgtcttgcccgttctctcgcggcgctgcctgccttctctttttttccaccgatgactcagcagcctatggagtatggacccgtacactgcaaaatacccatggtttgggcataaacaccggtaatgccactgccaatagcacacagaaaactggagctttaccaatacttgtgccgtctcttttggaacaaatgattttttttatggaatttctgagaaatccgattctacagaaaattttcctacgtgattgtttgaatcataggaatagctataataaatatcctataaactttctttgaattgactcgaaacatagaaattttgggaaaaattctaacatgggctttaatctcttagaaaaatcctgtcttatatattccttatgattcatgtgtttttcctatgctctatccaaacgattattcctaccgtttttatgtgttttcttaccggttaccaaggttcacaactttggtaaggaattaaaagctgctcacaagcagtatcttcaggtttttttttaaaaaaaacgttgataaattgacaaaaaccaatgaaacctttataaagcttgtcaaaatttaaatctcagtatttttataatggtttgtttatattttcgaccctatctgaaaagatcagatttgatgaaatccaaaccgattttcaacgggattgtaagtctgctactactgcaaagctttcagtttcaggttttgtgtcaaacatcgcaactttggagtagacatacgtattatgtgcacgattttttccagcatggaacccaaaaccgacacatttatgaggctcacaagtcacaatctaggacgaagagagccttctaatagaaggtgtagaaagccatagaattttatggcaaagatgcaattaaccaccaaaaccgaggactactggatgttcaaacaggggttggtgtggtgtgcatctcacagtcagtcagtcccaaattcttgatctatcttaaattaaaaaccatttgttgactctataaccacgatctctcttctgcttggaattctctatcctatttttcatctcatattctaaccattgattatgccatgattggatcttggcacagtgctctgcatgtgttcttgtgttaatcagctgcccctaatcccctaggagaccaatctactgctgcttagctcctgatacaaatttgcacattgcccggtgaaaattcagcaactgagcaagccaacaagagcctgggtttctgaactctgactagcagtttcatcaggtaccaaaaaaaaaaaaactcatcttattccctagttgagatcatcagtttgtttctgaacatttttttttttacattttgcggcgttgatcagattggtttgagcttgggagagatcgatggggtgcgtgtcgtccaagatcctgagcaaatcagggagcttccaggagaaggtggtgagccatggattcaaggggagcaacctgatcgaggagatcatcctgtccacccccaagaagagcaacggcgatcagttcttggccctcctccgcacgtccacctcgtcggcgtcggcggcggcgagcagggccaaggacgccgccgatcagagcaccacggcggcggcggtggccgccgaggagtttgtcaagatcgagacgatcaacgtgtccgagctgctcgccgggctggaggaggaagaggaggaagaagaacgcgacgacggcgagaggtgttcggctcaggcgtgcgtgctcgatggcgcggtggcgacgccggcgagggcgacgagctttcgcaccgtggaggagttcgacgcgctggtgacgcggagcggctcgtcggaggtggcggaggcagcctcctccgccgatcaagacgcgacgggcgccaaaccgtcggagcaagaggaggccgccaccgccgccgccgggaacaagaggcgggcgagggcgaggcagctcggcgagctgaaggtgccactgccaccggcgttcgacttctccaagtccggcagcctgcgcgactggctcctccagggcggacagatattctccccgggctcctacgtcacccccaagttcgggacgacctcaccggcgccttcgccgccgccgccgcaagaacgtggaggagtactccacaacgccggcgagccgcagccgcagcacaccgtgtttgatcccgagctggtcgcgcagttcgagcaagccatggagcggctgtccgaggacgaggagcgcgtcttggagaagatcctggaagccatgggagcggcggcggaggaggaggaggaggaggaagcgacggcgacggcgacggcgaggctggagatgccaagccatcggccggtgatggtggtgcaggagtaggcgacggttttggtaggtttttgcagccgcgcgtgtgtgatgtgatctgtaattttaaaccctgtgcttgcaaaatgtaaatatgaatgtgttcagtgatgatttctgtcgtgtctcggcaaattccaattcagttcaaattcagtctgccaagaggacgatgacgaacacatcaaatgcgaaaacgctaatccgcgaccagatttatattagggaaccatcgatgcatgtagcagaatctgaggaagatcttgggccaaagaagcatctggatgcgaatgggtttatagttgagggacacaaagtgcacctcttccctctccattgggtgatttagctgcagaaagtttacttgaggtccctcaaaaaataggggtcagaatcacttcccacaaccgcaaaacagatatatagtaccctcaacttctaaaactagtgtaaggctgtgtttcaaagtgagtgttgggaacccatctcccatacacgaaaaacggagtggtccattagtacgtgattaattaagtattagcttttttttcaaaaatagatcaatatgattttttaaacaacttatatatataaactttttacaaaaaatgcaccgtttagtagtttgaaaagcgtgcatacggaaaaagagagggaggtgttggaaacttgctcttgcaaaaacaccctaagttgagtccctcagtggtttttggatagcggttttggctgacaagacgcttacgttgtgtgttgacctagtcttgtcttatgtgatgccaaattgatgcttacaattaaaaaattagtggagccaacgtgtcaagggttgtcttcttcatccaccctctcccacgacttcacctctcctggccaatggcatggaggccgagatccatggcggcagcattgccttgtaaagttcctgtgtcgtcacgtgttgccacagcctaccaagctcccgccacaaccatgttgaggtctcccgtcaccaaaccgctccccccctctctctgtccgcttgatccgaagcacctcgtctggctcctgacggctctttcctctagtcgtcttcctctttccaaggccgagcttagcctccgtgccaccgtaggatgtaggtgatgctggcaggaagcgagtgcgtggagagagaggcaaggaagccgacagcggtgaagcacgagaagacggatgggtaggaggctgcaacaaagctccctagggcctaggctgtggggtgggccctgtgctccgtacttgttagactgcagttacccctaaatctcaccatcctcccaccttcggcctctggacctcacctcatgcatcttggcggccctcatcctaaaggaggatggtggttggcggtatttttgatcaagtgatgaaacaattatatataagtgacaaaacaatatcaaaattatttaagagagaaatcagatgtcccatctgttgttagggttgaaagtgattcggataattttcgtccgaccggacattttttcggattcggatagtttcggtcggatatatccaaaaattttcaaattcggatttttttttcggatatgaaaacgactatgatataggtgatatctgtcggaatctgatatccgtaggatattatccggtattttccatcggatatccgactcacacataagactgccatagaggaggtaaatcacacaaaagctagcccaacccaaagaggaggtaaaacagacttcttgacaaaaataaatttcgaattgaattttatgatattaaatgaactcatatgaaaaagttataaaaaacaaagttgtagaactcaataagatctaccaattttattttggtcatttcttcatccgagtttcattgaactatataaaatttgatttttaaaatataagaaattcaaataattcttcgggtagtaaatgatttcaaatggaaaaaaactatcaaaaacaaagttgtataatttatcaagatctacaacttttattctggtcatttttctatatgactttgtttgaacggtttaaatttgaatttgaaaatataacaacttcaaacaacattttcaaatactaaatgatttgaactaaaaaattcatcaacaacaaagttgtagaactcatctagatctataacttttattttggttatttcttcatccgacaaagtgatattaacattgttcataaaatttacatatctctcatttggttttataaattataaaagagatatgtaaattttgtgaacattgttactatcactttgtcggatgaagaaatgaccaaaataaaatttgtatgtcttgatgagttctacaacttttatgtgcattttttcaactgaaattatttactgtttcaaaatatcatttgaagttttgaaattgaaatttttaattgataaaacaaagtcacgagaaaatatggccaaaataatagcagtaaaaacacaataacatgatagagcatgattttagaaacatttaagaaaaagaatcatccaatttggagttcatatgagtgagataaactagtttcaaatttttaaattttattttcacatacgactccttaagacgcccgtgtagaaaaatttgatttttccatataggctcttaagtggtccgcatgcaaaaatgagctcattttggcatcttaagtaggggtgggtattcggtcagaccgaaaattcggtattggtcttcggtcttttttgaaagttcggtcatctaaagcgcaagaccttttggtcttgaaaaatgttgaagaccgatcaattcggtctcggtctcggttagactgaaatttcagaaatatttagaagaatcgcacaaatcctcaatgaatttcagatccaaaaatatcatacacataaagaaaattcataaaaatcccacatcggctttcttcactgtcatatactcatcccagatcagatttggcgccgctcgtcgccgtcggggtagaggaggcaccatctgatatgcccccggggtggagccatagaggaccgcagcttaggcttggcagttgggggcttgaggcctcctgcctcggggctccggcagcatgggcgcaagaagaggaggtcgtcctgatgtgacttgtgaggaggaggaggaggcaacgtggaggagaagatgctgggatggtgcagaggtgccagcgatggaacatgatgccgatgtgcgagagaaacagaaaggagcgattgggtgaaaaaaagaagaaagaagcgctctctcctgggtgggtggggagagcgtggcggctaggtggatgaggagaaggcagtagagagagctagggttttacttgtgttgggcttgctttcttgggctgatattgtgctttcaatgaaattcggtcaattcggttaacagagggtgatgactgaaatgaccgaataaaattcggtcatctagcacataagactgaagtactgaccaaatttatcgatttcggtctcggttatttcggttcggtctttttttgcccacacctagtcttaaggagtcgtatgcgaaaatgccgacgcggcaagttgtggtccatttgcaaaagtcatagggtcttgtacacaaaaaaccgtttgtgtagttgaggggtttttatattccgattaatatttgtcaccgtatttgtattggataatattcgatttcgttttcatatcgatttttgatttcgaaaaaaaattatgaaaataaatatgatagagctagtttccgatcgtattcgatccattgtcatccctatctgttgtctcgtccaaacaagcatcttacgttttctgcgtggttttggcttctgcccacagtttaccacagcagcagctattcagcccgtagaaaattcagatagccaaattggccttgttgctgtcttgtggattgtggcttctgttgaagtcttactccattttttccatctactatatccgataaatctcctgccgttttaccgtttcaaaaaaaaaaaagtcttactccattttttatcagttcgatattttccttagataatggtatcagttggatatacaatggttggtagaatagcgaggagaaaatgacatcacaacatctgtagagctagaaagaaaatccattacaattagtcaaatcagtcaagttgcggacatctgctattttctttatcccaaaatattataactagtttaaactcatattatatgagtgtatcaagataatattagtaaaagataacttttaaaattaaacatcacatactactcatactacaccttaattttattatagctcaaactagttcggaccaataattcacctagcccaagaagatagccaactccttttatctctctacttaagacttgttatatttgacatgggtggaatattatagactagaactgctatgcttcccacaaccagtctaattgcgaaagtcttcggattagatcgtctgaggtggatttttacttttcaagagcaaatagcctcatttgttgcaaattttaaatatatttgacattaaaacgggcgtatcacctatcactttatattgggtttataaaacctggcagttttcatgaaaaccagactttttgaccggctcaagaacataggccgctcagttttccaggtcaagttaaaaaaaatcaaactgcatttaaattgtttggcaaaatttgatcggattaggtttcaaaaaaaatgatcggattttgtcaagagtcaacggttttcaaaaagtttttgcaaaaacggagaaaaccactaactcatggtttttggctctagaatggttcggtgaacatacaaataatctacgatcacagctcacaggataatgttaattatttaagttcgatctacaagtgaggaactaaaatatccagttcagctccagatgtgactgcacttttcgtagttcggttaatcttctctcttctttttacacgtttggatccaagctcttctttcacgtacgtgcaggtgtagccacagatgacaccagggccacaatccattttttctacttctgttattactagatttttctgtaattatttgcatagtacatgtgtcatgtgtggtgtgtcctccgtagtactttatcgtgctcgttttgtcagtgaacagtgatactgtattctgattggagtaccatattcttttacgcccacgcgctccacgcggtaggagtgcggtcagtctcgcaaaattattgtactccctcccagcggcggacgcgtccttaaacacaaaatttatttcgagagacatctctatgtaaggcttaaacgagcaatgacaaaaaaaaaaacataagggaagtactactacacgtcacaggcatataagtatttttttgctattagtcgatgcaggtctctttcttttcttcttataaaatttactcttaaattatttatttgatctacaatctgattacatcattgtgtttgttgcaattaaatctttataacaagatcttagatgactatattatgatgataaaacatttatgttatgaattactttttattatatatgtaagttacttttatcatattatcggtgaaatgggaaccaggttacccatttacctggcaaaacaattataagtaaaataaatggcgtgcttaaactgatattgctaggggcccaccttggtaggtctcgggctcacctttacctgtttaagggataaggctgtagcctaaggtctgcttcggacccgatcttgtcctggatcccgagctcaccttaatcattataagtcctacattactaagtaagaagagcgtaaagacatacaagatttacatcttaagagaaatagactaaagactgccgcaaacctagccttacactaggtctcgggctcaccttagctcatctgggttacacattgctccgtgaaaaggagcgtagactaagatctaccccaggcccggccttgctccgggccccaggctcaccctagttattggtcacactttctaaaaggggtggagggtggagacatatgaagttattctgacaggattgtgagtcgaggtctgcctcggtccagcctcgccctagctaggacccgggccaaccatggtctttgtatggttcacattcttctacaaagaagagcattgaaacatataaaatagatacattgtctactcatcaaagacatcttcaagaagctcgccttagaatagatgaactatcatcatggaaagcgcgagggcacgacctcaggaccggttggggagatggacacgttccacgagctattgtgaagcggtcctctccgccataaatgaaataggtttatggagagcaccagctagtctagagctaaaaggacatggacaagacacatgcgctgatttattagtgctagtggcaccttggatgcgtgtcgaacatgccccatgccacctgatttagctaaacgggcataagtgaaaccgtggcgttgtttcaggcagcccaggttccgccaggcccaccactcgccacgtgctgggctagctggcgcgacccagctgtctcggacagaagcccggggtaatgcaagttttaagtcttagtggtctcttgaagactgtgttagggaaccagccagcaacgacaagacagctgataagacaagacaaagagtagatttgtaataacgtgaacccctctttgaactataaaaggaagtggacaagctacggatgaagggttggactctttagatcgatacgcttcgctttgtagcccaaaaaggccatctttgtactcaactgatctagggaagccaacgaaaccaacacaggagttaagtagtacacctctgggtggcctgaacctatataattcctgtgtcttttgcttggcgagagctcggcccccacaaatctgatctcactttgatctctttctcatgccctgcaccacaaaccccctggtcgaatattcacacttggggaggggtatccactccccgctgtccgaggaatcgctccctcgacacatatttagaaattacttttagatttgattaaattacttctcatatattcatgatgctctgagttgattacttttattaatgtttttagtcaatttcataatttgtgctgattaaatttaatttctagctagacccatatttttatccctacaatgaattacttctaatgtcgtaacaactttcttttattttgtgctaagttactgttatgatttatgtaaattactttcaggcttcattaaatttactttcataaatgtatacctaattactttcggactaatctgttgggtgttcacaccttgttatacctaattttaatggctcatgactactataaagggcaagggggtcttgaggtgtggggcgatacgggtcgtagctgggtcggtcgatccaccatgcctaataggtagattgtaacaccctgaaaaatttgaccgacaaaaaaaatcaaaactctaaaagtacggattttcaaaaactttttaaattaattgcatcatgccgatcttattcgcctattttatttggaattgatttcgaagttcattaatcgtaaagaatagttaattaggaataaaccctaaaaacaaattggtaaaataaatataattaggtgtggatagaaataagtaaaatattatcgcgaccatatttggatcaattgaatttaaatgcgatgcagtaagaattaaccctaattaaaattcaaataaattatataaataaaatatgagtaatattaatctagagtaaatccattggttggaatgacacaaatattgagtaaacttcatttatacaaaatttaggatttatagaatcaaatttaaataataaataggctaaaatcgggttaaataataaaagacactgttcattgcactctaggtgctcgacgtggtcccttaacccagcccctcctttcccccctctctctgtcgccaccgtcaccacgcgccgccgcccgacgcgccgccgcccgtcgcgcctggccgcctcgcgccccgagccgccgcacgccgtcgccatcgtcgcctgccgccgcgccgccgtcgccatcgccgccggtcgccgtcgccatcccatcgccactgccgcgccgcgccgtcgccatcgtcgcctcgtgccgcgcgcccaccgcctcgcgcccagcgccccgtacccgtcgcgccgtcgccaccgccgctgtcgctgtcgccgtcgccatcgcgtcccgcctcgcgccgcgcgtgcgtcccatcaccgccttgcgccgcgcgccaccactgccgcgccgtcgccgtcccgtcgccgcgcgcgcgttccatcgccgcctctcgccccgtgccgccgcgccgccggcgcgtcacccgcccctctctcccc

SEQ ID NO: 8571 - DNA, 103860 bp, Oryza sativa
ggggggtggaggagaggagagaggaggagtcaagactgagaaagagggggcttcggtgcgcttatataggcagcctgggggccgaggcgtgagggtggagggttccgtttgtccggtccggtctccggtctggctgcggtcggtcggaccacgtcgcgtgccgaacccggctcggtgcgtcactgggttaggcaccccggcacggcatgtacggtcggtgtggtcagaacgagatcactgatattcaggtcccacttatttcaaaggctactttttcatccatccaatatggagatattgaattatacgctacttttagatgtggcaattgactatttgccactgaatccacatgtcattaagataggtgtgacaaatagttaattgtcaaatctaaaagtgacaaatagttaattgtcaaatctaaaagtgacaaatagttaattgtcaaatctaaaagtggcaaatagttaaatgccccaatatggggtacggagtacttgctactccctttcattttcatttaggcggctgtattgagttcctctgccaaaacttttttaagtatatggacaaacatttgaagtattaaatatagactaataacaaaacaaattatagattccacatgtaaactgcgagacgaatttattaagcctaagtaatccgttattagcaaatgtttactgtagcatcatattgtcaaatcatggcgtaattaggctcaaaagattcgtctcgcaatttacatacaaactgtgtaattggttttttttcccgtccacatttaatgctccatacatgtgtctaaacatttgatgtgttggaatttttgaaaatttaaaataaactaaacacggcctcactttgattgtcatatttcaaaaaatcagattttaaaatttgatcatcacattttaaagtgaatggagggagtaatacaaaatcaaaaaaagactaaaataccactatttttatcaaatctcaatttaattattcttccttttatttactcctagtgaatttatctcatactttcacaaactccgatttgagacaaaagagaagagcaaaaaataaataaatttactctaggacgaaagcagtacaatttattactacatccgtctaatatattagcaaaatcttttatattttaggatgggtatagtatcgtattgaagttgatcattgcaaaactgacatatggatctcactttttctagggtccatgcctgactcctacagtcctacgcaggagttgcatccggcgtggtttgcaccgggagactagtttttgttttctgcatattggggaatctccttttctgttgaattgtactactgcggaccagcttagaaccgtgtgggaaaataggaaatgcttgtggaacaatcaggttggattggatttatgggtggattgggatcaaggataaatactctgtgaataaattttggacaaaaaaattggtatcagcattagtaataaacaaccaagcatgtatgttaaacaactttccgttggctgcttcaactgatatgtacaaactactagtagcattcagtgggagtaagtatgtatgcatatatatatatatatagttcactcttatcatatttcataagatttctcatgagctgtaatcaggcatggggtactgatgattatatcttcgtaccccaacttctataaaaaaaaattacggttacatagacaactagacaagcacaacccgtgaacacattagtacttattcactcacctgaactggacaccctctacctcttttacatgatttatgtgctagtactacagagaccgcaacaatggtaccagcatttatcatgccatcgatcctgccattgatcataatggagcaatacaaggacatgatatgcttaaagtgtgaagaagatgcaaaggacaatgaataaacaagaattatagagttgtatgcactctagggttcaaaatctcggcgaaatttgagcatctagagccggctcaaaatgcgcatctcgaatggttttattcaaagtttattggagttcattgaaattttgctaaaattcgttcaaaattaacgaaaaatcacttgtagttggcattagattatttttatttttatagtttgtataaccggtgaataaatggtctccagtactaatcaaatattatgatcagaaagtgtagtgaaaaaagaagatgcaggaatatgtgagaaaaaggaactgaaaccaaataagttggccaatctcatgttacttggccgttaatactagtactactccgtcgagtacacaatgaatgattcactgctatctagtttgtggttctaataaatcgaatacattatactcttcatatgttccttgtataaacctgtttgtttgtggttctgtgaatcaaatgccatatacatgacattcgtgtttgtgctcctcatcttgcaatttcatagcaacatttttctactcagtatgcctagttgtcatggtgttttcacttgctgaattgcttttctacatatttttggctcttcttgtactgtatgttcagacttgcctttaacatggataattgaagtattgaactaacatgaaaaatgtgatgtcctatgcttcttgatcaacattcctgcagagaaccaagtcataagcattgactgatatttacctgccaactatcactgagcattttcagacacatacctttcatgcttcaacttttgtatgtttgtgctacaattttcttacaccaaatcgcctgtctctgctctggaaggagcaaagcgcttcgaggtaatcagcctccccgaaatcaggccacagcgtgttggtgaagaagagctccgagtacgctgactgccacagcaagaagttgctcagcctcagctcgccgctggtcctgatgagaaggtcggggtacgggaactcgtcggccgcgcagctcgtctcgagctcgtcggcgaacagcgcctcgtcgatgtcctccgccgcgagcgccttgctctgcaccttctgggcaagcttccggcacgcctgcacgatgtccctcctcccgctgtagctgattgccagtgtcagatcaagctgtgaattgttcctcgtggtctcctcggcttctctcgcaatcttctgtagagaaaccggtagccttgagctgtcaccgattacacgtagccgaattccttccctgtggaaaaaaaaaatcctcattttgttgtccacatcaccacatgacatgtacacattagactttggcaggaaattatactggctcctgtgaaaattgaatctttttcctatgaatcttgcaagaaattcctattacaagctggtaattgagttgctggtacgcccggagcactgtgggctttgagcatctattggcgaacttccagttccacaaagccaagtgttgtgaacgcgtgaggcattaactaattatttaatttgcaagtacggatgtttacctcagaaactcggcgacgctatcgtggatcacccgctcgaacagcctcatcaagaagtccacctccacctgcgaattccaacatggcgaggacgcgtcaagctcggcgaaggcagagatttcgaaggaatcggcggcgaggcgtgtgtaccttggggcggctccagttctcgttggagaaggcgaaggcagtgagcgcgcggatgccccaggcgcgggagagacgcaccgtctcctccagcgcgcgccgcccggcctcgtgcccggccgccgacgggagcccccgcgcccgcgcccaccgcgcgttcccgtccatcaccaccgccacgtgccggggcagcgactccgcccgaaggcatccagggaggagagactcggccgccggggctgcgccggcgcgcgggcatgggcatggtggtggcggcgcggggcgcgtgctgcggcgaggggaggtgggtagctgatgggtagcagctggagagtgggagggcagcatggtgttggcggcttggcgcattgcccccaaactccgacaaaaggatgaaaagctctgcatttattaaccttttagaattgtttttttcttttttttatgatgttgtgatttcctggggaattctaaacaaattgcaagaaattgatttacaagaatactacgggacgatatctcgttcgaacggtatcgtgaccttagggtacggacaaatttggggatagacggggaagtatagtttcccgcctatcctgagagtgagctcaaaagcaaagtgagtgaaaagtatttttctctattgaacttgtccctgcttacaggatctaggtcggcttaaatgactctcaaccatacacttgagattacaagtttgcccctgagggcctacatattatcatactacccttataaagtttacaatcctaagagcattttactatattttagtggtcttcaagtaacatccagtgagagtagttggagtgatccctgttaccttcttgagacatgttcttttgtagttggagtgatccccagttaccttcttgagacatgttcttttgtagttggagtgatcccctgttaccttcttgagacatgttcttttgctcaatgatactttcccttgacttcaatcatccgggtagagtaatgtctctctcgtgagggcttgaatacatttttcccatcttctggcttctcacctgctaagtgaagagaattgtccaaacacgttgtgttgttagtaatataccccatcagtccaaaaatataacaacctttaacactcagtatttgttccaaaatataacattttttttcaccaacattctcttcccaacaattcacaaccctccatcgttcacttttcctaactacctccacttcttaaccaatcacaacctttccctatttaattctaaagaaaacccctgtgtacccctgaaagttcacctaatcccttctataccctgaattttgctcaatcccttacatacccctaaattttagtatggatcccttccatgccctttccgctagttgaccgttaaattcttatgaaaaagtccattttgccatttggtataaagaagtatataaattaatagagtatattgttggagcatagaaatttattatatgagactattatgtttatgagatagttatgcaccatattatttgcgataaatatacttttagatatgacataaaaaattaatacttatttatttttttagcatatgtgttctgatagtaataaacaaatctgttgtattactatgaaaacacatgctacataaaagaacttttaataactaataaataagtattaaatttttatatcatatgtaaaagtaaatttgtcacaaataatatggtgcatcacagactcataaatataatagtctcatccaataaatttttacattccaacaatatacttcattaatttattatgtttcttcgtagcaaagggcaaaatggactttttttcaaaagaatttaacggttaactaacggtcaactagcggaaaaggcatggaagggatccaaactaaaattcagaggtatgtaagggattgagcaaaattcagggatatagaatggattaggtaaactttcatagatacataagggattttctcttaattctatctactttcttaataactgtgtctaactctaaaacttcttatattctgagatggagggaatactgatttgagcaagtgaaactactcaaacgcactttccttggaataaacatttcttgggcaaatgcaaatgatcgatcaagggttgttacaggtcaaaacttcattcgagcagattgcatggctcaaatacgatttccttattgtgtgtgtttttgccgaacatagggatggcgttcaccccctactacaacaaatgggatgatactagttaggtataaggtcctgatatccctaaggtattagataatacttgagatctgataactataaggtattatacctgatacccaaccggtttcatcccgttcgaacgggatttcgtcgtacaacaacccctttatattcctttgtgaaggtgtcaataaaactgaaaccattgacacgtaggcctttttcctcttttcaagaaggaaagctctgtagtttaataaaaattgaaaagagtaaattgtattggtggtacacaaacttattaggtgggtgcaatttagtacgtaaacttgtaaaatgcttatttcagtacacgaacttgtctagttcgtgcgaacgaggaccaaaataacttagcaatgttaatttatgatgttcattaggatgtgacgtgcatacgtatagtgagtatgcataagacacgtaatatttataaatttcgtcttaactttatccttcagaatggaaataacgaatctcatatgtttctaacccttatattagtgctaagttttttaatctttctgatttttattgaatagatatgtctaatggcaaccttcttagatatatgtttacatagtatcctaatcaacccctaaattaataagattaaccatgtagtgtacttttcggttttctccgcacgcacctagacaaattcatgcaccaaaatgagcattttacaagttcgtgcactagattgcacccatctgacaagttcgtgtaccggcgatgcaatttactcaattgaaaaccattgacgtatataaaacgctgaatagtgtatatcctgcattcttgctctgaacgttgccttggctttttgctccatttctgagaatacggacgggcagttaaaggggcgttcctagtatgtgcgtacgccgacgcggtagcctaactaactctgttagttaaggataatgatggtaattaacaatagattttttattttattaggagattctttttcctaatagattgaaaaattttaagttacatttgaaaacttttgacttaagatttaaactttaaactcaaattttgaaaactttcaactcgaactttgaaagttttcaatttgcaagaaaattttttaaaactttcaactcgagatttgaaaacttttaactcaaatttaaaaactttcaactcgagatttgaaaactttcagctcaaaatttgaaaactttcaactcgtatttgaaaactttcaactcgaatttgaaaactttcaactcgagatttgaaattttttaaattaagatttaaaaatttttaagtcaagatttaaaaactttttaaaaaataaaaacacttgctgctagaagattaaaaagtaatcaggaaaaaaagaaaaaaaaaggaaagcgaaaaaaatcagggaagaaaaaaaagtggaaaaaaaaaagagaaaacagcggtggttagatttcgcgggcgcacgccgagtgggccgtatggaaaaaaaaagagaaaacagccgggagtgcgcgctgccggcgcgcgcgaattaggtttctcgcagttaaagcacgtactgtgtgtgtatcgctagacagatgcagaacggctgaagagcagtctgtctcatgccaatgtgcaaacctgcacatatggtcgcacgcataatgaaacgcaaactgcgcatgtggttgcttactgagaaaccagaaacgggagaatactgtgaatacctatagctgatcgaatattctgccctccccacgggccaccggacaaaagaaaaccccgctgaaactgtatttagtcaaagtaaaagtcacgcatggcacgcctgataaatcatgaagttgttaggacatgcttttcaaacttttgcaaacctgattacaggggatcaaccaatacaagaaataaacaaagtcaaacaatcaattatcagccatactgataggagacgaagaactgcaagtctacaacagctgacccacatcacaagaaaatacaaaatgagaggggctccagtagaattcgtcagaaatgttagattgctaagaggagctaatggcctttaatttgatatttgtgtcatctgtcaccggcatgctaggagtacaagtttgttatgtgcatcagactgtacagagaaattcgtgagaccttatcttcctaataaagaggactcatacattgtcaacctgtccctgcaagttactagaagatgtcaatgttttaaatgtgactaccctgattttccatacttccatgtgcaagccttccatactaactactcgagaagctgtcgcatgtgtctgtttgggaaccaatagtgaacgggtggactaaattccatacacgattgacaactccatctgacataaaggaaaacgcatcttttgcggctctttgacatgcttccagagctctagaatcaccaagcagttgttttagtgcttccaaaagttcatattctcctttgacctgaaaaacatttgcattaatcctcatagaatgaaaggggctgtagctccttgcgatgtttaggtgtaaaaaaaaaaagaatcacccatgcagtaaagcagcatacccacattgcaagcataatttattgaaagagcaagtagaaggcaattcatcctgttaccgtccaaactaatttccagaagtagggacaaggccaagtcaataattaacaaaatacctcccctaagaaggccacgaaatagtagtaatcccactcttaatcgaacatagtgcacaaatgatgcggcattttttgtgtcagttagataaataacaaagtacaagacagattatcacctgcttgacagctaaaggatttatttgccacatttcgaccagcatatgatagaagtgcccaacactaggacctgaaagacaattaatgaaactctagacattccgattttgtagaaaaagtcattcaaaatagtcagatgtgtcttgcactcttgcgtaccagtcataacagcgcaaccaactgcagcagcctcagaaatattatgtccagctaagccgggcaaaaaagaacccccaataacagctattggagtaaccctgtagagcattcttaattcacctattttccatggtatttcattcattaactaacattcaaaagaatatacacagtccatactccatactgaaaaaatgtgcaaacttaaggcataagagatagcacaaacctaacgtatcaaccacatatatactggtgtttgaagacaccacttctcttgttgacctcagcacaaaattcactttctgtttcttcagggtctaaaagaagatgagtaaagaactaaagatgtggcccatacatattatactatcagcattgaagtgagaatcatatgctacatgctctagaaccataagaaatttcaagtaatcgtatacaaacagttataagcaattaatttcaagcttcatacagtgaactaagttagttccctttttttcattacaacaatgctacacctatagattacccaatatgataatgtattaaaaaaaactaaaagataagcagtacaacccaccaactacttcatcaactaaacaggaccagatataaaagggtaaggaagacaattgacatacttgagaaacattcttgctgtcctcaggatgccttgggacgagaattaaaagtagagtaggatacgccctggttaactcatcatgaacacggagaatgactgaaaaagagaggaagcttgtcaacattgtttttatgttgagaacataagcatagtaaggcaaggattcaattattcaggaaagcataaagaagtcagcaatgactttagggatatcaatggtgatcatcaccataggcaaaacagctacatatatacagttttagtcctgcacacagttccttggaagagcagataatactgatccaataaaaagaaaaggtgggtgtctgaggtgcttactttcatcttcccctttgtggatagaagctgccatccagatgggcctattgctgaactgctgctgaagatcttctattgcagctacctctttctccccagcagcaatgtcaccaacagctaggtaaatcacatgaatctctataaattattgagtttgtgaacctggttatctttcaagctcccaagataatccttgagaaatgcatcactcatatgtttatttcaaacatactctcatgaacataggaagccagagaaaaattggcatggcgcataccgtattttaaatcgccagcaaaatggatgatctgtggtggtgcatgaagtaattgaaaacgaacagcttgaatagtactctggaacagatagaaatgaatacaatggcaataattttacatcaaaataaggtttagaaccccaccactccataccaatgggataacaagtgatagtttggagagcatcaaagagactaactgcaaccctagaggcaaggaccaacggttgaaagacttcaatgacatgcgcgcatttaaaagaaccactgcaatctgaaaaataggaaggtcattcacagcagataattaaatagtgaaagaatgtactatggaccgaaaatatagctaatctgccattgcacatggaaaaaacaagggtaacaaagggaagcctaaccacttagtagaaaatagtcattatgagaaaaaaaaaacttacccctttctctgctgcagacaaaatgaggtttggccagagttcactttccataagaagtatcaaatttggtttccagtatccaatgaaactttctattgcatcaggacagtcaaggggtgcaaactacacacatatgtatttcagttatgtaaaacaacaataagctaccgtagatgtatatagggcatatcaaacatttaaactatccttctgttagcctattcgtgattcccttcatctaaacaagttccatctgttcccaaaactttgcttgatctgtgtctgtactatcgaatattaccaccttaaaggtttaatattacgaaaccttactatcatagttcaacgagtataatatgaccttagtttaagggatacatataatgaacagacaatatctatctgccttgacacagttcgaacctaaaatgtccttttttttcaagaacagtccatcagtaaaaatttgttgtgcatacgccatttctcagaaaactaaaccggccgtcacgacagggatctgaaagtacaagagcaatttccgagctcacctgatatatgacaccatccgggagcaagtctttcatcacttcgctgcattgaaatcaaaacaaccgaaatagaatatggccacattacacggaaatgagagagccaggcaactcgtatttgcggtaatgggggaagcttacaaggatgagagggtagtagtggtgaggaggatggggagaccagggtggaggcgggcgcagtggcgtacgaccgggagcgcggccatcccctcgccgagggatacggcgtggaaccacacgagcggcgagcccggacgaggccgcgccaccgacggcctgcccagccgctcgggccaacgcgacgggtgctccagtcctcgtagccgccgccatagaagcgccgccggcgccgccgcgcggctcgccgccctgtacagctcgtacagcgcccggccgccgcgcgccgccgacgccggcgtgcgggccgtccgcatcgagcctggcccgtccaacgactcacggcctgggtcgctttgggcttttgttagcggcgcgtgaggtcgcgtgctttcagtaccgagcccaacttacctctcgtttatacgccttcgatataagaaagcgtctccggtgttgagtctctccgtattcatagacagaacacacatttctgagcgaaactcaggctatatttctgcctcgattgatttatgcttatgcatataagataaaaattaaagtttaaaactcaattttggcgttgattttgttattttctcgttgtagtttattttacagtatttttttttaaatcactaaagacatgctataaattatttttagttgctaataaatgattaataaatataatataaacataagtgggaagatgacttcttttaaaaaaaagaaaaataaaaggaaaaaaaatcttcttcctgcattgatgttcctttgtcaagagttaaagcataataacatcacacgttcgcgaacagtttatagctattggcgtccagaatgatctgccggaccgcggcgactgacgcgacgacagcgagcgcggagaacacgacggcgatggtggtgttgagccagaacacggcgcccttcttggacggcttgaacgtcacgttgtagaacaccgccggcacagcgaagtcgagcgggaggaagccgaatgcgccgatgagcgcgttcatgtcgccgaagaagggcaccatggccgcgatggtggtgcccagcgcgacggcggcggtgcgggagagcacccgcggcgcgacgttcctcgcggcgtactgcccggccttggggtcggacaggaggccctccaggacctcgttggtcggctgcaggtacaccacggccaccgccgacagctgcagcagcgtgaagagctcgatgatgagcagcagccactccgggatgacggccctgccgcccaccatgaagttgctcaggagcgtgccctgcgactggttgccgaacgcccagtaccccgagatggccacgctgaagaacgtcgtcaccaccacggcgtagcacaggcacagccccttgaacatcttccccgtcaccggcgccgccaccgtcgcctgtatctcggggatgattccattgccgtacgtcgtggcgatgacggcgatggcgttgaacacgccgaacacgcggtcacgggtgttggcgccggcgatcgagtagtccttctcgggcgctccctttgagcttcctgcacaaaattcgtcagtccaattttaatccgtcgcgtcgacaggccaaattaaagcccaatagctaatctaaataatgggccgggtcgccgggaaacctaccaaggtagatgcaggcggcgacggcgcagaagctgtaggcgaggcacagcacgagggagatgaggttaacgtggcggagagagtggaacgacggcatctgcgccaggatcatcatgaagacgccgaagattgccacgaacacgtacagcttgatcgtgccgcccgggttggcaatcaggtagatagcctgcaacgcgatcgagtaagaaatgtggattcataccatgtgcaattgatgaacgcgatccgatccgatccgacacgaaatcagttcgtggactaagttctgatgaagataccttcatgctctgaccggctaggagagtgcacgcgacgactgccccgaagcagaccaggaactggatcggcccgatgtagaagcgtccccatccaggccctgcatgcatcaccgtggaaaaattaaccatgaatctcatctcagtgacagtgattttgtcgcggtgatgaagatgaatatccctttcgaaacattttttgtcagatgcgtgtgtaattaaactgtatgaatctgctgccagatggcactaaggacgattcctttttcccaacacgtacgttaaacctgtgcttatctgtccaatgtcgtatcagctaggatgctagtatatgactgattctactacacctggtacagtgctactccctccgtcccaatatataagaatctagaaccgatgggacattttctactactgtcctgtccagattcgtagtactaggaaatgtccaatccagttctaggttgttacatattgggacggagggtccagttctaggttgttacatattgggacggagggagtatttaagattgacatattgacaagaaacggcgcgcggtgctggtttttttccttcgcaagcagtatcaatcgatttagacaggcaatcaagtggaaagctggaatattaaattccacagcaaatacttgccgacaaattcgtcaaactcgaccaattgcatgatctgtagtactaatgtgggaatactatccctttcgaccaatcaagtttttctctatatatccgccaagcgctaactggagttttaattagtattatctaaccagtggggattctttccctcgtcgactcttgacagtgacaaaatacgagccctagcagctggacttttctaacctgtactgtaccgtgttacgattttattgaatgctgcttagtcagttactgaaatcaagcaacatgtcggcttcagacgctgcactcactccggttgaagagtttaccggtccgatatagtatggccatacccattgctcatgaatgctgcagacacgtacatgtcgcaaactcgcaaatgcgaaatgggacttgatttggccaaataatacagctgacttgttccgcacaagaaaagggggcgggcagctgactttcttgtgaataaaacaggacatcaatgatcagtcgctaaacctgtcacgtctacaagttggtgttccttcctcccttcctttcttttctgaaagaacactgcacttggcgtttctgcccctatattcaaggtgacgacataggtgttgatgtattgactcatcctcatgtctcgtttgaacgcaagaatatcacaaactatgtaaatgcttcgaaagaaatggtccattacagaaaaataaatcccgtgttataatcagaggttgttttctccaaattctcaattcgggcctttaggagccagggctaagtgaagacatgggcgagagaatcttacctgcctcgtgatggatactagtacccactactgacttgtacagttgtactgtattcgtttttttgggtgaaggctgaatgccacgtccgtccattgtgaacgcccttactattgtattgtaatgcttttggtattgcacgtagtatgagtttgcgagacagttgtcagccaatgcaattttatatgcagattctcctccatctaccaattagcttggagttgctacgtgccttccttttaatcacttatgtactcgagtttaatgagtatattagcatcaacctactacattatttccattttaatgggaacctaactagtaaatagtaatagggtgtgttcagtacctattcttgctatagcggttacggctgtagcagtactaaaaatggctgtagtttacagcagcgtttaggctgtgtttagttcagtgtaaagtttagattttggttgaaattgaaaatgatgtggctgaaaagttgtgtgtgtatgacaggttgatgtgatggagaaggactgaagtttggattcaaactttgaatctaaacacagtcttaattgtggctgaagcaacaatccctgtcgatcaatctcattgtttaactgtaattacggatagataggtatacgagtgattactgacctaaaatatcggtggccatgtccctgaagcggagctggcggcgtccttgctgcgcgtggtgctcgaggacgagggagatgaggttgtacgagtagaaggtcacggcggcgccgatgacgaggcagatgagccccgccgcccaccccagcgacgcgaacgcgaacggcaggctcagcagcggtggcgccacgatggacgtcgtcaggtggtacccgcagtgcagccatgaccctgcgcatttatacagcagcagcatgatcagtttttttctgttaaactagctaaaggtactgtgcattgcggcgaatatcataagagataaatataaaaataaaaattacaaacctactaacgtagttagttaattaggcatattatgtcatatcaagtgcaaaaatactcacatttgaggatcttatggtctaatatgttaacttatggtgatggggaaaactcagacaccctcactaatatcattcaaagtagtatatcatagatatagaaaaagaataacattactcctgctagtagttagctaatctgttaatcctactggtattttttctgtttgtattagtcgctggatgatgataagctgattgggagaggcttccgcagctccactcggtcaaaagttgtaggagatgaaggattggcaaaagaaagttcacaggttagctaaacgcttggaagttggaatatggcgagtaaacacgtttctatcagtcgtttcaaaaaaaaaaaacacgttgccatcggaagaaaccccatccctccatcaaacattgatcaatcctgcacaatgcccatacctactttccaaagctgtatgtcttacacatgtagtactcctcagtcactaaacttgctttgacaatcgaaagataaaaataaaagaaattttgcagtcattaaaaaaaagtacatcgagatacctaaattttacattaaaatttttggtacttctagatacatttttaaggatggtaaaattatcctaaaataaagttgttgatactagtatgtttcaggggtcagcaaatcaacagggaactatgaggcattgggggcagtgagcaatttgattttgttaagcctgcagtctcacacctaattcgattttcctttttccaaaatagaccaaatatgatttgattagtacattactcctaccatattcctcactccattccaaaataatcactacgatgagtttccgtgtacaattttaattgtccgtcttatttatttttttaaaaaaaaataaaaaaaatataagtcacgcacaaagtactattcatattttataagctaatagcaataaaaatactaattaaatttttttaataagacagacgattaaaattaaaaaaaaacttataactgcgcttattttgaaacggagagagttctagctaaccaacctcccgatgccatttataatttcctcgagtcaagagtatctgcgctagtgcgcatgataatcaacgagatggtgacctgtaccagttctcctatacgatacagacatcacgctaaagactgaacgattcatgcctaatttatttttttggaataaaaataacaatacatcgttattatacttttatagttcacttaggtccatatattaatatattttctgtctgcttcaacaagaccaaatagacgtgtaaccatttcatggagcccgaaaggttgactaatacgagtactgtatcgtgatatgggggatcggctgagctagcagcctagcagaacaataatatgaattgcccatgtttacaactttacatgcattgctattgataataggcttgatagccagggagcccatcatccctgaagtacattttctcttgtctcttctctgaatgttgaaaaagaatagatgtaggcgtgcaggcaacggatgtaggggaacggaaaaaagcgagcaaagaaagaagagagtttttgttactacatccaatcttcatagggtaaaactgtgaaaaagtagtgcaaaaggatagatgggcagggaccattcaaacatctacatctgtccaagaacttttaatcagagttcaggagacgcacccagtcattcaagtagaacagtaacgcagtacccctcacaatggctgccgggtacatgcgctgaggaaaattaaccgaaacaatttgtaaaccatcatttttttcccgttatcttggtagtttgtacagtttttgggtacgattattaacatgagccaaatcatttacatacggatcatatcaatcgggatggcatagccaaatcctgcacaacaacacttcatcaaaccatcttgatatagcagccagaacaatctattaactcgtacatgttagttggctagttgctactgattagttagccagctcttttgcttattaatagctggggacaatccatcaacagtctagaatatacggcctccgatgctcccagaacacaaacaggttacgcttatatgtgcagctagccaaacatgcttgctgcctgacatgcgccaaagaggaatcaagaaagaaataacgaaagaaagaaagaatagtgggtgatcagaagcgagtaagcgagaaacaagagagctcatgtcagacacgaacgcacctttggactgaaggacgaagagagccccggcgtcgagcttctggccgacggtgtcgccgccggcctccatcttcttcgcctcctcatcctccctgctcggcgcccccatgacgcctctgccgtcgaacgattcggtcgctagctcttttgtcttgcaggtaaaaccaagggagcgccaaactacgggttgatggcctgaaactcttgggggactcggacgatacgatctacagttctacacggccgtacgttgtttgtctctgcctctgcgcggtgtttctcagcaggtgagcgggctctggttttgccttttgcgcttctactgctgaagctgaactgcgtactccatatatagagaagaagaagcaagcgcgctcgcggaccgggtggacaccgtatgacgcgcgggcgaaagggacagtgcggcctgtgcgcacgcggcacgtcgcgcgtgccacggcgggagaatctcccgcgcgctcgctcccgcgaccaggccgggcagtcggcagagaatcgctaatacgttaagatcacgaaaaaagtcatactttggaaaccaaaaataaaaagaaaatccgtcgagaacccaaacgaggaaaatttttattgtacattgtaatgcaagtatgagaaagtccatctagtactactaggattttaagccaaaggccgtccagtatcgtaaacataaaaaattgtcaacggactcaaaacttcacaattttattcgtgtacaacctttttgacaggcatggatcctctgcattacggcaacagagaagagctagtgctacacacactaatttgtgcctgctacattctttggtagccttggcttcgcccactggccactaccctctccttgccaatgtcacgtggccaccgaaaaatagaaaacatgtcagggaggggataagtacatactccgtggctccgtcccacagtgtaggaacctctaagacctattctagaactacaaatatggacatgagttttatcataggttgctatattgtgggacagaggaagtactacatatttaggtatgcataatgcatgtactagtagatcctattgtgtatgtgtaagttgtagtgctaaaaaaccttggatttttttatggtataaacaaagccattgtaaatctcattttgcattagcataaatgctactccctccgtttcaggttataatatgttttgactttgatcaaaatcaaactacttcaaatttgactaaatttatagacaaatatagtaatatttataatactaaattagttttattaaattaataattaaatatatttttataataaatttattttgggtcgaaaatattactattttttctataaacttgtttaaatttgaagcagtttgactttgaccaaagtcaaaacatcttataacctgaaacggagggagtaatatttgtctttcctagccatgttgaagaccggcagtttaggccggttagctgtatatagcataggtgcagcagagctgcgagctataagaggctgttcaattggtggagcattgcggtggtgacgataagtgcgaagagggtgttgtaggcgaaaacctagcctgaggtttctctgagccatcaacgccgatgcctacggacattattatcctctcttagagcattgttaagccatcatcgacacctttccactcattaacatcattcttcatgtcaaaacccagtccgaatggatgggcggtggtggcgtctaagatgtcatgatctctttggtggtgttgtttgggaagtttttttcctcgctttaccgtcttttcttagctttttcttggcaaatttttggttgacgtcatctggttaatgtgagggacgagcggatcttcttctctctcgccctcttcctcaaccactctacatgaggatgattaggaactcatcgatgatttgtctgagtaggatcttgcaggtctagcagcgatcggtcaaacttagcggcggtcggtttgttcctagtgtcttctccttagttgtgtagggagctgttagcacgtggtggttgtgttttgtttttttttcattggtcacaattttttcgtcatgtaactttgtaatttttctatgccatatcataagaaatttcacgttgtcttgtgcgggatcgttaaaaaaaaatcctcgtggctgctaggagtcacttattatcatcgaaaggcggttgatgtcaattatcgttttctaatcatgaaaatgacgttgtttccctatttaatgttacaaaatttaaaataaaatacaaaaaataaattcagttaattaaacttttgattttgattacattattttttgtttacactgtgaacagtactttatatttcatattgctttcagtttataattttcaaaataatttcaacgttttgaattgcaacagattctcacagtaaaagatggcattaaaatatactccagttttctttgtttcgattacaaactccaaatatactttctacacgattatttactttgaactatcggttccatgtataacgatcatagtattttgattaatagtctgcatacatttagaagacaatatacataattaacttagaaaaagtaaatagatttatttataatacgacacaactatatccctttgaaaataaatcaacaaaaattagttgctgaattttgccatatctctatctctgcaaagatgctcatccaataagccagatcgaactgttcctagcctctcatctcatcgtctgtttgttggtttgtttcaatcgcaaccaaatttgagttccgaagtttaattttagagttgatcttttttctttcgtaagtttatttaaactgctaaaaataccgttatttttttttaaaaaataacatttttagttcatttattcgtttacgacttagccgaaactcaactaatcaaaggataacatacaaaacggttaaaaaaattccttcggattatcgtgtggtttgcaaggtgtcgaagtcgacggatcgagcggcgagaccgcgagatggacacggattaaatggtgcgcgcatgtagcgcggccgagaggcttgcacgagtccgtggcccatgaggccttgacgtacgagtggcttatatgctcgccaacttggccaccatatatagcacagaagtgctcgtagagctcagagtactcgttttccttaccgactgatgcacctaactaatccgccgattggtgtctcgttctcatctctactagtgctgtgaccgtgcacgtcggtcgtcggagggcgggcgccttcatatcgatcgtgatcctgacgggacgtcattcccgggggtcagtactgttcgttttcagaggagcaacagagtacttcctccatcccataaaaaataatctaatagtatgaaatatgacacacagagcctgcttaggccttgtttagttcgcgaaaaaaaaaatttaggtatcacatcggacgttcgaccggatgtcggaaggggtttttgacacgaataaaaaaactaatttcataactcatctggaaaccgcgagacgaatttattaagcttaattaatctggcattagtatatatgggttactgtagcgcttatggctaatcatggactaattaggctcaaaagattcgtctcgcgattttcacgcaaattatgtaattagttttttattttatctatatttaatactacatgcatgttgtcagggttatggataccgcatacctaatagtagtcgactaaatctcggcaggacccaccaaatatcatgtcttatacggaaacaacctccggatatagaaggagtttcgtataaggaaggatgaatagaattctacatgtaaacgacatgtactactcggattgtatccatattggttttcttagttctatttggacaaggggacacctatgggtataaatacaaggccccctagaaggacaggggacacgaaacaatagatcaagacacaagatcaacatacaagccaacacgcctccaaatatcaacatcaaaaattagcttagacaaaccctatctggtacctgcgggggccggcaagaggggtcaagcactatctctgatctcgacgagttcgtgctcgaggaagaagactaccctgtcatcgactacgagttagttatctagccgtcaagtcgacgacagccagatatgttatcccacatgttgtatttgtgttatccagatgaataaagagcaacaccggtttcggccaataggatgtagggttattacctgacaattcaggggcccgaacctgtataaaaatcctcacatccgtctcttttacctaagtctcgcatatatcctagtaccaacgatccccatactatgcaaataccggaatcgcgacatcaagcgtcgacacatgtgtacaaagattcaaattgacgtttttgggaaaaaaaatttaggaactaaacacggccttaggctctgtttagggtctgtttagttcgtgaaaagaaaatttttaagtgtcacatcagatgtttgaccggatgttggaaggggttttcggacacgaatgaaaaaactaatttcataactcgcctggaaaccgcgatacgaatcgtttgagcctagttaatctgtcattagcacgtgtaagttactgtagcacttatgactaatcatggactaattaggctcaaaatatttgcctcgtgatttcctcccaactgtgcaatttgttttttaatctatatataatgctccaagcatgtgtccaaagattcgatgtgatgtttttgggaaaaaaattttggggaactaaaccaggccttagtttccatgcaaaaacttttcactttcacatcgaatgtttggacacatgcatggagtattaaatatagacaaagaaaaaactaattacacagattatgtgtaaattgcgagacgaatcttttaagcctatttgcgccatgatttgacaatgtagtgctgcagtaaacatttgctaatgatgaattaatttggctcaataaattcatctcgcggtttacatgcggaatctgtaatttattttgttattagattacgtttaatacttcagtgtgtgtctgtgtatccgatgtgacacgccaaaacttttcacccctggaactaaactaggccttagttctcaaacaaagttttttacgctgtcacatcgaatgtttggacacatatatagagtattaaatgtagaaaaaaaaaccaattacataattcgccagaaaattacgagcctccaatctcattcctagcgtgtgttagggacgcgcacgcatgtgtgtcgtggtgtgagtgcagtgtgtgttagtgtgcgtcctgagttgttcccttcttaaaaaaaagaaaattacgagatgaatcttttaagcctaattgcaccatgatttgacaatgtggtgctacagtaatcatttgctaatgatggattaattatgcttaataaattcgtctcacagtttcatggcggaatctgtaatttgttttgttactaaactatgtttaatatttcaaatgtgtgttcgtatatccgatgcaacatgcaggggcaaattttttttgccaactaaataggctctattggggagatactgtactctctccgtccaagaaaaaacccaacctagaagaagatgtgatcccgtccagatttattgtactaggtgggatggagggagtatgcacgtagtactataatattagtattagaatgtgttgtattcagttctaatatttattttttatgggacgaagagagtacaacaacatatatgtacggtgcacagctacggccatgtatatggatgcaattaatacgtcggaatcagaaggccataggttgtaaaaaaaaaaaaacgaagcggcacaaaacaatatatggttaaactttatatatatgtctcattaatagtttgatgccaatacttaaaaatatacaaatagaaaaatagaaatcaacttttaggtttcgaaatttaaattttggatgtagctaattaagctactctatccggtttgataatactctacttgttattttggacaaaactcatatcaaactttaaaatctttaactatagataataaattctaatggagatcatacaatatagattagtcttacaaaatactttaacaaaatcatatatttattgatgttttatatatattattaaagcctaacgattaaagttgttttagatcacgtttttatcccaaacgataaatactatcacggaagtactctctccataaaaaaaaactaaacttaggaggagacgtgacatctttacaatgaatctggacaaccctttatccagattcgttctactagaaaacattacatacttgtatagtttaagtttttttttaaggatggagggagtatggttgctttttctttttttttttaggggggcggggtttgatcgggctgtcaatctgtcaccacctactatggcgcaacagcagttgagaagttgagaattgttcagatgaagcgagtatcacgagtatcggggtttgtgatgcttactacttatataatataaaactgtatttttgggtagcagacagataataaactctttagaaaaacaacacctgaattaattattgcagctgaagatgacagcatatctgagccaactcgctgattaattagaactcaggatccaaccaaggaaaggattattaatccagaatacatgaatgcaatcgcagaaactgcgatgcagtcactcattggcaagtggcaactgggcatatcattgtatatttgaagtttcatatgataagtttttttttaaaaaaaggggaaaacagtaatagattgtgccttttcattaaatatagggagaatagctaatttagtccctaaagtttctctgtaggatcagtttagtccttaaccttttaaatggtccaaagaaatccttaaactttgtcataaggtctagaatagtccttgggtccaccaaaatcattatataaatatgccatgtcatcattgatgcaaaatctatgatgaattgtccaatttacctttatgtatatcatagaaaaataaatataagggtgaattagacataaccatgggaaaaaatacttatcctttttttcacccttttgaggtatatttttgctcttacattttactttttgttttttatttttctatgatatatgtaagggtaaattggacaaatcatatagattttgcatggaaatgtgacatggcatatctatgtggcgattttggtaagatcaaggactatgtcaacccacgtgacaaaattaaaggatttgtttagacagtatgaaagattaaagactaaaatgtcccaggagcgaaattttaggaaccatattagctattctcccttaaatatagcagaagaaaaaacagcacaagtttcatatgataagttgatagcgctgtagttgctgacttcgtaagcttgcatgctcctatggtttccacacttcagcaaactagatggctgctaaataaattagtaaactttttgatccgttccaggctccaggctagctagatccacgtactttgtggcagcaaagacttttttgcgtaggtcgatcgaacacttgtcgtgtatgcatgaacgccatcggttctaattctaaactaacaccaactaatcgatcacgggcttctagctatagataattaattagtactaatatggagtacatgagtaatgtaatcctaacaggaacacgcctctctggtgcctgaaacttcacgctgctcgccactaatcgagtactctatttggtcagaagagaaataaaatggtatagcaacaacacatattttgcagcatcgtctttctatgacgtctttcacagtaacttactctgaaatatgaatcaaacgacctcgagtccttgacaagtccaagagggagtaggcgaaagaatgtgacgccatttctgttcttccgcataaatgggcaaagctcgcgttatttttattgtaaaagaggaaagagatattgctgtttgtctaaagttggtgatccagagataagaaaagttctggaaggctttggatttgcagcagaaagtgcgtccaccaccattagtggggactggtaaaacactgcattgatccccttgactacttggctactgcatccagcagtgaacatttcaaaggataatcatgtggatagatgtgtcggagtacggaagcgagaaattaatctcagtttcggcgactctcttcattaaacttctgcgtgctggctgcaattttcttcacatggaatgcgaatttcttcatatagagtaggagtaggcatactgctactgtgctagcgaggaacggtctttttttcctagtccagtccatcaatgacatggggtgtgtccgtgtgtgtcggtatgccgtgaaatgcagtatgcaagcatgttcaggagacaagaggtacatgatctccatgttctcaatcaggtctgtccctgttcactatgagacattacggcgaaaccgcgaaagggcgaaagataaattaacccttgatggttcatattgtaatacacgagatctacctttcaattaccacgtgactttgtgtgtcctgaaatcgaccagacatagcttggcatagagattgcataggtcatccacatcttaaaagcttggattcaacattttcaactagaatagtagtgtggacaaatatatatgtgggcctttagttctgaaaaaaagggcctatccgggcctgccatttggcccatatcccttgttatcatctccaactgggcccatgacatagttgtgacaaggaaaaatgtgggcctttagttcagaaaaggcgggctttcgctttctgcaagaggcccgtttgaaatgttgaaatttcttactaagtcatttttttattcaatgaaattataaattccaatctttagtttgacagctctcagccgtatcttatttttacctaagttcagcattaagcaaaccttacagaagctgaaactggaaagtctaaacacattaaaagccaatattgttttgatgaaataattataataacaaactctaatgctaaatctctatctatgttcccgagaatttgcatagggtaagtccattcgaaacgttggtttttttttacatattttaatctattttatctgaaatggtttagggctggtttaaaatggaatattgaccaaaatactgtagtggattatctacgcggttatagatataaatctaatattttgataaataaacataaaaataacttaatataggcgtaacaggccctcacgaaaaagaaacctattctgatttcaccgcgtagccaagcaagcatcaggctctcttagccagtcttagggcaagtataatagtaggctataagctggctaaaagttaaggtggagaagagaagagagaagaagtgggctgtaaacttacagtcggcttggaaacaagatctaagaaactctgtgagagagacaagtggaccctatattaattgtaaagagctaactattatatgggtagactgagagaatgctacaaagaaccttatagccaacagatcggttgtattattagccttgctcttagaatagatacaatagcaggctataagctagctataaacatattttaaagagataaaagaatagagagaagagctagctgcaatacggactccaagacataatgtatgtatgatatgtagtatcaggtattactagtatatagtaaccaaatattgtataaattagctattatatgactatagataatttagagttagtaattggctatactgttaaacttctcttagcatacagcagtagcacccgagctaactgaaaaacatcagcccctcagccgtcatcctatctcaccaaaaatttcaaaacacacgccgcacaatcgtgacaacgccataacgtccactggcgccgcgggccccacactgcaaaatctccgcctccccttccccacgcatggattagtacgcgtccagctcactcactgcttgcttccgccaccccgcaccgcttccccctcccctcctaatcaccaccaccgctcaccggcggtgacctccccccctcctcccccgcctgcgccatgtcatcctcctccggcgcggctcgccgggcgcgccccgggccatggccccccgcaccgccgccacagccgcaggcgcagcccctctcctgggccaagcgcactggcttccagtcccgcgtctccggcgagtccgtcgccatcgtctccgcctccagctcggggcaggtatcgctgcctcgccccgccgaggcaccttccgatctggagtccggcccaccggccaggcccaactccgccctcccgccccctcccgccgccgccgcggccaatgcggaggcaaagccgcaaccgccgccgccgccgcctcctgcgaggacgcggaggagggattcggatggcggaaggccgaatgggcaggcggccgcagcgccgcttcctcagctgctggaggaggaggacgacggtgcgccggagcggcccaagtacgagctccgtgacagccccggagtatgtaagtgctcaaaagaggaattaaatatcccacactgtcatgtgcgagcgcgctgatttacgaggttttacgatgtgttgcagttccaatagcggtatatggatttcagcattacatctccatgctcggctcaatcatcctgatcccacttttgatggttcctgcaatgggcggttcacctgtgagtgtggcttcaatttagtagtagttctcacagcatgtttggttttgtaggtttagtacttaatatacgctgttggatgcttaggatgatatggcagcggtggtgtccacggtgttgcttgtctcagggatgaccacattgctgcacacattctgtgggacaaggctgcctcttgtgcagggaccatcctttgtatatcttgcccctgcgcttgcaataatctactcccctgaattctttgggctcaatcacaatgtatgtttatatgtataaattttatttgtgttggcgtgatgcaatgccacatgttgtcatgtagggattgcctcatcattgctttagagcgtttgttgttgaacctaacacgttgtatttcattgcagaactttaagcacatcatgaagcacctgcagggagctatcataataggaggtgcattccaagtgctgttaggatatacaggcctaatgtcactatttctaaggtgtgcagctgttgctgtttattagatacaaatacattcatctttttctcctagttgtctgctatcatgtggcttgttgacatggcagtatatttctctatttaccatggccacatgattgggtttggtagtaagtcgatcagatttttatttggaatggtgcatactgagtactaacacattcttaagaaaacaaatgatccaaaatttctactgtactacagagatacatctcgtgatgactgtgaacaactttctcttatctatgtggtgtttgttaacaatggtcacgatatgttaataaacaccgattatgatacaggtgttttactatggtctctattggtattttatagaatcaatccagtctgttcatactctctaatctaatggattgatctatttatactaccacctcaactacttgtagaatattttttttctactggtagtagatatcataaatcaatggttgatatcgcttctactggtgatgttagtagaagaccaccatagaggtattcaaataataaaggaaactttgttggatattactagttattatacatatttcctgcttctgagcatccctgttatgaattaatttctttgcataaaccgttgtttctcggacaataaacatacttttgcatgtcttataaactgatgaatccagatcaatgaaacattagtaagcctgcctctatttcttctgactgtaccatcaactgtatatttttgtgacaaatagtaatacatatgtatctccatcttcactgagcattttgtcattaactacctctgtttcaggttgataaatccagttgtcatctcaccaaccgtcgcagctgttggactttcgtttttcagttatgggttcactaaagtagggtcatgtatagagatgggcctattacaattattgattgttgttatgtttgcactagtgagtatgcagtaaaccaacttgttaaatgcattgtaatattttgtgcaaataatgtcttaagctgatgatctgtctatttctgtgacagtacctccgaaaagtaaagttatttggctaccgggtgtttttaatttatgcggtaagatttgggctaatagttatttgagctaatacctccatctatgctagtcattagtgtgattatgcaattctaattgctgaacttttggtgctgccttcttaggttcctcttgctctagggatcacatgggctatcgcttttgttctaacagcaactggagtttatagctacagaggttgtgatgcaaatattcctgcctcaaacaatgtatcagcctattgccggaagcatgtactgaggatgaaatcttgtcgcgtagacacttcacatgccttgcgatcttcaccttggttgagatttccatatccgttgcaatggggcactccaattttcagttggaaaatgggtcttgtgatgtgtgttgcatctgttattgcatcagtcgattcagtaagtttataattgctttgaacttagatgatgcttgtttttctttcttttggtttgtttacttttcataaatttggataaacaatctagtacttactgggaaatgatctacaaagcatattgttgctccccctgctaagcatcaacttaacataagctttcttctctgacaatattgttaaatgcctgaaattggatcactcagtaagtaggattctagaatcaaccattcattgctcttcactatccaatttatttttgtttcctgacaattcatttatgcattttggacttaaggttggttcctaccatgcatcttctttgtttgtggccacaagaccaccaacagctggggttgttagtaggggcattggtgttgaaggtgtctccacagtcttagctggcttgtggggtacaggagttggatctgcaacaataacagagaatgtacacacaattgcggttactaaaatgggcaatcgaagggcggttggatttggtgctattgtacttatactactctcttttgttggtaagcaactatttgcactttttcccctgtgttggaagagtagacatcatttaactgtgacagcattcaggttcttgctataacaattcttgtgtccccattgtaggaaaagttggtgccttcattgcttctattcctgatgttctagttgctgctcttctttgtttcatgtgggccatgctatgtgcccttggcttatccaatcttcggtatagcgccaagggaagctccaggaacagtattgtagttgggctagctttgtttttgtccctgtcagttccatcgtactttcaacagtacagattacagcctaattcaaactcatcagttccaacctacttccagccatacattgttgcatctcatggacctatacacactggatctagtggggtatgtattcatccgttcttttctaacactatgctgtttgcatactagagtttcaatggaaatacataaacaaaagactggtgatacacatgcagagtccatattatagtgctcacattatttatgaatatagatagtttgccaactgtaactcttcatgccgcttgcctggtacaataacaaatatctggtttctttcagtaacaatattgttgtggagtgtcttatggaagtatcctgaacatttacataactatattgtacaactggagaaagcagtagaaagaaacataaagaaaggaataaacaaatcctgggaaaatagtcggaattagaaaattctcattaaatatagtcctttttactcctctgttttgatatgaaccctggaactttcatttttcatgtatatactatgcttcaactgaaattagtcaagctataaattcctagtggtaataaactttatcgagtagaagtgcttaggttgagttccataacttacatatggttccagcatagtttccttcttaacaaagaacacaattatttcactcttatataccgtgccatgatattttcaatcccattcacatgaatgatatattgctttctaatttactgcgtaggcacatttgcagtatataagaactgttctcattttatttgtgaagcctgacaaattcattcatataagtctcaaaatatggcaatatttttgctatatgtttatgttaactatttgatttgcaattcctttatttccttgctctcaggtaaactatattctcaacacgttactgtcactcaacatggtcattgcgtttttggttgccctcatacttgacaatactgtccctggtggtcgccaagagcggggtttgtatgtatggtcagaggcggaggcggcaaggagagaatcagctgtcatgaaagactatgaacttcctttcaagattggacacgcattcaggtgggtgaaatgcgttggcctatagcacagttttggtgtggtttgtagccttggccaactgcacaaaaaatattctgcagcttccaagaatgaaaaatggttactgtgcaaaatctcaggcgaaagaaatggttagtcacgaatcatgaccgactgtttcccaatgtttttcaaccaaggtatcgactatcgagtgtacatactgaattgctctctaggttagttgtcttgtcctgatgcagatgctagatgcatcaggggcttcccacatttttttggactaccttttgtcatcacttacagattttgctcttctcctggtactatttaattggtgttagggatatctatttgtacaggcggtaaatgatctgaaccaaacctgagctgtgcttaattgatctagttatcttactttcaacatttcctgtgtgtggatattttactttcaacttagctactagtgatagcgagtttcaccgtgccaggttttcctgctgaattatctcatcctcgcagtgctaaaggctggcatccatgtcaactgttaagcatgtaaagctgcctgtctgaagtacatgggcaaggaatcaaagagtctgtaatgttacggggctatttttccagttgccacctcccaactttggcataacccagcctgtacacattggatctttgctgacttgttggttatcatggctggctgacttgttggttatccccgtaaccacgtatatagcccagttctgagaccactcaggcactctagagggccttgtcgtggacactagaccctcttttctgaggggtcaaagccaatggacctcgccaccggcctgtaccgatgacgaggctgacaaggaccttcacatggaacggccgtgccgggcacggcggcacgggtggcttctcagcacgctccttccaaattccaatgctgttgcttgtctacggctagctgcgtgcacggctcgaatgtcgcgtgtacagcagttagcacgtactacatgaggtacggcaatgatgccggttgtcaccggatgcagcacaatatgcaaaacattatgatgaattcactgggataaaaatgtgtagcaagcttgattccgaagtcaagcaacactccgctatcatgactgctgggcatgccacataaacaaaggacaagaactggggcatgccagtataaattgctagccgcaggccatccagtggcgcaaggctattgcttctttgtgacctgcaaggctgcaagtttgcaaatgcacttcaacatactcccttcgtcccataatataagggattttgagtttttgtttatattgtttgactactcatcttatttaaaaaaaattatgcaaatataaaaaaacgaaaagttgtgcttaaaatactttggataataaagtaagtaaaaaaaaataattccaattttttttaaaaagatgagtggtcaaacagtgcaagcaaaaactcaaaatcccttatattatgggacggagggagtaccaattgtcaaaaagtggcgcacttcccatgtcttggtcaaattatctcccctagtaatcgaacgccttcttcacaaggatatgcagccatgagaaatactacttgtcaattatcagtgctgccttccgctagtaaaaaaagcaaagagaacaaattcatgcatgttacaagctacagcatccacttattagaaatagtgtaatcgcagccacgctgcatgaacaggtctgcatctgcaaggggccttcccttcctgaaatcttcagcaagtccgggaattccggagaggaaagaagctccccttattgtaaaatctgaacttggagtgctacacctaccagaagtaggcacagacagcagcccagaactgtgtggatcgtaacatggcctcgttgaaaagccatgatcatctcttatctctgacggagctaccgtgacacgatcagcagtgttgctcacgaaggcgttctgaggagcagctgcagttggtctcagattgagctctgaacctccatatttgttgcaagttgagaccatctcgtcctttggaaatgagtctgttggcaaccgaaacaagccggcaatgcagataggtatcttgatgtcatccactatctctctgtggtaatcatctaccggagccgggagagccaggatctcctgccggtgtgggcttgaactggtctgttcctctgtcagtgaaatggtagcgtcgtcattggcaggcaaattctccctgtcatggtaatcctctggtgcagggagagccagtatctcctgatcaggagattggcttgagctgcagagctcatctcttgcagaattgaactcgtcgtcgacgggggagtagccgtcgtcttctgaatgttcatggtcccctggtgcaggaagcgccagcgtcacctggctgggtggaactggcttgctcagcttctgactcagggaaatcctggcaagctgaagtgcctgaagaacacactctatgtccatgttgctcgttggctgttgatctggccctgcatcgacctggttgtcgccatggtcatggaagcgtgatgagctccaatcagagaccttgctgttcagggtggcatcactcattgacgggctcccatctgatggcgctttgatgtcacagtagcttgaacatccatccggattctcgtttccttgttcttgattcttccctgtcattgtgccggcgacattagagtttccttgagactgtgcatgacagtggccgtgaagctcctcgtgcgagtcacgttggtcggctgctgcttcttgtcctgatgtgtcttggggtgattcaggaagggaaccattcaacagaagtccagcagagcggttgttgctggcgctggggtgatttttaacgcctggttttgcctcttcgttgcaatgaaccgcttgatccgcgagcctagaatgctccttgctctgctcccaaccattttctatctggcacgccttattctctgcctcaacatgaacctggagctccaaagacaaaagtatgagtaaaatgtcaaattttgaaccaaaacaaccaggtttcactcatgatactaactaacctgtgggtagcactctgcagtgcattttgttattaaaaaaaagcattttgagagagcaaattatttatacttatcaagttggtggtacacatttttgtactgcatgtgcactaaatttggtagcatgtggaagtcaaggggaagttgactctctctgtggcgtagttcatggtacaaagttatgagattatatttttgttgtacacatgtactactgcagaagttgcttcatgtgaaacattttctctggaagtggaagaatttggtatcacaactctgagcagtgtttctgtgtaactgtgtttggttgcttaccttggctgagctccgattctcgttgaactgcttctcccactgcctctgagcttcttcctccgcctcatactggccgatcagctcggcctgcctctcgagcaccctttccatctcgccgtccttctcgtacctgatcacatactgaccaccagcaacctcgccgtccatgtccgcctggccgtcgtcggtgcaatccgatccatcttgctgccccttctgactccaggcgatctcctcgacgtcgccgcgctgctcttccggcgccgtcgacttgccattgctgatgagcagagccgtgggatgttagaattcgacaaacaatggcgtgtgcggtgtgccagcgtctatggcgggacggagctcacctgagctccttgcgcttgttcttgcggcaggactgccccatccggtacttgggcgacgggtcggaggagaggaggtagaagtagctcctccggtgcttctgcttgagctgcctcgccttgcgcgggctcacgctgcggcctttccacgacagcccgccgccgggctcggccgtcccggacagcgcgtcctccgccgcttcgcactgcgccggcggctgctcctccccgcgggagccggccgtgtcgccgtcgctcctcgcgtcgcgtgggtcgtcatcctcctcgccgtcgcggtcggagcccgagtcgagcacgtcggagaggttgccgccgaagccatgtgactccagaatacccagcacctccgtcgccgcccgctccgcctgccgcctctgcgccgtcaccgcctggacctgctcctccagctccgcaacctacaaccaagtgacccaacacacgtaatcaatggcgcgaacgacagcgagagtaggctgcccctgcgcgcggtggctggctgaccctcttggcgagctggtcggcgcgctccttggcggcgcgggagacggaccgctcggagagcagccgcgcgcggaggaagtcgacggtcatggccgtggagtccgccatgcatgccaccgcgcgcacgctcacgcgctccccgagccgagccgcgagtgacgttgctgcgtacgtatgccgctccgcgcactgtcacatgccggcggtgtggcttgaccggcgccgcgtattaaaaacggcttggtttcccgtgagccgcgcacggcgcacacgcagcgcgcgtcgtactcgcggccgcgggcgcacggcgcaccgacagcccaggacagggagtacgctacctacgcgcgacacaagcgccccgctgcagcacgagggccacgggctgacgagaccaccgcaacggtgtagttagctaggctgcgccgtccattttcaagggagaatggcgatgcctcacctacctgtatcgactgatctgcctcctgccctgtccggggtccagtggcatattgtcaatttggcatcttacaaaatcatgagagtttggatttatggtgtactgtgtacatgaactccagtagcacttgtttatgggggtaaattcgtcgaggacaagagtagtgaacgtggtacagctttgccatgttcgagcaacgcgacgaagccagcaaaactactcgtcttctcttgtgctactgcctactgctactggtgctgctccaaaaatggccgagatctcaggctgtccttgcttggaatctttctgcttggatcacgaacttctaccgcacggaaacatttgagtcttgcaacggtttcgataaggtcattcaaagcaaagtcagctcatcgtgcatagaacaatacgtcttcaaagaccatagcggcaattatagcatcgagtaacagatgtttccattaaaaaactttagaatacacatatgcagggtgttgaggccgatgatcaagcaatgaccatgcggcagattaatgcagaccgtaaccacaatctcaggtacttaaataacgtcatacccggtaggcgggtttacaaaacgttttcgtaaacgtttttagccgaaatttcgctcaagaaacattatgtctgcttagtttgacagattcaaacaagataatgacgatatctcaatcaccgctggcacagcctctgcatccacagtgaacacattctataaccttctcctctctgagatgcttggggacccggcagacgcatgtagttgcaaagttgtggtctcgtgtctgtatgcatcgaagacagcaaaggcgctcataacccggctgaaaacacacaaaaagaagcaatgatacatttgatataagaatgcctgacaaactcttgtgacaaaaaagcatcttctggatttgcatctaaaaagtgactgaaaactttgacagttgaattcgtcacgtacgtctcacaatattcttagggcaatttaggcccctcgttatcaatgttcagacaagtatataaagtagtaatatggaacacaagtattgcatccctcccaaatctgccaacttttatcagatgtccaggaaaaaaaatatcattgggtgttagaagtctatccatgatttgatttctggttacatcagctgctagtatgccaataaaaatacatagcggaaaatatataaacatcttttagtcaactgccttttctttttgctcccaaaatcttatttttcatggtgcacccatataagagaatatctagtccataaatccccacgtcactcatgctgcattatttcactatttcctacggttcattgcaagaaatccaataaggcactactcaactttgacatacagctattaatcgcaggttcatacatatagattagattctaaaacaagatttatgatgtgtcatgtcaaactagatcagtatgtgatagcttaacccaatataattgatttactgcaagaaatggtaggatgcggttagtttagtgttttatttttcatagtacaagtacaaaaagtatggttcaaggcttcaagcagttaagttacattctaagcatggggaaaaaatgtgagaaacttagcggtgtatccaggggtctatggcttcatctgaattatctttgtacacaagttaattaaagtcttaaagattatacaaggtggataaggcatcttactaaactagcacagagtataaggaatgatgggcatcttacagagcaaatcatgggtcgaatactaacctttttccactttgcaatcagattacggtctgcataaccctggtccaggcaaaactcatacaactcttttgatatctccttccttctgtaataaagatcatatatgtagcgacttctttgatgggaaatacggaaaattggccagagggcttcgcactttctcttcccatcatgtgtgtcattttcagctacatgagtagatgatattagtatccatataagagcagaagtatcaataaacatctgaaaggggagcatatgtcataccttccctcattttggcatccaactcacggatagttggttcaataagctcccatcctccaggatatttgacacggcttgtctttattttaggcatgttctgtcaatgaacgtcgagcggctaaagcttgcaaagaaaccctgaggacatagagtaggtgtaagattcacaatgcaatacatttgcacggtcaagctcttccatcgaactcaagagattataagaacataatacacactattacatagaatttagccccacattgaagccttacatcagatatgctatatattccttactataaaggaactgtgttgaacacaaatagcacaacttaaacaggtattttgcatcttcaggctaacagtcttgtcgaaccatgatttaaccctattttgcaagtacaaaatatgtgcacctcgaatcggtgaatggacggtctaatacctaaagaactaatcgacacgatgataaaaatcgtggaaaaggttccccaaaccctaggctactcggaagttttttttttgagggaatactcggaagaatttcgtcccaataaccacatacgcgagaatttcgtcccaaggaggagacgaattgaacggatccaataaacagcgaggtagaaactactaaagcatccagcgaatcatcttcagggaaaaaaaaagggaatcatggagcggaagacgaataataacctcttggcttgggcggccttgcagtcgccggatggaagctgtggcgcgcgggggagcggcgatccagagggggcgcgcgtcgtccacgccgttggcctgcgctgcgctccgctccggtcgagcaaagacggccgaagaggagacgggcgggtttggagtttggaccggagctaccagctatatgtcgtgattctttttcccctccttttttttttttgagaggagctatgccggtttgacggttttctcctctggtagcagtagtatttgctacatcatgggcctcaagaatcaaaacgggacaccaactgtgctgaaatccaattcggcaaacaaggttggtttggtttgtagccagggtatacgattccgacatgctctttcgtttcggacaccggtggaattcgaaatttttgaaatccggtggaaaaccggtaaattccgaacaaatttcataaaccaaaatttgaatacaaatccttgagtttgccggcaagttctcgaaaaccggtcggttttggcgaaattccgatcgaaatcatcaaaatttcgatcagtaatttgttttcttttttaaattctttattcttttctttcttgatgtaagtttcagtaaatatacataatacatcatttttcgaacatttatatcccaataggttctatgaatatcatactccctccgtttcacaatgtaagtcattttagcatttcccacattcatattgatgttaatgaatctagatagatattgtcgaggagcgatcctctctagtaggtggtcgtgagacccccttttgtgagttcggctgggggaaatggcgcgatgacaggagtttacttccgctcgcagtctagctgcttgatcgttgtcgggactgtatgggagatcgaggattatacaggttcgggccgctaccgagcgtaataccctactcctgtgtgtgggattatggtgagtttttacaagggatttcaagctccgacggggacctagctgttcttccttcgagcttgagttctcctcgagtcctccctttttcccggtggtaatggtcctccttttatagttcaaggggataccacatgcaccgtttgcacctaccccccacgaaaaggggtacccacatggtcctaatcatatcgctatcctttgcttcaaccggaagcaacatggtcgcctggcttcaggtggggcccaacgccgtcctccgcctgacacgggggacatccctatcattctctattaattgtatgaaggcttcggcggcccatcacgcgcgtggggcgcccctagcagcgtgccgacgggacagggcacacctgcccccactccgcctgacacagggtggaacgtgggggcactgccctccgtcccgtcgcctgtgaccggtcacaggccggtcatgctcgattgacatgggtcaatcgagcggcgccgcacgtcccccaacgccgcattgaatacggcgtgggacggttggggtaccgcgcattaaaggcgcggagcatcgtctttcgccccgcctcctctccccgccacgtggtggccaggtgagggccccggggtagcacgccccgaaagcccgaggggtgcggcgtggcaccccgaggctccctggccacctctctacccgaggggcggggggaaacgaggccgtgtggccacgcgaccagatgggaaagatatttccctttactgtgcgtacccctgggcccatttcaccgacagatatatatgtctagattcattaacatcaatatgaatgtgggaaatactagagtggcttacatcgtgaaacggagaaaatagtatttataagattttttattttttatcaattcaaatttgaatttggatgaaactcctcaaaatatctcagacggtttctactttcgagtctcgtcgaaacatcgaaattccgacgaaatccgatcggatttcgtcggaatcgtaaaccctgtttgtagctcaactttgctaagtcaatatttatgcaatgttaaactatatagaatataaaacgattggcatggttgaaagccaaatgcaattttgataacaaaacaagcaaatgcctagtcagttttgttaaaaaagaaatcaacaacaccttattcttaaccatgataaagtttgataaagtttattttaacaataaagtaaataaaatttaactatattactccctctaggtcttttaatgacattggctagtttgaactagccagcgtcatatatacgaagattatggtggtataaatttagttagttttatttcaataataaaaggaactaagcgaacactctttgtttaacttatgatattctatcaagcccattcaaacaatgatattataacgaaacacttctctatctctgctattataaaaattaaagatgttttaaccggtattttggtatatcatccatgtttgagtcattttttaacttccttcgcttttagaaatacatatatgtgtttgagttagaatttaagctcatttgcttttgaaaatacaaaagaagtcgtacaagaaatctcttttagaaaatacccgcatactaacttaagataaaaatcggactcctaattgtagctcgtgattttctaaaagaaaaatccaagcaaattcctaccgtgaattttatcctttctaaaccgtataacaataataaggttaaaatagtattcacccgttgcaacgcatgtgtatttttttatactaaaaatgctcgtgcattgcaacgggtaaaagctattttaatcttattattgttatatggtttagctaggatgaaattcactatgggaattcacttggattttttttagaaaatcatgagctacagttaggagtctggctttcatctcaagttagcatgcaagttgttttaaagaaatttcttatacgacttcttttgtatttccaaaagcaaacgaacttaaaatccgactcaaacacagatctatatttccaaaagcgaatgaatttaaaaacctacttaaatacgggtgacgtaccaaaataccgaccggtaaattttttttcaatttttataatagcagagattgtaaatcctatcttagtataaagttatcccccactaactccttaagcttaacatgcaaagatgccacatcatcatccactaattaacaaaatgctacatcatcatccactaacaatcatcacatttaaacatcatgcaaacatgctatatctttatagtttttataatttaagagcttttcaaatacaaatatgttaaattatcatccaatataattcacataatgtttcaatgtatatctttattatgttttatgatatcctatatacttatatagttcatccttaattagttagtgcttaaatgattaatctatggtccaaattatctttctccttttttcctctaattaagtcatatcacatcaattgtttttagcctttagatgattaatctacggtccaaactatctttctgcttttctttttccataaagtcatgccaccttactttttacgtttgaatcaacattctacatactatttaaatttaaattatcataaaccatattaatttacttaatttgatgttatctaactatcttgcacgttatttttttattgttatcatactaaatttccgcagcaatgcgcggggtttcacctagtatctcaatgttcacaccacaacacattcagagacaaacatccaccaggtgcccccatgagcggaaactctaatgggcgatcgatcgcccatcccatcgggtagcaatcgccccgcgccccctcccccctctctcccttcacctggtttccatttttttcaccgcattacttttctattttagtaaatttatgcatctaaagtttatacaccttaagtttacacatctaaagtttagagacccaaagtttataagtcaaaaatttatgtatccaattcaaatttgaatttgaattcaaatatttttttttatatatagtatttttatacatctaaagtttatagacctaaagtttatagacctaaagtttataagtcaaaagtttatatacccgtttcaaatttgaatttgaattatatccaattcaaattttaatttgaattcaaatagtttctatatatagtatttctatacatctaaagtttatacacctaaagtttatagatccaaagtttataagtcaaaagtttacatacccgattcaaatttgaatttaaattcaatttaaatttgaattcaaattttatagacctaaagtttataaactttttttatatatatagtatttctatacatctaaagtttatacacctaaagtttatacacctaaagtttataagtcaaaagtttatatacccgtttcaaatttgaatttgaattatatctgattcaattttgaatttgaattcaaatattttctatatatagtatttctatacatctaaagtttatacacctacaatttatagatccaaagtttataagtcaaaagtttacatacccgattcaaattttttatatatagtatttctatacataaatttttctaacttttgtttttttaaaaaaaattagtggtgtactgtaataggaagagaagaagggaagaaggaaggggagaagtaggaggaggtacgtattgcctataggcggaggggtggtggcggatgagtcgaacatggaaggatccgagccgtctgcccaatttaatggaagcttccaagcgcaaccgccgaatcctcctccatcttcggccagcatagctcctgcctggccacccccaggtttgctctcgcggctcttccctcaccggtgcgccgcaccgtccaccgcccgccggagtcgccgtcgtcgccgccgagaagagggacgcagctgccgtgcgcggccgagtggatgtggtgtgaggcggtgaggtggagggaacacggggagctgggcgcacggcgcttcgagaccgccgcccgggcgcgccgcaccgcctcgctcgcgctctccaaccgcaaggagttcaccaccccgcacaacggcgccatcaactccctccaggtccacccccttcttccccctcactccccttttccttctctcaccttagaggcttagatcaatttgatttgtacacccccgtagatggaatcttggcgtatttgatgtgcaatgtgtgagtcgctcccgctggtgttttgtaatttcacaatatggtcaggttgatttgacagagcggcggtacctactcgctggcgcatcggatggatcagccgctatattcgatgtgcagaatgcaaccgaatacgaagccgggttcattgccaagcacaggagcattctgcttgtggacaagcagcatgaaaatggccacaagttcgtggtatcgatggccgtatggtatcctgtggacactgggctgttcgtgacagcttcttttgatcagtatgtcaaagtgtgggatactaattcgactcaagtatgcattcatctgctttgtggattgcttatttttcttttctcttgcctcctttggtggtggcaacggtgtgatcctgatgttctgatttttgccttggctttcttttcctaggtcgtaatggattttaagatgcctggaaaagtgtatagcgcagcaatgtccccaattgcaacaacacatatgctgatcgctactggaagtgcggatgttcaggtccatttatgtgacattgcttctggagcctttacccacacgttgtccggtcatcgtggttagtttcttacttctagtgcagtgatgaaaatatgcttgctttgtttgtatggttaccaccttatccttggtatctgacatgtcagatggtatcatgtctttggagtggtctacttcaagtgagtggattttgatgagcggtggttgtgatggagcaatacgattttgggacataagacgagctggatgctttcttgttcttgatcagtcacggtctcaactaggaaggcggcctccttttcttgagggcacctcagataagatatggtcaccattatccatcacttacatttgttttcagaatatttggttgcaatgctaaagctggacttccactattattttctgcaaaagcttcaaaaatgttacagcttcaagtaaaatattatggctgtaatgctagatcaatacagtcagccttcaagtaaaagctgatttctgcggctattaatttataggtttgtctcacatattagtgtcagtatataggtgctatggtatgtttagtgctccaattcttacaatataaggtctgcatacattgtttcttgttgattgttgtgtcctagaaatgacgcgcaaactcagccttccactctagttgtgcaaatgatcaatgtattcatttttaattttgaccaggatcctttgaactctttacaaccttcatcttcttcaaagatttactctgcacagcagaggacaggcaagagtaagaaacagtcacacaaattgcacaaaagtcaaatccctggacatggacatatccaacagagattgcaccctggtttgtcttctagtcaaaattgtgcaacggcacattatggtgctgttacaggattaagaacaactacagatgggatgtaccttcttagctcaggttgattgaatttaattgctatttctatgagcattcgattgctattgcttgaaaggaattattgtctatggctatcttcttgttatgcctgtatgcagtatgcattaatgattgttatcctctctcttcaggttctgattctcgcttaagactttgggatattgattcaggctgcaatactttggtcaattttgaagctatgcgattacagactagcaaaccgctacaattagctgtcactgaggatccatcacttgtattcatcccatgcatggcaagcattaaggtgtgttgtcattttttagcttctcagtttggacgctgaattttagacttcaccttgtgttgccatattcatgtaggcgtacaatttatggtctggtatgacatttcaaacattccgggggcactatgaacctgttaattgctgctactgtagtgcacaagaacaagtaagtcttccctgtactcctatcctctgttaaccctgaatgttcccgcatcaataccactgctgagtcttttggaatccaggagctttatactggcagcaatgacatgcaaattcttgtgtggtctccatcaactccagcgtttactgaaatggtatattttctatttcttgttatcatatatctttctgtagaattttcctatatcctatcaaattcaaatttcttaggagtagtcgggcatattaggatattatcgcataagcttttttaggcatttgattgttagcacttctaagcctctgcaagaagatgatggcaagaggcaaacggattttgtagtcgatgacgataactggagcgactgagaattattcatgaggcaaacggattttgtagtcgatgaggataacttgagcgactaagaattatgcatgtatagttgtattatacactgaacattgagcgactaagaattatgcatgtatagttgtattatacactgaacattgacattagggatgttaacaggccacgtttttttttctttttttctttttttaaggggagccacgtttattactactgtacagtacttcatcctgcagtttcacccgaaatatcactttgataaagacagctaagtgaaatgtaaatatgccagattctctctccgataatgaaaatgctcctatgtgtttacccaactgttatgatatcatgttaacaaagatacatcagatctctttatctggtaaggagcaaggacagaaatgctcctatgtcgtagggtcgtgctccctacgagaacttgagcacagcagcgaagaaatgcctcaacacgttgctgttgatttgtttaaaaaagcttcgacagcctaacaactcaacaatccttaaaaagagatgaagcaacaaggctgtatgacttccaaaacttaaacagcgatgcatgaaattccacctaatatcgtgcagtttttcagctgcatcaataatatgtttaaggaaatgaataagaatagctatcaattataattacaattacaattacaattacaacagatttagcgaatctggatcgccaaaggcacttattgcacttatttcagactaatgtcgaggaagaatcgcatggagtgacagtattttctattttcaaaccaacctgcaatgaattgctggtcccaaaacgcagagaacctcgcagctcaggtaaagcttcagtccataaggctatacagctctgtcgggagttccaaagataatcagttatattgcaagcacattgcaagaagtcaatacatacaacccaaaatggacacggtgatcagaataacagtagaggaaagaaacggatgaaacataccacagcatgcaacagtttattgtgtagatggacacatgcagattttcctgatatgcaaggagattcctcaagtgtgctcttgtttcttagatcctctgacaccggataatgcctgcagcacctccatagcacaaccatttctcgctacctttattcatgttccatctcaaccgatgcaatgctacagctttaggaggaaagacctcaaaattttcaggggattcactacccctgctggtgcttgtgtcaaaattctcttgcattgaaggagcagctaaaactatggcaccggtttcttgtccttcatcaggttcatcttgttgaccatctctgatgctcggatttatagcaccattgtattctgtatggtggttaagcaggcatgtcaggtacaagcaaaatgatacaagttgcaggtgacagagattacctgagttggtaagaagtttcccttcttctataacatgcaattgagctacatctttgcaagttttagtagcccgtttggtccccagaggaacatttgacaaaggagagtttggtaatgcgataccaattttaatggttgttccctcctctgataatgaaccacaaagaaaatatggtacacggttcctcccaggttccttttcccagaatctcggagtaagctacagtaagttgaatatttctttagcaatgttatagagaatcacaatagcatgcataaatcaatagtatatgtgctgtttagtttacctcaaagcaaacagcagttccatcagccacacaataagccgcatagcctggatatcagcaaaacaaaattacaaattcatgaattatcatgaatatttgacatttttactctgctcacatgtggggaactaaatattgatataggctataaccaatattccgatacttgacatctactatggttggacatgaggtgaaatgcacctgtaatttctgaggcatggacactccagatcaaatattcagacaattgataggtagaaacaccctgagttttcgttccaacaaatggccttccagtaaaaggaacatcatttgcgattcttgacaagctaacgaactttaatgtgccatcttccaatgatatgacaacacctctgaacacaaagataaaaatataacagttaacattaccattctagtaaacaaaagggtatgtctggcctatatacacacaatatcaccatgaatgaaacaatgtggtctatgtaatcacgtctactttgatccagttatacatcaagaccatgtccagcgaaggaagcttgcatatttagaaggtacgtgggcaaatacaaacatttatattaataattatgtaaacaagtgcaaatagagtgtttgcaaaaaaaaaagtgcaagtagaattgcttaaaaaaattctgatgatttaatggaacaaattatataaacaaagacaatatccaccttagcacacaataacagagaagtacaggtcctatgaaccacgggctaagaacataaattacatgactaaaacaattgtcaatagcaaatatggtttctagtatgtgttccaacattaatgaaaacatacatctccatttaaaattagtgcagtgtttcaaagacaaggaaaacagcgtaaacaccatgttagtgaagaaaaatcttgtgtaatgaagaaaaacaagtacatttagtgcttaacaaatattaccttgcatccttcaaccattgaagacttattacggcccttggagcagtagttaactcccaaagatgacgatatggatctctgcagcaaagaaatcttatgagatgcactaaaattcccaaatttacaaaacaaaaacagtagaaaacaacagcaaatccaaggcggctgtgacaggtagtgatttaaccataacaatcaatatatctattagacaaacatactgcagcttctagaacaagtttcttagcgcccattgaaaaattaaagaaaaaaaccgtatatcgcactggattcataaagaaactcctactgacatcattggtccatgtgataataacatattctgcatatcgtgcctatcttttgtttgttaactcggaatttttaccattaggaaacaaacagaaacaaatatgaatggttcagaaattggtgggtgccacgaattcagagaggaagggggagagactaccctcaatgttaagacctctgaggacccatacataatattagaaattcatgcaggataggagagtagtttgaaagatgctttaaacattgcttcagttcacaacaaggccaacacctaccttaaatcccagaatttcagaccatcctctccagcagtgacaaaggtattcacgttttccttactgacagaatgacaagagtcaaaactcaaaaattatcttttggaatagaccagaagtaacagtacaactggctacctcacagatggtgcccacgacacggttctgatgggagcagattcagcagttacacacataaaaggttttgaacctgtttatcaacagaacgcatgatttagttttgtttgcaaacagaacagaataagaaatgcgaagatttgggaactccagtaacttgcttttaaaccaataaagcagttctacagtcagacatgttgtcaggcaaagtgtaaatgataactgataagagtgacgtcgttggcaaaactatctaaataccttgaaatgacaggtttgcagagaacttccataaagcaacctggaatataaaaaaaagtcaatcacagaactttcagaacagcaacttgaaagactcaaaggtcacaggatttatgttaagaaaataattttgctgggtaaggaaaaggtaccgttccatcgtgacatcccgccaatatcatatcatgagagggtgaccaatcaactgtcaagggaatgctgtttaccattataaagaggcaatggcttcaaaattaaagttcatgctgaggaatttagaaatatatccaaatcttccacctagtttgagctactactagcaaaaaaaaaagtctacaggtccaatacctttgtctgttcccgcactttactttggcagagctaaacacaggcttcagctttaaaaatcgagggtcagtaccctcctttgaagaagaggaatatattttctgaatcatgcttggagatggaacttcccatctgtgcacaaaaatgaattacaagatgataagagggggtgatagatatttaaatgagataaataaggatctacaagagcatacactcacacttcaagcgagccattccccaagagtactgcaagaaaacccaaacatgatttatgttctgactgatttgctgaaggaggtttccattttacgtcccaagcaacttttccattatgagctaaacataagacaacccttggtagagaaatgtcttttgggacacgagaaagggtcttttctgcagaacaaatcatattatcatctttagttgattctttgaatcgagccacttctgtatcttttagttcatcaataacctgagcactgttttcggaaggaacagatacagcctgatttgtctctgcgttttcaaagttacaagcaggagtacaacatgaagtatatgcagttgatgcagaagatccgtccatgttctgtgcttcaacactaagcactactgaacttctttcatttgaaacagatttctttttatcttgcactctgccctttccgggacatgattctttcttgcaattttcaaccaaggacgcattgtcgcttgacttgggaattgtctgagttttttgttcttcacccctgcatgctttagaacaaccgcattccgttgaaattggctgctttctaggtctgcctctacccttcttggcacttgattcttccttgcattttgcaagacatatgccctgtgctggtgttgcagcatgagatgttccaacactcaaatggacactgttctctatagcacagcttgatggaccaatatcatttgctaaaatgtcacaattactcttggccaagaccacgagattatttgaattggtcagagtagaacctttctttggggtctcagtaccaggaacaaatacacaactggttgtactcggaaatggtttcttcctaggtcgtcccctccgcctcagaccagttgagttactcttgttgcctgattcaggtaaaatatacgtaggcaacatggatcctatgtcagactgtccagattgcatggaattctcaatatgaattacttccttttctggctgttctctacccctctgacctgacaatggaactggggaggctgcatcaactgcagcatgagttatattagcaccagacccagtattttcagtgggacccaaaccaaaatcaattgaaccaggctgacagacagaatcatttcctaattcagtatcagtgcctggaagatgcttgctgttgcttggagcaggatactttcggggcctccccctttttttcttgggctccatgcaggttaaagctattggagatagagctgtagacaagtcttctgttagtttaatgccagacaaaccttttatttcaacaggttttttcctaggtcgccctctaccttttcttggagttgattccacaggattaacagttggcatgggataagctattgcaatgtcacatgaaacaactgctggactgacaagaggataaataagagcaaactcttgacttctgtcgttttgggatgaatcttccactttggcaattggcagtggatattttcttggtctgccccttggtcttttgacacttggttccaagtgatcatcagaagttgtgatggtctttcttggtctacccctttgttttggttgattggatggattatatttattgcatgcaaccaatgactgatgaggatgaccctcttcagatggtgctaggagacaccaaacttgaattatacctctcccgattaacggcatgccaattttatggtaagaagaaccaggagggtgagcagcaacagcaagatactgcaatgtataggagacgtgcaaataaggttatcagctctcaataacttgtactcttagtcatatactttttttcaaaaaccagcaaatacttgaagatataaaccataaaaagaacataatactaatttcatagacaccgcacattcaatgcaatcatgcaattagtctgcatgcaaagatgtccttgggaagaactcccttcggtcattttcttatacatgctttatctcagcgcaaggttttattaagtaaaaaagaagtaaactgccattttatcgtcctgcaatgcacagcacatagaactggaaatgttgaaccagattcactgctttaacaagagttggaaaagatgagaaattttactttgattcctgtgagcatctaaaatgggaaaaacaaatacagaaaaccaaatatgcctaataaaagtaaacgtggggagtactgcaagagatgtctttaaattcatgtcaccataaagtatgtcactcagtgaaacatgttaattttcccattgacatatgaactaaagagcactcatcatactcatagtcacagcaagtagtggatattggaacaaaaaatatgctgatgcataaacaattttgaagccacaacaagagaaaactttcagtattatcatagttataacctcacagtttatgggagaatgaggcctgtcacacaacctagggcaccagtccaacgcccaaacattgcctccggcaaatataacgaaatctgagctgcaaaagctaaaaaattattaaacataatttaatcaagatggcttcatagagtcaaatgggtatgaaaagcaaggagaagtgaaagaatatatacatggcaggtaaaaaagtattaacagtgtttatcacactgtgaggcaggtactaaataaaatgagaagtgcaaaggcacaaaaatagtattagatcagatctattttcatcaatcacaaaaaaaaaaagcaaccccccacaacccccaaccccaaaaaaagaaaaggaagaaggtttggcacgtttgccaaacccaatgtacgattgttcttctggaccaaaagaatgacccactactcccaagttgatgtggttagtagttttgaagtgtgtgcagtcaatttaagaaaccttaataactagcatactcttagtagttttggagactgtactgaaatctttaaacaagtttggagggctttcaaaataagattcaagtcccgcatctcgtgtttcatagaagacctactcaaagagatcaaaggaggtattccctgaaacctgaaaactactaaccaatagcaggaatacaatatatgttgacaattagtctgcttattggtcatgttacagcaaattatcaactagtgaattgccaaaggagctaaaataatacataagcagacatcttgggttattcctaatatcaactgagaaacttaacatagcctatctccactaacagtatgacctttattgacaaatatggggaaaaaacagacaacaagataactagattgacaagattctaaagtagtacagaaagaactccataaacaatacctgtctgttttagccttcccattgtctaggtgtgtgatctgcagtgtgatccgaacttaattatgagaatatggtccaaaaggaacaaaagatgatataagaaatctcattcagctgaacacaacaaaaaaatagcctcaagaacttagcgcaaggcaccaacagcaactgagtaataacctgggggacagatgcagacgagaactgtggtaagtttatcttgtgtgtgtcaactctggatggagctgatctggcgtcacaagtgaaactaacattttttggctcataagagaagtgcctccattctctgcaaagatatgaaataactagcagattaggtactaaataatattgattttttttttaaaaaaaaagaaggcaatcagattagacaaatgaaaaagcagcttgtgaattccatttaattgatgctcagaatgactgttagaactttccacaatctgttactcttggtgctgaaaggagtcgtcctcatgtgcataagcgagctgaacacggcgaacctaaaatctgacccaactatagactatactatgccaaggaaagtggtctaacactatcagtggacaaattcaatcattgcagatagtctgtttggacaaaaggctaatggttataataaatgcagataatttatctaatgtgaactgctaatagttgacacttgacacatttggataaaaaccaatgcattgcacttagggagcaagtatatgtgacaatgtagaaattttagtcagtaaaatttaaaatgggcatggaggagaaccaacaatgcagcacgttgaaactatgcagttccaattgatgcaaatcagcttacagtgagatggatgatactagaaagctaaggttctgagcagcctttgtatggctgtaccagctgatcagtctcagttgagtttaacatccttatattggtgggtgctaaaacacagtgagtggtgctttttaaaaaaaaaaatctttctggtgaacactgggcacataaattttttcttctactttaattggtgattaaatcaaagagtactaactagttatagcatgctactataggttgctaataactaaagctgttactgaaactgccaatcctgaatacaaagtaacagctaacaagtagtctgcacaaataaaggtggggctcactgacttagtgacttatagataaaggggatcaagtttcgctactcctctgtgccttaaaccataacatcaaatggtaagctagaaagtcacaatgtgcataaatgatcatcgatcagagtcatcaaacaacaaatgagtacagattaaggaaatatatctaccagaacaaaagtgacttaaacttagtgaattagtaataaaacaagtaacagtgcaactgcattttgttcatgacatgaaaaaaaaaatccttgtatcgttctaatcaatagaaaaacagaattgtgcattgagctaatattgttacctaaggacactggaagtaagaatatggccaattgcagtggcaaaagccaaatgaattctaatagccacaacaggaataatgaaacggcaccaaagcattcctgtgacaactgctttttttctgtttgtgtggcagcgatgtcttaggatctaaattaacaaattccaataaaatttgccaccgtgtgtggcacataaggcaatgaataaactacagagagcttacatgccacataaattttcccattgaaagctccgtgaaattgcatcaatgactaacaaattaatgctttgctgataaacgctactattaaacacaaattcgtccactccacccagctaaataggccaacaacagaaagttaccaattttgccgcggtgattaggtaccggattagacagagcaaggagggagtttctcacctgaggaaagttattgaggaggcgagccgctcgacttcggcgtcagggaagttcggctcgtgctccccggttgtgagctccgagatggcgtgcaccgctctggagaagacctccggtgactcgtcaaatacgcagacctcgacgccatccttaacctcctctccttcagtctggggcggcgcccccgtcgcctccggcggcgccgccatcgccggcgaatcgagcaaagagagagagagagagagcactatctagggcttgatgagcggttgagccgcgggaaacgagaatataggagggaatcggcccaattatgccttgtttgggtttttgggtcgagaagtgcaagttccgccaagggcttgagatcggcccaattaagcagagcacgccaaatccggtggcgagcaacgccggtggaggcctccgccgtggtccaggctctcgcgagccccacacgacggaggcgcggagcagcagccgcccgctgcttgcgtgcggagcgggagacgacggcgagatacgtgtccgctttgtttcttctgtaacgtgccgcgcgccgccgaccccgcgccaccgcccgcgcgcagccgccgccgccaccccgcgcctccgcccgcgcgcctgccgcccgtggccctcgccgccgcgccacccgtccgccgctgccgacgccaacgacgccgccgccgggctaccgaggaagacggaggaggagagagaactggaggagatgtggtatgaagggatagttcagtggcattgtggtgaaaatctcaatctctatctctatctctatctctactattataaaaattaaagatgtttctacggtccgtcatccgtgtttgattcgattataaaaattgaagatgttttcgcggtttatcatccgtatttaagtcagttttaattttatgttttggttttaatctatatctcttctctattatattataaaaactctatctttatctttatttttacctatattatataagtttaagatgtttttgccagggatttttgtaagtcgtccgagtataatgcgatgcgcagtctgattccctccccgtgcggttttttgcgatttttctaaaaaagataaaagaatcggactctaatccaaccaaataaagtcagaagagagatccacaagaactcaaatacaccataaaaaaaatccacgagtagatcaaccgattgctcccaacccctttgcccaaaaccacaaaatcactcagttgcaatcccaaatcaaaatcaagaatccccacaaaatcaacatcccaaattaaaaaaaaaactagccgcctcccacacccgctctcctcgtcgtcattcgccgccaccgtcgttgccgttgtccgcatcgctgctttcggccgctaccggctcccgagcccaccgccgctcctagccgcgtcgccacaccggggatggggccgacaccgtcagtgccgtcagatccaccgtgggagggaggcgagaggggtcggacggagccgccgccgccagatccgtcctcggccgccaccaccgcggccggatccacccgcggtcgccgtcgccggacccatcgcacgagaggcgagagagaggatgaggggaaggacggtcagaggaagagagagggggagcggcgccgctggtgggtggagggggagcgacgccgctagggagggggagaggcggcgcgctgagagagagggagggaggtgggtcgcagtggggaaggaaaggggtcagcgaatgagggttagggttagcggttttgatggattcagaatcatccgagccatcgatgaaaatgaacggctcaggttgatcccgtgtcgggccggcctctcttcccgggccgcaacactgctgggctgttgggccactcgcgcgaatgcactagcagaccggcgggtctatactctaaagaggccttttctttcttttttttaaccttcattatttctctagaaatatattttcttaaaggcccatataatgtaaaactcaacataataatataatattttatatttggtataattttagtttacccgttgcaacgcacgggtattttttctagtacactaaaaaattaaatagtagtgggtcttttggggtggagtggagctgtggagcagaaaaacccagctccacccccgtagtacaattttgtgaagtagctatgccaactctgctctaaaaatagagaatccagattgtttggcacagttttggttccacgtaagttggagtgggagctagagatggccaaatggggccttagatactcatggcatgcttttcaaactgctaaacggtgcgtttcgtacgaaaacttttatatgaaagttgttttaaaatatcagattaatccatttttcaagtttgtaataactaaaacccaattagtcacatgttattatcacctcattttgcgtaaaatacttaatcttcatctttatcttcaggagattcaaacaccaccgtagctagagtttaggaaagaaacggagaaatagctcgcttcggtcttgttcggtattgagaaggattgagcgggaataattccacaccacaatagatgtggaataaatccgtttcaattcttccctgaggctttgttcggtttgaagtggattaaagatgattgaaggggattaagagagaataattccaataaatttcctttaatctctgtctcaggattaaccgaacggctccttcgggggagggattccgtcgccggagtcgcggaagaggagccaaccggcatccgtatccctggacctcgcagatggggttgttcaatcgagtcggtggcccgccatcctcggatattctgtcggtttcctattgagatctatacgggcctgaagttatgggctgaaagcgtaataatacattaggcccatatagcttctgactttctgcaagacaatgaacaatcaatcggctagtaaacttcctttagagcaaggataataatacagccagctgcttacttgtagcctatctatcagctcattcatataatggttaactcttcactataaatatatggtctacctgtctgtctcacagattttcttggttcttgtgcctaagccggctgtaaacttacagtccgcttctcatctctctcctctcctctctcatccacatcagcattcagccttcttatagccctctattatatttgctcttatcttctttattattatcagcgctgtatcatcatttcgacggaatcttagccaccatatagtactccgggtgccctttcgtcagcatccaaagtcgccattagcgatagtgtaaagaaaaagacagacactaagggcacccacaatggttatctatatgctctctacaagagatccatgtcagcatattttcctacttggaagagattaaatggagagagagagcaaagttatctactaacctagagatagtctatagagaaaaacgaggcaatggattagagagttatagatacccatgtagacatactattgaggtggtttactattaatttagtctattgctgagatgtacatgttttatagataacatcttactttaccattgcagtaccaatgtgctcccgcttttccgtcactgcatcactgcatgcacgcagaattcctctggcaaatagcgaagccggtttgctggaggatgtggtccgcgagacagcggggtggtcaaatctcctcctcccgaaattaggttccaacgattagttttttctttttttaaactcatgtactccctccatacataaatattcttacaccgttgactttttaaaatatatttgatcattcattttttttaaaaaaataattaactattaattcttttcatatcatttgattcattgttaaatttaattttatatatacatataattttacatattttttaaaaaaaatttaaataagatgaacgataaaacatgtttaaaaagttaacgtcttcggagggagtatttatctaagagaactagggtcaagttacacacttacacgagtagcagggcggaatggcggatatagcacggtttactggggtacaaccagttttgcagaaagggccctctagaatgaccaaattacaaatatgtacaacattttgtagaaaaagacctacgcataagtagaaaaaacaacaggtccttctcgtcgatctgctgtcgacgccaaccgccaacgacggtagcttggagctcagcttcggtggtgcttgtagaaaggtgagctgcatgatgtagatcccacacacaaaccttggaggggcctcccaaagatgaaggttgaagcgtcggaccgaaaagagaaaaacttggcatctccacagaagatttccacttgagttcttgaaagaaatcaacataacaataggcacaacgaaaaacagctatatccaaaacaccagcaaagataacaataaaagcacagtgggagccaagatacatatccaaatgggcctccttgaatgggaggttgagggcctctcggcaaacttgtggattccatcaaccatctctttatgaactcttgtcggaatttggggaagaggctgcttggcttggatagtgcttggcagagatgaaattgtaggccggtgtaaccttcttttgtgcaaaaccgatgacacccacgacggctaggggaagaacccaggtgcctcagctcaccgacgacaaggaccaagacaacaggacgagagtagccagcgccggtgacggcgacagcgaccaccttgaggagagggagcttcgagagagagcaatagctgagttccaacgtttagttgaatacactttccgcttgacgcacacacctgaagcctttgttccggtgggctggactgctggactagatcggccagaatctacgccgcgcctagtgcccggtgatccgatcgggaccgatgctccggtacgcactagcccctcgtgcaggaaaaagaaaagctgccggcttcggtcagatggagatggttgggctctatgattgcctttgcacgggaagcgaatgatacggcaggagaggcataataagcatgagttgtcgaagcaataacggtgaaacccaacgacgagttgtcgcgctagtgtgtggtacactggtacggtatagtgtagtacggacgcgacaccgatcgttaacgagcaacacgcacgggatgtgactgtctgtgagtctgtcggagtttcagtgcagagcttggacaggaaacccaacacaggagcagtatttccgggtcttcatagttcacatacacacgagagcaacgagccaatttgtcatgaattcagttcttttacacagctcactgccgctcgatcaaaacctcaaaggtgaaaatggaacgacgtcgtcatcacacaagtcgccatcgccactcgacacggtcaaaatattcaaacagtatacggcagagcagcattattcaaccattcttatcctagattgttggctcttggctgtcctcggcacacctgaaaactactgctatagattttaaggagcagtgggtaaaaattcagctggtgataaaacttttagttcattttctaaattctatcactacatctttctaaaatctggatgaaaaactagattgtttgaaaaaacttttaattatgaggaaactgcagctttaacctgaatcctgaatcctggcacacgcattgtcattttcagccgatgaaaaatctacagacgggaccaaacgaaatggatgccggcaaaaaccatttactgctaccagtttacagtggaaatgtctgacaagaaattgtttctgctggacacactgaagattgacctggtccatcttatgagctttgatgcgggaggacagggtcaaacgcaaccatccaacaaactcgtgtaaaaccaatgcaaggtgtgatggcgcactccatctctctagattcgtggtgcatgggtttcgagattggaaagagtacgaattacccgatgcatgcgtgacaatccagtcagtattttctcgttttttaatggtggggcccacctatcatatatataccctctcatctccttctcctcttcccctctttcactctctctctctctccctctctcggcgagcagggcagctcacggcgacgggtggtcagcgcgcggcggcggagccggacctggcagctacagcccacgacctgggatgcggaggcggcggcagcgtgggacacagagaacacgcgcagaagcaacgtcctctcctccggcgacggcgctagctcgtcttctccggacgacgactccggtatgagcaaatccagcgtcggcgtacgtccaaccacgccacaagccagccgtcgtgtctgcgagacggccgggtcgaaggcgatgaacgcgccgtcgtgtctgcggggccacggggtcgccggctgcgtcaaggaggcccaccgccttgtcgttgggttgcacacgtacgccccgatggtgtcgctgtcccggtcgacctggaagcagagcaggaggcctcaaggccggcaccgcctgcgccgtccgcatcggcgacggcgatgtgatgcggaggaatcacattttagatagtgatatgatggtgttgaacatgcgcgcacgcacacacttgtccttggaaggcattgggaattctggttgaagttacagatcgagacgaacaccgcatggcttggagaatgtgttcatatggaccagaacaagtaaacgttcatgctcattttccttggtggtcaagttgcaattccagccgaagcaaatggggattaacacacgatttgatcgataaagcacacccaacgtttcgtcaatcacagcagttgcggaggcggcggcggcggcactggatgcggaggcggcggcggcggcgtggaccggttcaccctcccagccacctagctacggcagctgctactcggacctggatacccgaccggcaggcgcgctgctccgccgacgccctggacaccggcgcgacgagaaacgactccatcgctgtgcgcgggttgtacggcgtctcggcgtcggcgatgttggtggcgagcaccaccttgcgcgcgcccgccggcgctggctcgaagatcttggcctgcagctcggcggggaggttggcgtagatggggcagatcactagctccgccaccttgccgctggctctgtcccacgctgccgacgcctcagcatcccaggtggtgggctgtagctatccaggtcgggctccgctgccgcgcgccgccgactgcccgcctccgcgcgcgctgaccacccgccgtcgcgagctgcccctgcttgcagagagagagagagagtaaaagaggggttgtggagaaggagatgagagggtatatatgacaggtgggccccaccatttaaaaaaaaagagaaaatactgactggattgccacgcatgcgccacgtaggacaaaaccgctctggtttgggtcgaagggggtaaatcgtccggtattgaaagttcagggtgaaaaatgtctggttttcgggttcaggggataattcggtcaaccacaataattcaggggggtaattcatactttttccttcgagattctcttctcaaacttttacttatcacatttgtcttaaaacataacaactttttacttatatgtaacttgagagggaggtaacaattttgacgggatcgatcgacagtcgagctgaccatacagccgatgaacggaatcaagcgtggagttggagtcttattggcacttggcatcctaaccttttggcatgtggaaatctcaggtctgccttcttcggaagcgccatggaatttgcctagcttagttcctgtagatcaagaaggataataagtaaagggagagagtccccaccttacctatcttttactgccattgcgtccttggctgctctggatgcaaaagaaaacgtgcacccgggcttcttgcagctgctggtactgcgtactagtttaatggcacttggttggcgagaggcccagacgaagttgggacggacggcaggaccacgaggaggatctaacacgagcagccagcggccgccccacgagcacatgtgcgccgcgttggttcttctccccccgagacccaccccgaccaccaagaattagcatctgtttatgtcgccgtactcgaacatatgcgtgcaacgctctgcgcctctgctccaaaagcctgctcgtcgcatactatactcactagctaccacgcctagattctgtgccacggccacgcctcgcatttcaatttaccactataataatcgctaaattgatctctttccacgcagaggaaatcatattagatttgcgccgcgcgcttagctatagctagcaaacgacttcgagtctactctactgtctacgacagtgttgccgttcgctgattcctcttctccagttccatttttgtcccgtatatgttcttctttgaatgaaccgatcgaacggcgccggggattgatttgatcgcagacgagtcgggctacgcgcgatttggtctgataggttcgcaatcgatcgattcccagaatctaccgctccatctcgagtggtggaggcaactgactagtcgtccagcatcaagtttggtgctgccaagtgccaacgcactcagccactcacgagtggtcacggagtcatcgatcataatcgacatgatgcatgtaacctaattaatattccagttcgaaaagaagcacagaagaacaaatcgtgatgacacgaaccagtttgtttgctctacctattaaattggcgggttgtgcccgctcgcacgtgctcgccgccggcgcactctcaccggcaagccgcctgcgaacgtggcggtcaggcccggcgcgaacttgggccgccgcgagctccgcgcgatcgcctcgatgtcgaagctccggacgacggcgacgatgacggctttcatctccatgagggctagctccttgccgatgcagacgcgaacgcccgcctggaacaccgggtaacggtacgggctctccgggacgaaccggccgtcccggagccatcgctccggccggaactcggcgcagtcggggccccatacggactccatccggcccatggcgtaggcgtggtaggtcacccgggtgcccttcgcgacgaccgtgccgtccggcagcgtatcgtcgccggcggcaaacttggaatcgaactgcactggcgggaacaggcgcatgctctcgtacatcgcggcgtgcacatagtgcatgtccttgagcttgtcgaatgtggcggccatggttcggttgccgtcgcccgtgacgcgggcgacctcgtctcggatggcggtggcgacctctgggtgatcggagaggagcagaaagaaggcggtgagcgccgaggcgatggtgtcgcggccggcgagcatgaagctgacgacgatgtcgcggaggtacttgtcgtcgtcgatggagcccatgaagcgtgaaaggaggtcgctgccggtggcagcgccgccaagcttccgccgttgtcggatgacctccgccgcgagcgcgtcgaccaaacggaccgcgtcccggagcttcctttcgtccccgacgttcaagaaccgcttcagcctccagattatctgcatgggcaccgtcgcccgccgcgcggagagtgtcgacgccgtgtcgaacgcttccacgagcgtcgatacaggcatcgacagctcgaggcagccagggtcgaggccaaacgagatcttgcatatgctgtcgaaggcgaagcggcggaacatgtcttgcaggtcgagcaccttgccgttgccctcacgtgaagcagagtggagcagagggatgaggcggcacctcagctcggaggccacgacacgcgccgcgaaggcgcggagcgccggagaggcgagctcggcagcggcgagcttgcgctggaagagccacgcgtcaccgtcgacgttaaatatcccgcggccgaggaagtcggcgaggatggcggagaagggagcgcccttgggatagttgtcgaagcgggcgcggagcacgtggtcgacggtgaccgggttggcggtgagcacgttgcggaggacgtgcacgtgcacggtctgcgccggcgaggtgcgcagcaggtgggcgtaccagtcgcagaggttgtcgaactctcccgcccacgacgccgtcaggaaggcctcgcacacggtgcagtcgcaccaccacggcgggcgcaggcgcaccacggcaaggagcgcggcgagggccaccgtgcacgccgagaacacgaagaaggcggtggccacgtgcggctgcagcgacccagccagggcctccaccgccccatgcaacgcctctgcctcgacgacacccatggagacgagctgcggcgcctgcgactgcgtgcgtgcgtgtgtgcgtggtgcgcgcgggctttcataggcgggggcgcgtgcgtttgcttgtgacgatcgtggcgtcccgggagggggccgttttataccagcgggacgtctcgtcgcccgtgataaggggtgggttgggtatatatgagtgagagattgagaggtcgcgtgtcacgtccgtgtgcgcgcgcaaggacgttttgaccgctcaattgttccggtaggcccccattcagcacgttgttattcccctcctcccatgtttgattcccgccatcccgtgtgggggtgtttcagttggcgaggcggagcatgtgcttgataatttcatctgcatgattccgtcgctgcagtggacacatgcatcgcccctgcgccggtgggtttttacccccgagccccattaggatgttctcttttggtaataaaaaaataagtaaatttcataaaactattggtattttgattaaattatcacaaaaatacaaatttaaaatgtgtatcataaaagtacggatttaacaccatatttatcacaaaattacatatttaaggttaaatatcacaaaactatatatttaatattgaagttatcacaaaattatgctggagctataaacattattgttgtgtgactaaattggttctaaacttgtagttgtgttactaaacaagtagttttgtgacacttcatcttaaatgtgtagttttgtgatacatcaagttaatctgtagttatgtgataatttgatcaaagtatatgtactttgaaatttactctaaaagacaatataagacaatataaaccattaatctcattggatcgaagagtatagatctatttatactattattctagttagccgtactacaaacgtagagggtattattgtaaaaaataggtctagatagatataataattatttaattgtgacaatatttttattcctttttgccttttttatagagacaacagaatgaatggccatatatcgatctagaaaaaaattataaataacaaagttatccctaatccatggattagtaaattaccgatttacctttaatagcaaacgatttatattatttttagtgatagtagagagctccaaagcatcactcggcagagaacacaactgaacggaagagagagaattgaaaccacgtactccctccgttttctaatataagggatttttacattttacttgtactgtttaaccactcgtcttattaaaaaattagaattattatttattgagtaaattgcacattggtctaggtatttttacctaagtttcaacatggaccatcctaaagacaaagttttcactttgggctagtttcttttaccaaaagctttcactttggactagatgctctcacatgtcagtagatcaggagataagggaggacgccggcaagcttgtgatggagatgattggattgtggacgtcggcaagcttgtaatagagattattgcaatgtggcaacacctagatatgcgaaggaagttctgcacgcatgaaacgatagcacacatctccttctttcgtcatgtcatgagtgggcttagccatctctacctaaaccgtgccacaccgcgcatcaaaaagttgtttgaattgagtgccatcacaatccaatcataatatctacggcgaggtcagtcacacatgcccaggttgtaaacataccctaccccaaagtgcaactcttggcaattggcaaagaaacatggtgtaaagtgaaaatcttgacttagccctagcccaatatgaaacactggtaaaaaaaatatagcccatgatgaaatttactcatatttattttatttgtgacttactttattatctaaagtattttaagaataacttcttgttttttatatttatataatttttttaataagataagtggttaaacagtggaagcaaattatcaaaatcacttatgggacggagggagtaccttcctgctttggccagtggccagtgcacgtagccttcagtgtcctcgtccctatgtgacgatctacgattccaggggagataaatagcctcgctctctggtcgaggtagtaccagttcaaatgaaccaaaaggatcggatcagcacgtgtggtacagtgcacctacacgagctaactaccgactggccggtcgagagagcttatcgacggcagggcgcactgcaggaatttactcgtgtccacgtcggatatatatcatgactaaagagttgaccgtacagttgtttgcacatcagtatattttaaccgtagtctccgactccgaggaactctttggacagcatcatattttgccacagaaccttcagaaaaacttggacgcaacacatttttacgggctttatattttgccacaaacttttttaatatgacgagtggtcaaacagtacaaacaaaaactcaaaatcgcttatattatgggacgggggagtaatatttatgctgcaaagatatgtctacgtatggatttattggctaaaaaggtgtgacatgacatagttatgctgtaagctaatggcctattggttgtcctaaagagaataggccaaagcaaaatttaaaatttaaaaaacttcacttgtttcatattataagtcattttgattttttttctagtcagatatttttatatttgatcaagtttagataaaaatggtaacattttcaatacaaaataaacataacatcaaaatatattcaacgttgcatctaataaaactaacactactaaaaaaagctttttttgttggcggacaatttatattttagctagcggccagcccaatcgctggcaagaaaaggttagtgaaaatagagtattttcataggctggaattaaccacttacgaaaatattgctggtgggtccgtaaagagaaccgccagcaaaaatcccccacacaaatccaaaataccccactccaaatccaaaatcctctcccaccctagtccattcacaaatcacaaattaaacacatatccattcacagatcacaaaaaaatatgaaaaaaaaatccatccactccaaccatcgccttggccgcagcagcacggccttggccaccctacaagccacgccagctttggctttctgtcgaagaagaagatcatctggttggaggagaggagcatgaggatggcatccacatcgagcaccagcccgccaagcagcagcgcgtagatgatgccatggtcgatagggaggatgccggtcttgtcgaggagcgcgaagaggacgatgacgccttgctcgtcgtcatgtacgcgcccttgaggaggaggaataagcatgcacacttctctcctcagtcgccgccccctcccggcgtcgaatcttcgccgcccgcacttatctccgccgccgccacccctccctgcgccagatccccgccccccgtgcttctcttcgccaccaccgcttgcgcgagctaccgacggtggggagggaggaggagagggagctgtcgccggtgagggaggagggctgggtgggtctagaggaagagggggagttgggaaaaggagctgaggaggaggtgttgggtggcggtggattttttttaatgtggcgatattttcactagcaatgctctctagtggccaccaacgaaaatcgaatttttgttgacggctgtttaagtgggttgccagcgaaaagttgtacatattcgctgcggctaccagcgaagatccattttcactggcggtccatagcccctcatccctcggagtattttcattgacggtgatcatgtatggctgttagagaaaaaaaataggttgacaccatgaaaaatcgattttttagtagtgataatatgatgttgtagatgttgctaattttttctacaaatttgatcaaacttaaagaagtttgactagaagaaaatcaaaacggcttgtaatatgaaatggatgaagtagctttgaagtttattttaagatatttttaatctagtttcttttttatcattgacttttaagttgttaaaaacacatatataaaagttttacagaaaaaatattttttatcactaataaaccgttaggattataattaataagcttttgggcaatcaataagaccctaaacatttatctcacttgatcagatttggttgtcaaaagtataacaaagtttagccaccaaaacaacccgaatttagctggtccacgatttaacaacgggaggatgttagcaatatagttggaaatgtaatttcataagctatatgtctgcagcggacgattatttagctaccccacgataatagtataatttggggacattaattatagtattattttggagatgtaattttgaattgaaattaaaaaagttagctatattttgagacagatgcagtgaaattaaacagttatatcgttctaaatatgcatgggaagtttcatatatataacatcactgtcatcaaccgacgacccaccgaatctagtgcacaaatatgatatcttgacttgatcagatacttaaatctaatcaggtatgtcgcatgctaattaatagtttcatcacttcagtattttatcctatcctgcgcaacaagattcccaaaacgtgcatggtggtgtagacacgtatgtacagttggagcaagccatgtgagcttgtgttggtcagttggtactaaaatattgtccaatatatgtcttctatggataatttaactatattacgttccgactccgttgcccatcgccagaccttcgccactctaagcttccctctaaattactagctcggtttttaaatatttaacgctgttacttttttaaacatgtttgaccattcatcttatttaaaaaaaattatgaaatatgtaaaaatttatgaaatatgtaaaactatatgtatatatatttaataatgaatcaaatgataaaaaataattaataattacttaattttttaataagacaaatggtcaaacatgtttaaaaaaatcaacggcgtcaaaatatttaagaacggaggaagtaccagagaactattcccctcttcattccctctcccctctcccccaccccactcaaaccatgacctaacccacagaaacctaaccatataggcttgttggagatcatggagaacacgttagagatgtagtctaaggtactggcgcactaggtggtgttcttttctccattgagtttgaattattacaaacttgaaaaatagattaatatgatattttagagcaactttcatatataaagttttcgcacgaaacacaccgtttagcagtttaaaaagcataccataaaaatcttaatattcatccaactcttgttggacaaaagaacaggacgagtccgtaagattttacctcatgttttgtatcgaatgtgaagtagcatatctgattttataatttttagtctagttaaacataaccaagaccaaaggattgggaaaatcgattactaacactacatttataaatattaaagtaaatttcacaaaactacatatattttgaccaaactattacaaactacatcatgaaattatagatttaaaatgatatgtcataaaagtaaggattactaacaaaattttcacaaaataatactactccctccggttctatattaattgacgttttggacaaggttgagttcaaacttttataactttgaccatcaataactttaaaaatatttagattaaaggaactagaacaatatatatagatttatcttttaaagcactataataaaagtaaacatgtatttgtttattatacatattataatagaaaaataaggtcaaacatatatcttgtagaccgtgtcattatccaaaacatcaattaaaataaaaccggagggagtaggatttaaactctaaatctgttgttttgtaatataattgcttaaatatagtctgctgtcagtttgataaaaaaaacatacgtagttatgtgaaatttttatcatgatgaccgaagatagctagaagacgccgtcatgacagcgcaatgatgcaaggtgatatacgtgttcgtgaatatttttagtctacttatttatctggttaccttatcaatctaaaagatatctactcagggttggtgagctgtgcttatatatttctgtcatcatgctggaccagagccaagccaatatatgttgcggcgaagagagatgagttaatgtagacacgtgttgccctggcaccgatatcccacactatattgcgagatgcgtactacatgcaatgcatggtgagtgtattattagattcctgaataatagtggttctaataatcttaattaattaagttctgtttttcttcaggcaaaagtggttctgccttctgtggacgtatctgattgaattacgaaaggacccaccgtttgtattctatatagttcttgtccttgttgccattcaatgattatttctagctgtgccttgaagatgtactatatagatcacatgtacatattacgtcgctgtcagtgtcaaccgcttaagacaaagattgttatacccgtcatctttgaaatagttgtcgcagagggacctgatagtaataacattggcagcagtaggcctggtgtgctcgaccaatgtccggatggaccggatgtctatcctactggtcactggagataaaaggagggaagatatccttttcttaccgctgttcaatgataggcccttcattttgtcgttttatgtcccgattatctgtactgattttgtgcaaatttgttgctttgggcgcacttttccaaaggttatttctatctgaactgttgcacttttactagaaggtgttaaagttgtctgaaactctgaatattcataccgcaggcgttactccgtacatgatccgactgagaggatttgtagccaatcagactctcatgtcatttgctaataatccctccgtcccaaaaaaatacaacctaatactagaatatacacattttaatacaacaaatttgaacataaagtatatctagattcgttgtattaggatgtgtcatgctgtagtacgaggttgagttttctgagtactcctgtaagcacgccgattgtctattcttgttggatattgtagctagcgcaatgtcatatttttttttcaaaatatttttctctcataaatcttcatgaatacatattttaaagaaaattctaaaaatatacctgtctcgtcacagcaagtggtgataccctcattgccgccatatggcgataagtctaacgaccctacaaagcccaactagcttgtcatgcaaatgtcatcgcagctagtgatgacatgggtatattttctatttctttaaaggtatattcttaaaattttgttatattcttgaaattttgtatgaacagtgtacgtatttgaatatttaatccaatatcatgatttcaggaggctaaacgtcatctatttagacttgggacctacaactatggaattgttaacttttttattgttaaaatcatccttatcaaaattttatatataataaatattggtgttatcaaattttggtaccgatggacgtgcttggtttggaattttggaattatcaaattttagtacagtggcaatggctatgtttagtttattagaattacctgaggatactacggcccagatatctcatatttgcgaaatattgaatggtgcttcaaaacatataaaaaaaatcagatgtttcatcgctcaataaaaaaaatgttttgggtgttttatcacttgataaaaaatatttcactgcttgataaaaatgtttcgatcaaatgtaacactggtgaaaaactgaccataacacaaagaccatattttatgcaacatatgtatatatttatcagaatataatcatgtgagatcttgataaaaagatttaattgtaagtaatataatgtataatcggatcataagaaaaaaaataaaaaaattgctacacataagtggttggctgtgtgcagaccgagtatgcagcagagaggagaaagaaaccatatagatagagcattgggtatttagtgggttggctgatattgatattttcagcaagccgtctgattttccccttcgcattggtcggccagactaaagcattttcaagaattacacagtacaacgcagacactcacaacgcacgcgcactcaccccctataaacacacgcacgtaaaacttacccctatgagtatcttcgaagactaggccggcaaatccttgagagattgacgaagtcaccacaggcgccttgttgtcgacggttacgtcgcttaccactgaaagcacaacgccgttaaattctaaaaaatccacttttgtggggagtcgaatcaaggaccacatgtgctactgagactcttgtaaccattaggctgttaccaaattttagtagaactaaaaagccgtctatatcgatatgcctaacctggaaggatgaagccgaggacgaatccggatcacctgtctgttagccctagaccggcggcatgcaggtgtttgccgacacgacagtcgacgactcgtctcttttccccgtttcgggcaccgggggcgccttgaccctgacatcgccacgattccggcacgctgcggttgcgctgccaattccccccgtggcccgcccatccatccgcttcctttcgaccgcgcccggggtccccccacctccggccaccaaccgttaaacgatacggacaaacgcgccaaccgctgcacgcgcgcacgcatggccctgccgcgcgcggggctccgctccggttgagttgatcgcctcgcgcgcgaggtttacggccattcgcgaccgctcggagtcaacctgtgcagtgcccacacaacgcaacgagacgcgcgcggaccggcggcaaggcaatgccccgcggcgccggtaatcgatcgaagcgagcagcgagggacgtacgccgcatggcaaccgatccgatcctcccagatggcgcggctcggcaaggcgacagggatggataccgcgcgcgcgccgctgctctgattgtgtgtgtgtgtgtgcctgacagggacgtgcagccgacgcgcggccggcacgtctagaaggcacgggttcgccggcacgtgacagttgacacacttcaggaaaacgagcgcaaccgccgcgctcgcctcggccaattaatccacgcacggatcggtcgcgcgcagcggtatgcgcatcaaaacacgtacacaattacacaattacagctcccgatcgtggtagctagcttgcaatgacttgacgcagaacacgaccggcgtatatgtatccatagaaacgacgacagtacatatcgagacaaagagaagagaagacggtagcacagatggcaccatcacggaggtgtggcacgagtgcaattcggatttgtcaacaccacgggcggagatcacacgtcgtcgatcgcccacttgcaggacctacaaaaataaacactatgattgtgtttatacgccatctaggatctacgctcttttgtcgctcgtgctcactttctctccctcgctcgcttatcctccaaacgctatatatttttcttttctaacgtccagaagcattcgattaatggtgacctttcttgtcctgttgcgtttttttacaccgatatctttccgtaaaccaaatgatttcggggtcttttcgtggtgactggggaggacgtactacaccatgggcactgcaccaacaaccggtcttactgtttgctatttgtgagatgggagagttgaaagatgtgcaccagatctcggcatggccagcaagccggatcaatttagtgataattaaatgccgcactcaaaatctatttcttttcctttgtgtcgtgtacacgttgcttgaagaagaacggccaaagcaggggccatcttatggtgtagctaggtctgccttcggccctctggtaggtgatcaaggtgtgcctttctattcgaacttggtagtcttggtgtaaagctcaatgtagctaactaaagtaaagcatggttaagaggggcctccatggtatcaaatttcacaaataaaatgtcatttagaaaagtctccagggatgatagatcagtggaccacttcttttctctctgattattttgtttgctatcaaaattttggaacagcttggatggcatttttaggttacggataagttcaaaataataacgggagcaacagaaaatatttttgtatacttatactttgggcaattaaaaaataaaggtaatcaaatagaaaataccaatttttttttctaaaattaagctctataagccgcaactcaagcagtcacctttcatcgtctgcttgttggtttatcatccataatttttttttgaacttttagagtattttgatatttttcttccattgtagcctattcttttgttattgacatgtaaatcactaataacaaaaatatataaaaaatacttataaattatttttgttgctctagtcattttccacaacttaattattagccatatatagcacaaacaatcatagaaccatgattgctagcacgtgtcatttaggtagatatgcaccagctaaacaatcaaaacaagctaaacaaacagagttctaaaatatatataacagagggatgtagtactgcaagatgacgttattttgtttttctctccagttccttttcagtagaatatatgaaagattcagacggttgatgattctagattttagtattcctggcaggcagaaactttggactggacaatggctataccttaattgttttctcttacaatattgcactgcagtacaacacctacactgccctgaagaataagtgttttttttaatatcacacctataattagcataagaataaccaagccacgtcatactttaatcatccgcctgcaagcatgacacaagaggacaagcgttgctgtaagcacgataattataacaagaaaacgaatgatttgaaccgtgataggcacatcagacaaaacgaaagagggtgaaaacctgctctccccctcgtgatggcgatcggtcagggcttgaaattctcatcaccaaatggtgacacatggctttgtttggtactcctacttggcatggttttcttgatactccctccatccctaaatatttgacaccgttgatttttttaaacatatttgatcgttcatcttatccaaaaaatttaaatgattattaattcttttcctaccatttgattcattgctaattatacttttatgtatacttatagtttcatatattttacaaaagtttttgaataagacgaatggtcaaacatgtttaaaaaagtcaatagcgtcaaatatttagggacggagggagtatgacccactatgtgatgttttggagagcacaaaagatattatcgagaacatttttttcattttccgtaacattttaagatgtgtttacataaaagatgtttgacataaaagctcatacagaactaatgcgaaataatgccgcttgatggttcccttgctgttctagatagatctagttattaggtgtatttataaaaccaattggttttaaacatctatatcacaaagctccgtgtgtaaaatttatttcaagaaaccacaaattttagggcaaagtgttccacaaacctcatacttgtacaaaatactccaatttcattataatatccaatattttcaagcatataggccgagaatacatatttctataccatttattctttttacttcctaactcccccaatttactgtatcagcatcacgtgaatggagtacatagacccaacaatatgtaattggtaattgacgtttattgagaaagtaactaatatatgtatctacttaaaaatatgacattatttttatatacatgtattatccataagtataattgccaaacaaaagatatatgcattaatatggggttttatgaagcattttgcactaaaacttaggttctttgaaacaagttgcaaaatctggggtttttgttacgaatgtcccagaacgtatggttttgtaaaatttactcaattattcaaatttgattagatataactcgtgagatacggcaggtgagattttccacagttgtgtgcttaatctaaacccaatacggcaggtgaaagcattgcctggtcgttgagccgacaaggatgatgtctcttggcgacgtgttccctcttaagggcattgtcgagacgcctccctccctacctgattggacttcatagtaaaaacctttgtcatgatcctctagcttgaagatctggacggacgacaatgacactccctatgttgcgtctgtcattggaggtgtcgtctaggaggcccctttactgcctcatatgcttttcaaacagttggtgcgaagcccttagatggtggcaggtcgcaggtctgtgcgagggagagggatatttcttaccctctccttctacaacctttcgtcttggtgatgttcaagaggctaggtgctcgatttttagggagtggtgctaggcgcgtggcacaattgttgctcctttgttagtctagcggtggccgatcctgtgctagacctttttcttggttgtgtgtaggtgctgtcggtgcatggtgacagtattgtgtttttttttcttttcagagtagtagtcttgtaatttttacatgcactatttaaacattgtattgtcttgtgtggttcctttaaataaatttaagcccatgcaaccatgcagcctcaagccctggaccaccatttttttatctttgatatccttgctccttcggtcttagtatatttgattggtgtttttacgtaaacatagtattgtactatgacatatttatatttggtctaagatgtatatatatacaataagggttttgattcaagattcatgcaaatatatcgagataaccgaggctgagagagagagagagtaaaggtgggcatacatcatgtagcattggcaaaaacacattgtatagtgcttgtttaattcccaactttttcttcaaactttcaacttttccatcacatcaaaactttcctacacacataaatttttaacttttttctttaaactttcaattttagtcaaactttcaattttaacgtggaactaaacacagccatagttgtatctgatctcacatggtaggaactatgagtactacgagaacagtgagacagatctccagttgagtgctactgctgcccgtgcctctcagtttcacaacttaggcttagtttagttcacactaaaattggaagttcggttgaaattaaaacgatgtgatggaaaagttagaagtttgtgtgtgtaggaaagttttgatgtgatagaaaagttgaaagtttgaagaaaaattttagaactaaacacggccttaaaaggtgcccagccgtttaggtattctataccacgtcaggcatgataatctgataaagaaatggcagcaagaactgagccatcttatgaaaagaagtcttgtactctcgcctagggggctattcctgcacatgaactcacacatggacgtctggggcctgcttagaagtcatttattaagtcctatcgcaaaaaaaaaatcatttattaagtattaggctacggcttataagccgaagatacatgaccaataaaaaaacaattgtataaaagcgtgtgatgaaaaaaagaaaaaaaacacgctgaattaattttaaattaagttctaaaaatcaaaatttaacatttaacgtggcttataggtcacatgtaaaaaataaacaagttataagttaggtgtggaaagaactgtccactgcatcattggacgtggttgaacagttccattgggtgggacgtgatgactgatgataccatgaaaccactgtgctcataaactagaggcaaaaaccagccataaactacactgtggaagattggttctagatccgtcataaactgttttaggaacattttcttgacgtagatacctgcattttactatcttctaacatgtttaccgtcgaattccttcggtctttttcggtccgaatcggagtgctattccacacgtgaaatggcgcatcttggctttataagctaaatcatcctatctatacgcaaatcaaagaagggtgcatgtgattgttaattcctcgactaatgtttagctcgattaagatcgatcttaccagacagcatgacaataaaggccatattggacatggaacagggacattggggcctccccggcagggatttgtgctcccacaagatgattagtttcactcattggatggtctaattgtgttagttctgtctacataagtaccaacttatgtgcaatcaaggctgggtcacggaccatccgcattcaatcgatgtttacttctcttcgctctgaaatctgaatgcaattatatgctttgcttcatcacgctgcaacagtcaggggcatttaggtagtcagactcggaacgtgtactaccagaatggtaatgactggttcagctaatggcataatcttataatacgaattccatgcaagaaatcgcaaggaaaattatgccacatggcaacacctatttcgtggaacaggctcgatcttgctagcgcgcgtgcagcaatccggaaatgctcgtgtgcgtgcgtgcaacgggcgtccaaaattttctggagtatcaatcaagcaattagtagatgatttaggtacataggtcatggctcagcgggctatgtgatggcacaagatgacaagaacacactaggtgaaacgagatattatgtatgcatgcaaatacccgatgcatgttgatcgatgcatgaactagaaaaaaaaaagaggcaatggcaaatttatcactattttaaatcgttattgtaagactgccactagaaaattacaaaaataccactagaactgtcattcgagtggcatccttaccaaattgaaaaaaacaatggcaaatttgcaaatgccccccctaaaaaaaagttgtgggagagaatgcgctgagaccattacgaacagcctgacatcacttctggcactatcttttcatctacgtatatgctcaaccgcttatcactaattaaaaaaaatacaaaagcaaatgctacaatataaacttcgatgaaaaacaaagcacaaaatcaactttaaaattaagttttaaaatacaaaatttgacataagcttaagcataagaaaaaaaaggggctattcatcccaaccattttcagggcttgttcggattattggataggaaaaacatagatagaaaatgtatcgaaataggaatgataaataaagaaataagaaagttaagggcattcggattgcataggagtataggacttgtatgttggaagaaaaaaagaaagagagagatagagcacttgagatggatggggcattcagattacatgaagttgattacataggatgagagagataaactcatgagagactttttatgatattagaccttgtcggtgacatgggaccgggagtatcatgacttagagacttgaggcagacacgatcacccacgtggcctaaccccctcggggggggggggggtcgggcccgagggtgatacggccgcccttccctttgtctccccgaggggtcggaccgctcccgtctcggccccgagggccgaggcaccccgaccccttgtgggttttgcgccgcgtatatggggtaggtgagcatagcggggctcacctaaccacatttattgcggtttggacgagcgcgtcacgccgcatgtaacgcagtgcagcgcgctcgtttatccggtcagtgaccagtcacagaccgatcagatcgtgggttaggtggcgacaggcggtctgacgcacgcctcgccccatcccgtcaggatgagagcctccaagcactcgtccctagccggagccggcgtgttagctcctggagatggcacgttggtcccggtcagatatataccaggcttcatcctaaccattacaagcaagacattgtatgaagaggggcaaacatgcagattgatgaactgacacgtggtggacaagaatgaccgatttgtgaccggtctgacactggtcatgtcgtcagcagacagccatgttcccacgtcgcgcctgcttccggcggaagtggaggtaggtatgggccgtcccatcagaaggtcattcggacggcaaccatacaagtctccgtctgtttatgaaaagataggataagtccccacaaaaaagagagagatggtgcatgtggtatccccttgaggtataaaaggaggaccttgcccacttagaaaggggatgatttttttttgggatccagaacgatcagagagggagagggtaagagctctctggttctccagctcttttgtagcttcttcatacatagatccaccaaaacacaggagtagggtattacgcttctcagcggcccgaacctgtatacatcgcccgtgtcttgtgctttttccaatctcgcgaactttccacagactaggagcttagaacctcacccagggcccccggccgaaccggcaaaggggggcctgcgcggtctcccggtgaggagccccacgctccgtcagacctcatggtaaaaatctcaaaatctaatatgaatttgggcattccttagaaatttgataggatttaatagttttcaataatcctttggttcaaaaaatcatatagaaaaaatttctatagaaaaaaatattgttcctatacagaataaaaaaatcctatattttcctttcaaataaaggggtaccatgcgtggcaaagccacgcggtttttctagtagtataacatatttacgtataagcaccaaactgggaggttgacaaatactgcccctatttcatactataagtcattttaacttttttaaattaattttttatgtttaatttaatttatagaaaatataacaatattttcaatgcacaataaaaaatataaaaaattgttcaacattagacgtaatgaaactaattttatgctatagtgttgctatatatttttttataaaatggttaagcttttaaaaagtttaacttaacattttttccatcatacttcttccattgcacggcatatgaaaagctatggaaagttgaaatcggcgtaaactaacgagctgtatcataaagaataaaaataatgttagcatcgcaacagcacattctaagatgagactagagactatgaaagcctcttagtactccctccgtccaataaaaaaaccgaatataaagctagatgtgacacattttagtacaacgaatctagatagagatgtgtctaaattcatagtattatgatatatcatatccagaactactttaaatttttatggaacgaagaaagtagtaatcaacgtacaatttgcttcaagtaacacaatcgatgtctgaatgaactcaggtccaaaggcaataaacaatggggccttgccggttggctgggcgataatctctggaagcatctgtctttatgttcaaagttcagtgtaggacccgacccagttgacaagtggatttaaactgctgtccattgtatgcatgcttttcttgataggtatcaatggcggagtgagcacatctaaccgtggtccataaagagagacactttaggctgttttcgggggtgagtattgggaacccatctcctatacatgaaaaatggaacagtacattaacacgtgattaattatagtggcaaatacataacaaaatgttggtgtggtatcgatgtccccctgccgtgagtgaccactggcccaaaggccccaaactcgagatggattcgactctttcgaggctcattcatcctcgtgtaaagaggtgggcttcatgtgatgctgccgtacaagctacactgttccttgtgctggggcggacgaccgaacgtgtgctacgctgctactacgacggacggatgccgacctccgacacgagatggccacaacaaccaccgccgagtttatgagccatcatcctttcgtcctcgttccgccgtacgacaacgtctcgcgccatcagcagcggagagagacgatggacgcagcggcagcgagaaaaacgcgcgcattactactacccacgtgtggcgcgcggagcagaggcgagtggcaacagcaacgtctcactagccgacagccgggcggccggccggaaggttttctttggatcacggcctcaccgcgcgcatcgccgtctcgtcgtggcgagcgcggggcgcgacggttggcgcgcgcgggctccgtcccgtcctttgtcaccgccgcgagaggcgcctcgcaccggaaccggccggccccgggcccgggctgcctgcctcgccctgtgcggatcgtacgcctgaatcagcgtggcggtctgtgtggccttcgtttggtgagagcctgagaggacagccgttcgctcgcaaatcgcaatgccgcccccgccacggccagcctccgaccgattcgtgagcgcgcgcgcgggggcgggcgcgacacgtgactgcacgagataatgtctccaactctccagggaaaggtaaggacagggttgatcccgcggtcgatgtagccagccagggaagacgacgaggtctggtggtttccgcgcgcgccgaggcggcctcacacaagtcacaattggcggggaacgatgggtggtggttcgcgaggggccgcaccctcgtactgtctctttggaacaaagcgatcgccatcgtggccgaccggtcgagagcgaggcagcatcatcagtgaaaacgtcacggcctcgcgacgcggtaccgttgaggcggtgacgccgaagatgacttgactgcggcgagggtacagtcgtacagatggacacctgattaagcgacgttcgtggatggaatcaagggaggatgcgggtcaccttgcagcatttgtagagcaaaagcgacgtgcaggatgggtgttctgcagtgaggaggacggatcaaggaagatatttatttctgatgacgtgactcaaatggctagaatcctaatattggttatttgtagagaatcaaatttaggcaaaagtccaaacggcatttcttctctgggcttagacagaacagagtacatattattggtttcacggcaatgagtagccaatgacagatcagttgacacaagatagggtcagacagaagtaacgctccactccaagggagtgactggtgagcagctgttggccgctgccccatagccaggcatcagctatagaatgactgttcgtctggggcccgatgtgattcccaatttctcaagcagaaatcctgaattggagcaccatgccattgcaagttttgagtattaccacggctgaacggttgcaacttgcagctgaacccaaaataactgaattagcatttcaatagatctactcttcagaaaaagcatttgtacatgtaatcttgcagtcctactaacggtcccaacagttgtacagtcctataatacaacaagccaatgccaattagttgaagatgtactacagcacatatcgtccaaacaccgaatatgatgacaatgcattgatggctcaggatttggagggtaatcctattgaatttctttcatggagagcctgtggcaggtggcttgggtgtctgatttttctggttagctgcagcttgcgcagcagagccctttgcgttactttcgctggccattgacttcttgatctggacaggttcagacaaaacaataacatatcacaccgcaagcaaagacaacaatcaaatggacgtatcggcagaacgctgtatttggtgatgagaaatgaccatcaataggttaattttgaaacagcattgagaatagattaggatatttgtcaattcacagtttgtactactttgaatagagggaatcaaaacaatatgtttccaagatataagatgggaagaacagttaccagagtaagcctctccctgtgaatatcattgacatgctgcaaattgtaaaggaaaagattattacagttacaaacaattgtgagaattcatagcaagcaatcaaaagcgaagaaataagtatgcaaatgtatgaattaccggcttcttgtacagttttatttcatctccactgaagcctggcaaggtaatattccagcttctctctgcaatggatgacaattaaatcatatgaaaaatgcaattgaaaatttgaaatgctatgacttgatagcatcaccacaaagattctagaagaacaaaaatattcaagttacctgcatggaggagtacatcttttgcttctaaaatgcttgactttctatgttttgctaaagaacaagcaaatgttgcaacctgctcaaaacagctaattaaaaaaaaggtacagaagacatcctagatacaccaggatgacaaattcacatgttgctgatgattaaagggtgacaactttcttctatatctaaagacagcataacttcgacccagagcttctaggcctctagcaaccattaggcagtgtttactatttcctcacacaagaagaaccagagaacacatccccgtaataagcatacttgcaaaaagaaactattggagaacagcaatgatggtggagggaaggggcttacagattcaacaaaatcttctgcaatgtcaataagaacatcttcaacttcaggatcaagcttttctgaaggatcaatctgttggaagatcacagcatgagaaagttatgatgacacttaacttttgcaaataataaaatgcctatttctacttaagtgatgatgatccataactgataaatattggtaaaagaaccaactaaatccatcacaggcagtggggtttatgaacctacaatacccataacatccgtgaacccctatggttgcagcccctacactcaacaactctagacaatcatgacccagataaattttatgacaaagtattagcaacagtatatgctatcatatctaacatacttattacaggtaacagcctacttcctctacctgttcaagtacactggaacatagatttcacacagatcatcaattatcgtaagcacttctgaatcaacaacattattttgaaaagatttttacttggtccttaaccaatgtagattaaacaaaaaatctgttaagatagtgtgccctttttttttttctgttttctattgcgtggttttctttggatattagatatggtttaactgtgtttttttcattactaaagaagggtatactttcaggtttcagttcaggaagttgtgtacctgtgcaactaattcatgtatactcctcttggaaagcagtcgattaccagatcctccagcatccacatcgactgaagccatgtctccagattgcacattagtagcttttagtacagcaggagaatctagcttctgagccattgagacaggggtacgagcagtttgctgctgagaaatttgttgctggtttctgagtgttgtagtctgttgactttgctgcgaggaatgttgtggctgattttgttgttgctgctgctgctgctgtagcttttgttgctgctgctgctgctgctgctgtagtttttgttgctgctgctgctgctgttgctgtagtttttgttgctgctgctgctgctgctgctgttgctgcaaatgttgatgttgtggtagtttttgctgctgctgtgttaaaagtgcattctgtgggtgcgaaattgcaggagcatggtatggtcttggatgtggcctatgttgagggggcctaagtggagcagatacatttggcggagtttgctgtaaaggcatcgagggggaagaagccatagatggtggtcttgccaaagcttggatgggggttttctgttggaatatagttaaatgaagttaggtttaataagaggagtgttcccttgtaactggattgaggaatgaaaaatacaaaaaataaacaatggtgcaagttccaattgatctcattattcacagaacaaggtaaactcataaatgagttacagttgccaaggaaaaatgacaaaatatgtacaaggaagcataagttatattgtaaataatcttattcacataattaggtacatcatataactgaaacagaaagcttatttgcctatagatagaccagtctttgctttttacaagtgaaagtttcttacttgtgaacttgcaatctggctatcagatggagatggtgctgttgaagatggaaaatttggccttgtctgctgtggcagactagagattgctcctggtctcacctgagatgtgttaatggaaccaactgtcccaatattttggatcccaggggaaggctgcctaggctgaagaccataatcattactaagaatcttcactgaattcaaaacaatagagaaaaggtgcaatatgtttcaactaacagcgtgcatgtactttgcaatggaaattggctctctttatactggattatattgaacaacttttcggactatatatgtttttttttgtatgtacatttgagttggctgcgtgggaactgggaattaatgatctctagagaggatgaatgtgttggtgtaaaaaattttatgcgagaggagatggagcatgtagggcctgttcactttgatgccattttcaaccataccattttttggcaaagttgccaaaattttggctacgtttagtttgttgccaaatttggtaaatacataagaaatcctgccaaaattttggcaatattgccatcttgccaaaggtttattttggctacaatctgaacatgcccgtaaccaaccaatcatcattagttcattagcaccaactaaaatattataagtaccaaagatgaagaagtattaacaactatagtcgtttagaacagtagtaattagtaagtcacagaagaacaatattagagttcaataagctccacttaatgttttacgcagctgaactgtcagatgcatctacatttcttctacgcacacaaatgtcagctggatttgacaatttctgggattgttggctgaaagaaattagctaaaacatcagggggtaggatttaagcagccaaatcaccaaggtacagatttcgcgaagacttgttggtctccatcccacattcagacccccatgctgaataaggataactaaaattgaaaaatgggttccacaaaactgcagataacaagcatgtgacatcaagcaagataatcctactaagtcatggtttcctcaagaaatttactaacatgggatcagatatcgtgtcattattatataaaagaatgtaattcttgctgtcatccagatcagttatttcctgaccaaatgaaaacctcatactaccgagagcttaatcacaccagaatataaaagtgcggagctaagcatcagatacagacctgtgtagaggatggtgggggctggtcaggaccccgatgcatcgagccgaactgcgcggcgagtgtcggcggcggcacgaacccggtgtagccgacgggcgtctgcggcgcacgcgggtgcgctggtagcccaagggctacacctccccgtggcatggcagatgaggacgcagaggtggcggccggagcggaagcagaggaggaagaggccgcgcccgtggccggagaggaggacatcgtgatgggcgaggccaggtgagtgtacggaggcctcatgcggggcaccggcggccgcgcactggcggggcttggagctggggtttctagggtttggacgggggctggggtgggattgggggccggggcaagggtggtgtcgggggtgggcggcgcggcggtggaggcggaaggggtgggattaggctgtggcgcggatgagggggcagaagccgaggtcgaagtgggcggcgccgccggcgccgccgcggcggcgtccggttgcgcgggcggaggcgcgtccatggtgttcgacggctcagcgaggcgggggtgtctttgataagatggcagaaatacagatgaaggggaggacttgaatgcaaaatttctcttctgaaaaggtcttcctaaacccctcgccccccgctcgctaaacacactagacatttccgatgggcaagaacgggaagaagacggagtcgcaccggcaaggccgaggccgccgtgcctcacgcttccgcggcggcggcggcggcggcgacgaggatggtgacgagttgccttcatctgcctatgatgctccaccgccacaccacgaggactccgacggtgacgacaccgacgaagcagcagccgaggacgaacacgaagggggtgtggatggaggtgaccaggagcagcgggaagtaggttccatgccttccaagttccacctgtaccaactctccgtccaggtaatctcgctagcttcactagtgggatagatcggtgaaattaagtctccgtgcaccgaacctgttcgacgaaatgctaacagtatgcgtctgtgtttagtcgccaaaaggggacattagctacctgcagaagttcttccttatgtacgtcggcgggcgcgtccctctgcacttccaagaggatttctgtggcacggccctcctcaggtcaatgcactaaacttttcgatgaagtccatgtctgtcatttttcacacattgcatgtgtggttgaagacttcagcagttccattagcaagaaatgtgccaaatgcttgaatggttattctttggagaactttgatcaatgatgctcaacaatcaagagatcagttaactttagtgtgtgactgtgtgatgcatgtgtttttggcttcttggtcatgatatattgtttgatttcctgttggcagtgctgagtggcttcgtactgatgcaaggcgtacagcagttggcttagatttggaccttgagtcacttgagtggtgtcttgaaaacaacctgagcaagattggagctgatgggtattcaagaatgctacttttccatggaaatgttctacagccaaatgtagctcgcctagtcaagcaaaagatctgtgatgccatgcaagatctgcacgtaaacaatgataatgactctttagcaagtaacatctgtgatcagttggatcctgctagcccaaaatgctcagccaattcaaccatgtcggatttggttttgccggcaagagacattatttgtgcattcaactacagttgctgttgtctccacaggagaaaggacttggttttgtattttaggcatgctttcaatgcactgtcaaaacgaggtggtatatttgtaatggatgtgtatggtggcacatcatctgaacgcaagctacgtctgcagaggaggttccccagcttcactgtgagtgatgttgtgttagttattagcccttatactagttacgaatccactaaatgctatcttcttgctcaccagatagaaatgtggtaggcatataatgccctgaaaaaactgcgttcttttttatgaaaattcacactatctgcttgtagaatctgcttattccaacataaagatgttgcagtagtagtagtatgcaacataaaagaatgttttagtccgaaatacaattttctattgaccatgcctcctttttatagattctaaagcggttagctatatttttatacaacttcaatctagctattctgaaataattgtaaagtatatatgctatgttgttaccctttatggtgagattttgtgcctcctttttatgactcgatgtccatttcacttatcagtcatataggtttttcccttgtgtagtttattctagttgaaataaacaacagatagagttgtccaattatcaatggcgtgcgatttggagaatgagaatgagattatatatagatttatattactgttcttacatacaagatacaactatgcattcagtatttctgggagcaagaagagttcgatatcataagtcaccaaacaaggatcagtctccacttccaagctggaaagaagcaaatgttacggcatgctttcacgtaccattggcgcctgtaagttgatcacatactattgagaatggtatatttcataattattattgctctcctgtttccttagtggatcttcaccgtgttatggaaaacctgcaaggttgtaactgtcaaaaagaactatagaaattcttattaaaatataaagttgaaaatattttgcttagtccggtcctccggtctacaggttcaggggggaaactagattggtattaatatcatgtgcaaggtgtttagaatacatgtgtattagtcaagggtattgtagtcatttcccgtttctaggccaatcttgtaatctatattttccctttaggcctaactcaagataacagagagttcattacccatttacatcttcttcccaaattataacacagggaacaaccaaaggcaatgccactttattacctctgtgatatattgataccaaccacttctacatctactatatctctgaggagatttttcacgtgctatatctttgcactcttcataatgaagagtatgatgtacgggattgtttttcaagtgctgtgtgtaacacaccctacactacctgcatgacttcctcgcatgttaactttgttttagagttgcactggagtatcaggacatcttagtcctgtgcaaagaggaaggataccttcaaattcgaaattcatgttgctcctttgtaggtggtcgataccagaaatcaaagactgcttggaggaagctggatttaaatcaatccatgtctggatcagggagatgccaaatacccaatcaagtggaaatgctaaagaatataatgccaaccgtgatgtgaaatatgaagaattacagcatttcaatcaagcagatgcttggaatgcatatgttgttggagtagcaaatatctagatgattcatgctaccttctttttttagagagaagatgttggaaacctttgcagttttccgttctgatgctatccggtcagtttctctgatgctgcctgccggagtagtatctttttatctaatgcacaagtgcttaacatggattcccttctcgttgaaactagaatgtgtaattgctccactctatgccaggaaactaggaaagttgtatgtcttgggctatgatgtttgttctagatgagatgctagctaacatgtagtatcatcatatctgtaccgatcaaatagagagcagtcaaaccccaaagacaatctactgaagatggtgattcactatttcttgatgcagtcatacaggggttgtatgtccagtcagtttcatgcagcataaccttttcaggtttgcatgccaatggtgttctgtgctgattaacttcctgagccactgagtcccctaagatatgctgtcaaatgtttgattaaactggccgagttaccagatcatttcctctccgcaataatctctgcattgtgaacatctcttctggcagcagatgtcctccacaatagaatctgtgaacctgccatcaacagcatccttcaaatcatccatgcccattgacaattactcgcaaggaacgggggagatctaagaaaattgttagaatagatgtcgaatatactaattctatttggttacagttggatttaaagttgtaataggtggtagggggtagaggtagagtcggactctataacctagcaactctcttaaatagagaggcatggagatgatggtggtgtggccatggacttgtagcggctaggagttatatgggttgaggagcgcccataatcaaaaccccaggacataagcttcggctaaacctcgttaacaaatattgtgtgttcttgtgtcgttatctgacgtgtcttgggtgatcattgattgaagcgatcgagaagattagtcgtcgttccgctatatcgactacttcctccgtttcataatgtaagccattttagcattgcccatatttatatagatgttaatgtgagcaatgctagaatgacttgcattataaaacggagggagtaacttttatatataaaaaaggtctctacgagctgcaaacatcctaattcaatcatttccatttgagttttcagatataccaacacaaagtgctttgctggctctgcagagctgaagccgacgacaagccactccgaacagttaaaaaaacattacggtaccttatgcatctgcattaaagttttaaataatataaataattatacgtgtgtctaaaagttcatagtgttatctattagaaaacggagtgttctaaagttaagagcgttatctcttataaaacggaggaatacaactttttcaggttcaggcagtgtccaacatggcgtgtccaacatggtagtagcgccattccacacgcctgtatataaccgcgcccattgctccccaggacaacatggaatgcatctttctaccagaagatagagctttctctgccacgaaatattcagctttactggataccgtctacagccgtctccattcatcgtttcctttccatgatggtgtgacagaattggcttttgtatcgtgttcgttcgtccagtcattttcgtgtgctaagcttcgcaggtcacagacatgcctcgtcaaatttggttttagtcatagacatcacgtaaaatcgaccaactgctcggcaggccaacagtaatgatctcatgatcacccagctgaaactaatcttggcgtgcaatgcattcgcaacaacactttacgccagctaaagagcgagcgagcactgaactgaaggttccgatttccatatcaatcctgagctgatcaaagtgcttgaaaaaagattcttagtgcttgccattgtggatcccgactagattagaagatgcgaggccgaggattatggcgggggaaacacactgcaaagaataaataatcactggagttctagttgtcgtagtggtggacagagacagattaatccagcggcaaacgcgacgactccacgttgccgccgtgccaatgataatccgagaaatcgagctgcacggcggaacaaaggagagcgacgtaaaccggattaatccaaacggcttcgaccatctgaggggatcgagtgaacaatgttaaacatgtgatatgtatttgtgtgatgcacacggcatggttagatggatagatatgattagataaggctagattgagtttgttgtaacagaataggagcatatctatccatccacctgcgccgatctctgtaacccacagcggtggttattatcgctaatataagattaacaaaggtgcggcccgagagggttgaacgcttctgaacctctgatgtttgatatggtatcagagcctttccactaaacaaatcccgatccaatctatggccagctcgtcgtccaagatggcagccactaatcctttcggaggaaacacaatctcagagaaattagccaaaaacaactatgcgctatggaaagcgcaagtcctggcgtcggtgagaggagctcgtcttgaagggcatctcactggcaccacagcagcgccggccatcaccatctccgtgccaggcgagaaggaaggcgacaaggccaccagggcggctaatcccgcctacgatgaatgggtggctacggatcagcagatcctagggcttctactgagcaccctgtccaaagatgttctggcgcaggtggccacctgcggcactgcagctgccgcctggagcatgctggaggagatgtatacctccatgacaagggcacgcttcatcaacactcggatcgctctctccaacaccaaaaagggcgatctctccatcacagaatatgtcgccaagatgagagcacttggtgatgacatgacggcggctggcaaggtcgtcgacgacgaagatctcatctcctacatcattgccggcctcgacgacacgtatgaaccggtgatctcctcaatcgtcggcaaatctgagccgatgtccttcggggaggctttctctcaactgctcagctttgagcagcgcaacaatctccgtcacggcggcgagtcgtcagcaaacctggcgaatcgagggcgcggcaccaccggcggcaacggaggccaacgcggacgcggtgggaacaaccgtggacgcggcggcaatggaggcaacaacagcgcaaaccgcggcaagggtggtcgcgggaatggcggcttcaatggaggacgtcaaggaggtggcgtcgacactaggcccaagtgccagctatgttacaagcgaggacatacggtaatcaactgttggtatcgttatgatgaggattttgttccagatgagaagtatgcaggttctgcagccacctcctatggtatcgataccaactggtatgtggatactggggcaactgatcacgtgacaggagagttggagaagctcatcgttcgtgatcgctacaaaggacatgatcaagtgcataccgctagcggtgcaggtatggaaattagccatattggtcactctattgttaaaacccccagtcgtgatattcatttacgcaatattttacatgttcctaaggctaacaaaaatttagtttctgctcaacgtcttgtttctgataattctgcctttatggaactatattctaaatatttcaatcttaaggatctagccacgaagaaacttctgcttagggggccctgccgtggtcgtctctatgctcttccatctacaccgccacatgcacactcaaccaaagaagtttatggagtctccaagccatcttttgaaaggtggcacagtcgtctcggtcatccctcctctccaattgtagagaaggtcattagcaaaaataatctcccatgtttagttgagtctaataaacagtctgtgtgtgatgcttgtcaaaaggcaaagagtcatcaattgccttattctatatcatctagtatatctagtcatcctttggaacttatttattctgatgtttggggtcctgcccccacttctgttggaggcaaacagtattatgtgagttttattgatgatttcagcaagtttacttggatttatttaattaagtttaaatctgaagttatccaaaagttccatgagtttcaggctcttgttgaacgattgtttaacagaaaaatcctagcgatgcaatctgactggggaggagaatatgagaaacttaattccttctttaccaaaataggtattactcatcatgtgtcttgtcctcacacacaccagcaaaatggctcagctgaaagaaaacataggcatattgtagaaatgggtcttgctcttcttgcttactcatctatgccattaaagttttgggatgaggcttttacttctgctgtttatctcattaatcgtactcctagcagactcttgaaatatgcaacgcctttggaacgtctgtttaaacaaactcctgactataatattctttgtgtatttgggtgtgcatgttggcctcatctccgaccatataatgctcgcaaattacaattccgttccaaacaatgtacctttctaggttacagtccccttcataaggggttcaaatgtctagatccttccaccggtcgcgtttacatatcccgtgatgtaattttttatgagaatgtttttccctttgcctcacttcatcccaatgccggtgcaaaattgcgttctgaaattttattattgccatcccatcttgatattcctattattcctggggtgcaacaaatgagtaccactgtggctaatgttcctactaatcctgctaatcaaatttctggagatgaattatcgctacaggaaaatttggcagcaaataatgcagctccagatggtgcggacgcagccacagctgccacgaaagatccagcggctgactcccctcacacctctgacgcagcgtcttcgagcgtcctccagcgtcgtgtggaggccaccgtagagtcctcctgctctcctgatcggttgcatgtcgagctcacaccggcgcactcacccgtggccatgcaatctccagatgccacgtctcctactgcttcctctgactcacaggagccatccacgtctcttgatgcttctgttgcaggggaggtagatacacagcaacaacagcaccaggtaatatctagaccggctacgaggttgcaaagtggcattattcgtaaggaaaaagtttatactgatggtacagttaaatataggactacttttctcactgttactggagagccagaaaatttagatgacgctttaaaagataataattggaaaaaagctatggatgcagagtttatggctttacaaaataataagacctggcatttagttccacctcagaaaggtagaaatgttatagactgtaagtgggtgtataaaattaaaaggaaacaagatgggagtctagacagatataaagctcgcttagttgcaaaagggtttaagcaaagatatggcatagattatgaagatacttttagtcctgttgttaaagctgctacaatcaggattattctttccattgctgtctctaaaggatggtgtatgagacagttagatgttcagaatgcttttcttcatggagttctcgaagaagaagtgtatatgaaacaaccaccaggttatgaggacagttctttgccagggtatgtgtgcaagcttgataaagctttatatggcttaaagcaggcacctagagcttggtactctaggcttagcaagaagttatatgatatgggattccaagggtccaaggctgatacttctttgttcttttataacaaaggagatttgattatatttgtactcatttatgttgatgatattattgtcaccagttctagacaggaagctgttccagccttgcttcaggatttacaaaaggagtttgctctgaaggatcttggagatcttcattactttcttggtattgaggtaactaaagtgtctggtggtatagttcttactcaagataaatatgtcaatgatttgttgagaagagtaaatatgtttgactgcaaaccggttagtacacccctgtctacaagtgagaaattgtctataaatgaaggagatcctttaggaccaaatgatgcaacacattatagaagtgtagttggtgctttacagtatctaacattgactaggcctgatattgcttttcctgtaaataaggtttgtcaatttttacatgctccaactacacaccattgggcagctgttaagagaattttaagatatttgaagcaatgtactagacttggacttaagttaagcaagtctagatctatgttagtaagtgcttgttcagatgcagattgggctggttccctagatgacaggagatctacaggaggttttgcagtattcttaggagataatcttgtgtcatggagtgcacggaaacaagctactgtttctagatctagtacagagtcagaatataaagctttggctaatgctacagcagagattatgtgggtacagactttattggcagaattgcaagttgagagtccatctatggcaaagttgtggtgtgataatttaggagctaagtatctttctgctaatcctgtgtttcatgccagaactaaacacatagaggttgattatcattttgttcgagaaagagtttcaaggaaattgttagaaattgattttgtgcctacaggagatcaagttgcagatggttttacaaaggctttgtcagttcgacagttggagaattttaagtacaatcttaacttaggaaagttatgattgagggagggtgttaaacatgtgatatgtatttgtgtgatgcacacggcatggttagatggatagatatgattagataaggctagattgagtttgttgtaatagaataggagcatatctatccatccacctgcgccgatctctgtaacctacagcggtggttattatcgctaatataagattaacaaaggtacggcctgagagggttgaacgcttctgaacctctgatgtttgataaacaagacaagaccaagaccaggacggctgggggcggcaacatcagggcgtggattaaccgaggcggattggttccggccaaagttgaccccaagtctaccggcctaggctggctgagttggaaagaattcaatgaatcgattgcgacgagtttaaattctactatacagacacgtaaaacacaacgaaatttctctgtttttgtcatagcttacacgccgaaaacatacgctactactagtagtactagtttttttgaacgtgtagcttgcacacgtaaaacactggatgcaggttgttaatactccgaggaggccgtataacaatcataaaaagcgtcatgtggcgcgaggtacagagttcattgcgtttctgcatgaatcacacacatcgaacgctacgctggacaccacgtggccacgccaagcttagcaactcataccgacggccccacctgtcatgcgtacaggcttgttgtgggacccacgcccgcagccctgttccctgcagagaatcattatatactccctccaatgcacgaacccaaccagagcacattggatcccccgttcccccgaacccaaggtccaaccaaccgcaaactgcaaacatatcacgctccctattttagtaccacctcgcgaaccggaacgcatcgcgtccgataaaaaactcgtcgccccacaccgcgcggcactcggagctcagctcgcacggcacggaacggaacacaaccctccctgtgtctctctccctgatgcgccgccccccatgcggcggccccgacccacttagcccgcggcggcggatgctgcggcggcggcggcggcgatgaagcggccgctgcggcgcccgttcgcggtgctcctcttcgtcgtgctgtgcgccgcggcctcgttcccctccgtgttgcgcaggtcggtgggcccggctcccgtgctcgcgccgctgccgccgcttgatcccgcgcgcctcaacgccacgctcctccgccttgccgcggccgatccatcggaggcgccgctgcgccgcgacgtggacgacctcctcgagggccgcctcccggcgtcgtccgcgcgcgcccgcgcgtggcgcctccggggcgacaggctccaccttcacctccgccaccaccagttccccgtctaccggcgcggccaccacccggatcacgaccacgaccccctcctccacccgctcccgcgccaggagctccacctcgacccatccctccgccgcgcgctccgctcctggcaccgcctccgccggcacgaccccggcgtcctccgcaatctcccttccctcctctccctccccggccgcatcccctcctgcgccgtcgtgggcaacagcggcatcctcctcggcgccagccacggcgccctcatcgactcccacgccgccgtcttccgcctcaacaacgcccgcatctccggcttcgccgccaacgtcggcgccaagaccaacctctccttcatcaacagcaacgtcctccatctctgcgcccgccgtcccaactgcttctgccacccctacggcgacggcgtccccatcctgctctacatctgccaggccgcgcacttcctcgacgtcgcctcctgcaacgcctcctcccgctccctccacgccgcatccatctccgtcaccgatccacgcctcgacgtcctctgcgcgcgcatcgtcaagtactactcgctccgccgcttcgtcgccgagacggggcgcgcggccgaggagtggagcagcacgcgcgacgcggccatgttccactactcgtcggggatgcaggccatcatggtcgccgtgggagtgtgcgacagggtgagcgtgttcgggttcgggaaggcggccgacgcgaagcaccattaccacagcaaccagaaggcggagctggacctccacgactacaaggcggagtacgccttctaccgcgacctcgccgaccggccggaggtagtccccttcctcaacgacgccggtatcgccgtcccgcccgtcgtgttctaccattagagcgcgtgcgcgcaaggtgctcgacgttatgccacttttttccggtggaggattgtgttgtattagtggctcagtgtaaaatgttgcttcgtaaggtgggttattttttgtgattagattgatagacgaattgaaatagtagcgaaattttgatatgatggtgggattggaggtgtgtactaagcattaggatccctccattagcatacgaggacgatttcttccgcttttggcactgtaactgtaatttagactgatctttcttcgtaatttcatgaagaatcaattgtacatcttctatacagccttgctgcaactttgctctccatgtttcccaaatggcaaatacaactttagctttgcattgtgtcatctgtgtaccttccaaattccaatttgactgctcatttcacctcggaaaataacttgtgcaagtccttccctgccaatgcacttcttctacctctctaatccgattgctaaccgaaggctcg

SEQ ID NO: 8572 - DNA, 13683 bp, Oryza sativa
gtccacgccgtcgccgaagcacgtggccacattgagcgcgaacagcgcggcgtacaggcagtcgcggacgggcaccaccacgcttgcccctccgccggcggagcgcgccgcggaggccgagacgtcctcgacgagcgcccgggcgcggcgcgcgcgaggccatgcaccgggtggaacgcctccgaggtgaggttgcggcggagcgcgacccagagcgggccgtgcggcacggtgttgatgttgtgggcgcggccgccggagacgatggaggtggcgccgccgccggcggggcggtcggagaacgcgtcggcgcggcggacgagcgcgtcgaccgcgacggcgccgtccctgacgacggtcgtcggcacgtcgcccaggcggacgccgaggaggcggagcacggcttcccggctgatcgccgccgtcttccacggccacggccgcctgacgatggaaagcaccgctgcaatcatcaagctcgccatggaaacagcgaatagtgaggcggcgtgaggtagcaagctgcccatctccatggtcgtcgtgctcgtcagctctgcatgcatccaatccagtgtgtgattattagctttattagtaaaagaaaaaaaaagaccgagacgttgctttcttttaaggctacttggccccggtcaatcgccagctaatttaatcatcgccctcttgcatagattcgttgaaatctatcctatcagcatgagctataaattgtgatttgggagtattttgtattgttaatcatgcatatggcttcttttcttctgagatttagtcactgcaacaacttgcattcgtcggttgttcttccagtaacctgtcaaaagcttgtactttcatattataaatgtctagtttttttttcaaatttctttaactttgataaaagcgtaacaacattttaaacaccaaacaaatatattattaaaatatatcaatgttagatttaataaaactaattttgttgatgctgtagatgaatgttattactttttttctctatatggatgaccgaacttaagaaaatttgactaaaaaaatttaaaatattttataatatgaaacagaggcaacagtacaatagaaaaataaccctgttctcatgccacctatagttattgtcgtttctctaaaatacagagtaattgacttgttgtttatcttcttcttttcctttcacaatagcgaaaattttgttggtccggcctagtttaatgcactcaacaggttcatttatttggacaagtggaatggacaattgattatttatcgtaatccatttaatattcaatcatatagatagatgactagaacaagttgggttatcgtcacgttgaaggctttaataccgatataatctagaataagttttctcatgagtttgtttgtaaaatgagttttacaaaagaatcaaagatacagcaactacagctcaatcctctcctattcagtcccatataaacgcggggataaattcaatagagaaatcgagacaacgagataattaagaagatgggattaaaacatgtaggtctaatcgaacaaactgggcctataactattttacatctgggcactacacataacacaagctccctttgttgtttctatgggtaattaattaacaagatatggacttctatccttagcatgaagcgcatcatgagtttaacaaataggttgcaaactcatgatgtcatctgctttcattacccgttttgccatctaattagtccgatcaatgatcaaatgcatgtggcttccaaaatcagacgatgcattgacagcttgggtatatcacgctctctttaaaaggaaagtaaaatgcacgcaaacgtatcatgttatctctatattgagagcgctctcggtttagtttttatactaaacaatatcatatatcctcctcgtgtatattttaacatatttattcatttgcatctgtaattgtcagaaaaaatctaacctaaatttattcggaagacgattaaataattgcaatgatattctatactctcctttgtgcataaaacattagttcgcacttttactttgcttgttttttcgagattcaactccctcctatgatagcctccctgaacaaaggctcgtatgaaaacggtagaaaaactatattaaccgttttgtacttaatattttccccgaaaacagaaccgaaaattgtagagccggaaaatttctcaccggagaggttcgtggtgggcatggatggagttggaaccgctcctcactgacttaatgaaaactagtaaaaccgatagaaacaaagctagtcccggttcgcaactgtttttagtccagttcagcaactgggacgcacaatctgggactaaagatggggattcgaactcaagatctctcacctgagaccttacgcgcgttaccatcccacctattacacacatataacatataagttagatagagatgctttctttttaaactaactctgaagacatttttagtccgagttggtaacaccaatcgggactaaaaatatctctagtctagattggtgccaccaactgaaactaaatatcaatttttagtccgagttggtgttaccaaccgggactaaatatctttagtccactaaagatcgttgggggcctgacatggcctgacagctatgaactgtggttaaaaatgatttttagcgtcggttcctatttgaatcgggataaatatgatttttaccatccgagtaaagattagttctttggtagtgaaaacaacaacttatgttcaacaccgtacggaaagtggtttcgatcggttttgtgaccatgcaacacttgctccgtgcatctgttgtgtcacaaacgatgaaggcggtggactggtggcgtcatgatttagtgtgtaagatctttttttttaaaaaaaaagggataagattcccatctttttggctctatagaagttataatcaatcattacaaagtctaacaataaaacattagtttgtattgtccctggcgtggatcgaggcagctccctcgacggcgcggatcgaggtcgactcccacacgtcgacatttattcttcttaggatgccggcggcgacccagaagcggctcggagtggtggcccgatggcagcggtgggatgtaaggttgcggcagcctttggtgaagacgacgacagcggcgacggctgcaccctcccctccgtaagatctggcgtgaggggaggcgccgacccagtggcggctcggcagcagcggcggcgtgcggaggcggtatgattcggacgccgcgggctctgggcgacctcctcacggcgcacagcggtcgcggcgggatcgaggcggcttcgtccccggcaaccacctctctcattctttgatccctggcgcgtgtcctcggcaccttcgttggcaccgccagtggggatcgaggcggctccctccccggccacagccatcagcgcggatcgaggtcggctccctccccaaccgtcgtcatttcttcttcttcggatgccaggcggcagcgcgcgtcccaggccaccgctgccatggatcgaggcggctccctcccctacagttgcggatcaagtgtggctccgtccctatccactgccgtgtcctcttcttcggtcaccggctaacgtccgtggccgcgtcagtgcggatttggacggatccctcttttctttattcttgtggttattttttctaaaaagccccttcattttttatgtttacagcgctacccctagaagcggaattttctcttctttgtgttgtatttctatgaaagacgaggggttttcggtaagaaacatgataggtatcaaacggtccgagaacatatgcgattttccgtgcaaacacgaggagcttttcgcaaagttgctaaccacgtgtcaaattctccgaggagctaaaaaaattccgaaaaagaagaaaaatcgtagccttacggctttaaatgattgatgatacgtcccaacacttcaattgtgcccccaccaaaaataaaggagctcagacacatggtgaactccagtaggcaactggcaatgtctgcaatcctagtggatgtaaaaggaagacgtttcaaataaacatggacgacgagttagcgaatttgtacacatatatatcttctactatataccaattaaataaggcgaagcttttgtctttgttttcatttaaaaagcaccttgtttttcctttaacgagcaatttgaattgaattcctatagattatatgtgttctctattcagtatttcagctggatatcattagcagggacccataatctcgagtatctgttttttatcttttcatgactcattgatcgtgtgcttgttggtagcagaggctagagactcattcatcgaatttttgtttatagtttaaatttcttgaaaactgaaattccccgagagatcaacttttgaaccagctcgaaatcacggaatgtctagatcggaaaccctgcttgcacattgtatttctccgatagccgatctaatagttctcagaaaaaaaaatgatagcctgtccagctgggccttaattaattccatccgtccacgtaaggaataagttcactggaggtccctcaacttaacagtgagatttttcgaggtcccttaaccacaaaatcagaaatgtgtacccctagtaggtcccatagcagtatttttgtccggttttgctgacgtgtcatcctagttagaaataaaaaattaaaaaaattacgtggggcccacatgtcaacgcacattttttcctcctcttttcttctccttctcttctcttttctctcttctctcttcaccggcagcgggcagcgatgggcgagcgcgggatgcgggcggcgggcggagagccggcggagtgggtggcgaagctggagccaagtgtgcttctagcgacgccgccacggtagacgaaacaactaatcggccatcgctgctccgcctgtctgctacgcccatcgaccgctcgccatgcaccgtgctcgcccgcccccgccgacgggagcgaggcggccggccacgccggcgtggaaggggcaaaggagggccgagagaggggtggaggcgacggcggtggcgctgccgggttccttcccctgtcgctggtcgctgaccggtcgggggacgacatcgacaccgcgttcaacccccaatggcattgtacgattctactgtttgctatatagctcaacggttataaagcttgaaggatgaattgaagcttcgcttttcttgagctatggtgtttctttgggttttcttcttcgcagggaggtgaccaggcgctgtacaacgggttcggggccgccggaatgcatggcgccgccgtcatgcaaccgccgacgttcgggcaggtacgcggccaagaaccagtactcccgtgggttcaacttcttccccaattcattctgcttctttaccagcgttggaaacaactacctgccaccgccgccgcgctcacctacccccgccgctcctgcctgctttgcctgccgccgcccccgcgctcacccgctgttgccccgcccgtctcggcctgtcgaagaagagagaagagaagaaaataaaggacaaaaagagaagaaaggggaagaaaaaagtgatgtggggccacattattttctctcactgacatgttggccccacatatttattttattatttttgctgattagaatgccacgtcatcaaaaccagccatctagatttctggtttaggggtgaagatttctgattttatggttaagagatctcaaaaaatctcactgttaagttggggggactccggtgaacttattcctctacgtaaatacgtaggatacttgggcttagaatctcggtatgttcgtgaggatgggccagaactttttggcccataaacaccttagagagccacacccaggtgagatccaaaccgggggaagacagacatcgatcgcacggtgcggtgctaaacgcgtgcggccaaatcaaaaaggagggcgcgagccgcgaggcgagcgaggacgagtccccatccacaccgccgcaggcccgcagcacgtgccgccaagccgcgtacgtgcgcgcaggcgcgagcaccgcaacggacaagatcgccaaccaaccgacgagacgagacgcgggcgcgcgcggcgccaccacgctagcggcaacgcatccacgcagcgcggcgcgtacgcacggcagcagcagcagcaaggctgccggtgtttcggctgtgggcttggtgggtagcgcgcggccgcgctcgcgctcgccttcccgcagcaacaaatccaccacgagacgcacgtacgccgcagcattctcgcggcctcgcgtggtttgtcgcgcggttagctcggtcgccttcgcttgcttgggagaccagaagtagagccgtaacagcgctgctggttttgcgcgcctaactctcatcggtgacattgcgaaccgaattcggagcggtttttgcttggtcgggggcattggacaaccagagcgtgacaccaatgcgagtcagcacggtacatatttttctgtatcataggcctgacgatgacgaggcggcttgtttttggtcaagggtatataggcaggtaggggttcagttgcctaacccggcctttgattttggtttggtacatgaagattcaagggttagaacttaggctgcgttctttttatgaagttgagaacttctcttctccacccataaaacgggatgattcattagcacgtgattaattaaaatattagctaaaaaacttttaaaatagattaatatgattttttaaaacaactttcaaataaattttattttataaaagaacacctcatttagcagtttaggaagcgtgaacgcgaaaaagaggacgtgaaagttgggaaagtaggggaagaatacaacctatgtggattgggaactaaacccccatgcaaaaaaaaaacatgaggcatattagcgcatgattaattaagtaacagctaaaaaaacttaaaaataaattaatctgatttttaaaacaacttttctataatttttttttaaaaaaaacatcatttagtaatttaagaagcgtgtgcatgaacaaggaaatggaggttggaaagcaccacaaacgatctcaaccttagagcaggtttaatagcttagccaattattagcttcaaatcatctgtagttaatctaatacatcatttatacaatagtcatctataaatatatatactacatcattaatacatagttccacatctcatatacacaatatttttcgtactgcggatgactacaaatatgtaatccgcttttcttctctctcctctcttatctactacacgtgctcataacccacttgttgtctgctgttgtacttgctttgagaagagcatccaatctactactccttccgtcctataatagaagggattttagaggatatgatatctcctagactagaaatctagacagaagtctgctcagatttgtagtaatatgatatgtcaaatctattcgtaatcccttatattttaaatttaaaaaaaagaaaaaaaaaacatcaactctaataatgtgatggtagcacagtaaaaaaaaaccagaaacagtaccggtcttctccttgaacgaatccctatcaggggtcccaggcaccgctagctagctgggcatgacagcatttctagtacagtttaaggcgttgcctgaccacgtatcgatcgatggatatatattcgctccgtcatctaaaaagcagaaacaacatgtccgcgattcctctctccctctcccaggctagtaccaatatctatacaccatgtcagttgctactagttcagatttcagaaccctcgatgtacacacatactactctactgccgcgccgcgaaattcccaggagaactcgcacacacatactcctactcctacgcaggtcatccagactgcaagaaacgaacgagaggcatcagtcatcagctgctgcgcctgcgttacttgcagcgacctgcacaacgagcagcagccagggtcggtaccaccaccacgacatgggtagaaacaattgggacgacattggtagaagggtaaattgtaaccatactattataattttgtaaaatttaagatatgacatcctgacccacatgtcattgactcatgtggatcctacatgtcattgagataccgatgacatatctcaaactttgaaaaattataatggcatggttccaaacttggtagaaacaccacggtttcacaatttccgaaccggggtaaaaaaaacccactcaatttttcggtaagtttagaaataccaaagtgaattttaatttgtttatagaatttgtttgggttttatcgtgtttttttttcagcatatcaaccgattacgcaaaatccgatgataccgcctgtgagcggattttgatccgctatctgttgtatcgtgaaccctgttggaaacatttggaggtgttctgctcctctcgccccgacgacgtgtcaaagctgttgctcctgcctctcctgccacacacgcagacgcaggcagtgcaggcccgagactgagaggctgtttggttgctaccctgagcaacatgcctgagtatttttcatgcctgaggataggctgagcttgcttacaaaagttacctgaccaggtatggcttaaatttaagatagtgtttggttaaagccctgagaacatgctatctgaaaaagtgctctcttttttctagtagctctcacgcatagagcttagctccaactgatggcaccagattttagtggaggaggaagcagacggccaccggatctgcaaggtggagcagccccttagtcgctgccgccgcagccatggatggatcgatggggattgttttctcctcctaaccctacggtggtacagtgaggaggagaagtggtagaagagaggtgattctactcaggcatgttgggggaaatgccatggcttgctcaggcaacctttttgctacgcctgactcaggcaagtttcgtcaagcaagattcctcaggctaaaattcttagggtagcaaccaaacacgtctcagacagattataggcttgggctcaggccaggctggtttgctcaggtagcaaccaaagaggctctgcctgcctgcctgtgcctcgctctctcttctttcgcagtgcataaaaagcaatcaaaaacagggtagatgctggccatcaggccatatccctccgtcccaaaaaaaaaatataaaccctgattttcgtgcccaacatttgaccgtccgtcttatttgaaaaaattatgaagaaaattaaaaagacaagtcacacataaaatattaatcatgttttatcatctaacaacaatgaaaatacgaattataaaaaaatttcatataagacggatagtcaaagttggacatggaaactcagggtttgcctatttttaggaaggagggagtatattacttgtactgctgcattctctgctcagagcctcagtaacaaacagattacagatcactatactaagggcatgtttaattggtgaaataaaaatttttggatgtcacatcggacgttttaccggatatcggaaaggtttttcggacacgaataaaaaaactaatttcataactcgcctggaaaccatgagacgaatcttttaagcctaattactgtcattagcacatgtgggttactgtaacccacatgtgctaatcataggtaattaggctcaaaagattcgtctcgcgatttacatgtaaactgtgcaattagtttttattttaatatatatttaatgctccatatatgtgtccaaagattcgatgtgatgtttttgggaaaagtttttgcgaactagtaaggtggtgtttggatctagaaacttaactttagtccatgtatttagacactaatttagagtattaaatatagactacttacaatactaattatataaatgaaagctaattcacgagacaaaatttttaagcctaattaatccataattagataatgtttactggagcatcacataggctaatcatggattaattaggctcaatagattcgtctcgcgaattagtccaagattatgaatgggttttattaatagtctacgtttaatatttataattagtgtccaaatatccgatgtgataaaaacttaaaagtttcagtcccatttaaacagggtctaaacagggcctaaacagatagtactgtagcattaggcattggtccttgattactgcatgctgttgctactgcttctctccggtccagtctttcgcttgctgataagttctgaagagatgccgacatgagtggttgaggtttaacggtttcaagcttatactccatatgagtaacaagtatattctagtactgtaacaaaagaagttgtttagtactttgtattatagtactttgttgaatatccaatgtcgtagtacgtgtgttctggagctgcctggtcctgcaatgctgtagcttacttccaagtcgagcaggacaagcagattcctgggatgatggtgccggttgggctgctccggggaagacacaagaaattgttggaattaatgaatgggccttagcccactcgaagattaattctttggaaaatcacaaaagcccacctcatgggatggcatgcatgtggagtttagtaccaccttgcttattctaggagagggggacctccttaaaagggaggatgccctcctagccacttgaagcatgtgtggtggagagaagaggggaaacacacgcgcgcgctcgctcgcctggcctggcaggcggcgcgcgtgcacgacgtacgcgtcgaatggtccgaaaaattggctcctcacccttgcgcagatgcagcctccttttgcagttttgttttgctgcaaattcggattcgttttgttttggaaacgttccgaaaaatccggtgcgtgcaaacggcgtggagtccggataagttacgcgcgacttatccggttcggttacgcgcagtagagatcgtgcgggcgccctgatcaagcgacccttctctatataaaccgacccgccgtcttcacgcaatatatgcgaaaatcaatctagggtttgcctcctactctgtactgcgccgtcgctcgtagactactccatcccgctcgccggcgtgcaccagcgatcgggagagcaggtctccggaacctctgcctttgacgtcctgcaccgggagaaggcggcaataaggtttttgggaagcgcttcgcgcgactgctccctgttcgttcgcgacggctcgccttcctcttcgctcgcgtgtttcgtgccttcgtagacacctgcgaaaagtttcgaccaagcagccggtcttttcgtcacctcggtacgtgttcaatatgttgcgcatatttgatctgttcatgttattctgcgtagtttacatgtgtagatctaatgatgcgttcatgctagttttcatctgtaatgtcatgatttatttatggaataaattaaatccttatatgcccataatctcaacagaaattgccccattgatcgtgaccaaaactaattataaattgtaatggtttattagtgataaaaagataattgatgtattaaacttatatatatatatatatatatatatatatatatatatatatatatatatatataagctcttagtagcttaaaagctaatgttttttttaaaaaaagactacgttgaaaatactcaaaaattaacttcaaactaaaatttagacagaggttgataaggttgtagagtaaactacgaggccccaatgtctcctaccggtaacgaatgaattactgctgaaatcgcgactatttcgtgccatgaaacagtcgagaaaattaaaaaaaaaaaggcagagacacgtgcagctagacgtattaagctgtggcaattgatacgtgcaaacgagtaggtgaaccaaaccggccaattcggcgtattggacaggctgatggccataaaagtggatgcatcgtgccatcacacaccaccagaaatattcaagacgtttcgtgttaattaggagtaattagtactccagtgtactcctacatacacataataaattgaagacattgagagcttttgcaatcttgcatagattaatctgtcgatcacgtacgtacgtgtatatatatgcgcattaagtcatcgatcgaaatggacgtgtacgtacacgagctgctagctccatggatcgtacgtagacttctgtctctctggatatatacatatggatatatgatggatcgtcaaacacacaatgacacaaagctaaggagaatttatcaattattcctgcgtgcatgagtcacgctggccgtaaaacgtacacttcaaaataaatgcggcaatattatatagaattaatactacttcataaaataatcccagttaattaactaagtccatgaatgcggcaattgtgtctaatatggagtaattctatccaattcagcactgttgatccgttctgaataaggttaagaacactgatgaaatcagagtgagaatttctctcaaaaaaaaatcagagtgagaatcatctggctgtagcaacatcaaaagcaataattaatgttcctaggctgcaggtgatcacgtgcctaaccatctaggttatctcgttaaccgaacatattaacttactcattggaacctaccattctgatcctacgaccaatcaagattaccaacatcactatactgtctatgactgcatctaacccaatactccctccatttcaaaatatactacaggcttgtgaccaaagtagagagatcagatgaaccacaaatcgaaccacaaacctctcagagcttccattaagtctgtgttcgggaggaggggttgggaacccctccttcccggaacacaaaacgaagatcgttttattgcatgattaattaagtattaactattttttttaaaaaatggattaatatgatttttaaaaaacaactttcatataggaagtttatgcataaattataccgtttagcaattttaaaagcgtgtgcgcagaaaataagagagatgggttagaaaaatgagggaagaacacagcctaaatctagtagcagagctagctcccggggagattagacggtcactcgggcatcgccgttatcatcttcactacagactaccataacacccggtaaaataagtcgatcacccaaaaaaaatactattagttagagcaatcaaattccaaacaattttagctaatcgctagcgatttgccgcccgatcgagtagcaacgagagctgaaacctgaaaagacggtaactgcactgcggctgatcaggaaggagtccggttttgactctgtcgaggattcgaggctgcgcatctgcgctggattttttttttctgacattggtcttgttggatcctccgagctactccctccatttcataatataaagcagaactacttttttttaagatgttccataatataaagcacacatgcatgtaggtaattaactaagatccattctctattaaattattacttttttaaatccttcactctcatgttctctaattctattggatacatgcattatatttattaggatgatctaaactacaagatgataataattatttcttggtttt

SEQ ID NO: 8573 - DNA, 2038 bp, Oryza sativa
aggacggtggaaccccgtgcgacctgataagaagaaaacaatgagatgtcagcacaaacatgtacattggccccagtatcaacccaccaattagtagattgattaactgaaaaaacagtaggtaaattaccatacccgcttccatctccagtgttgccaatggtcacattagcagacttagaagtctgccctgcaggtgccttcatccccttgcgttgtggacacttcctagccagatgaccaacttggccacacacaaagcaagtcctctcatcctgattaggattgttgttgttcttcttctgcttcttgaagttggtggtctgctgagctttgtatttccccttgctcttgttctgggccttgtgcacaacattggcactggactgcccaccatcgcccttagacgcggcatctttttcccgagctttctcctcaacatcaagagacgcaatcaacccctcaacggagtattcctgtctcttgtgtttgagtgcagtaccgaaactcctccaagatggaggaagttttgcaataatgcacccggccacaaatttgtcgggtaagacacacttaaggagttcgagtaccttagccatggtttgtatctcatgagcctgttcgactacagaacggttgtcagccattttgtagtcatgaaactgctccatgatatacagatcattgctagcatcagtagcaccgaatttagtattcagtgcatcccacaactccttagcgtcggtcatatgcatatacacctcgaccagacgatcgccaagaacgctaagaatgcatcccacaaagagagtagtggcttcctcgaattgcttctgctgttcagcagtaagaactccttcaggtttgccagtactcacccagaagcatttcatagctgtagccacagagtgaccctgatctgccatctcttaaaatgcacaccggtgaatttatccggcctcagtgcatcggcaaaaccagccatagtaaaatcacagtgcctataataaggtttttggattgttgagattatgggcatataaggatttaatttattccataaataaatcatgacattacagatgaaaactagcatgaacgcatcattagatctacacatgtaaactacgcagaataacatgaacagatcaaatatgcgcaacatattgaacacgtaccgaggtgacgaaaagaccggctgcttggtcgaaacttttcgcaggtgtctacgaaggcacgaaacacgcgagcgaagaggaaggcgagccgtcgcgaacgaacagggagcagtcgcgcgaagcgcttcccaaaaaccttattgccgccttctcccggtgcaggacgtcaaaggcagaggttccggagacctgctctcccgatcgctggtgcacgccggcgagcgggatggagtagtctacgagcgacggtgcagtacagagtaggaggcaaaccctagattgattttcgcatatattgcgtgaagacggcgggtcggtttatatagagaagggtcgcttgatcagggcgcccgcacgatctctactgcgcgtaaccgaaccggataagtcgcgcgtaacttatccggactccacgccgtttgcacgcaccggatttttcggaacgtttccaaaacaaaacgaatccgaatttgcagcaaaacaaaaggcaaaaggaggctgcatctgcgcaagggtgaggagccaatttttcggaccattcgacgcgtacgtcgtgcacgcgcgccgcctgccctgccaggccaggccaggcgaggcgagcgagcgcgcgcgtgtgtttcccctcttctctccaccacacatgcttcaagtggctaggagggcatcctcccttttaaggaggtccccctctcctagaataagcaaggtggtactaaactccacatgcatgccatcccatgaggtgggcttttgtgattttccaaagaattaatcttcgagtgggctaaggcccattcattaattccaacaatcccccaccaaatctcaaaatcccactgagatttgccttttccaatgta

SEQ ID NO: 8574 - DNA, 3260 bp, Oryza sativa
tcaaagtggccaacatgtggtttcctaaacaaattggcaagcctcgcatcacaaataatttgactttttctgcgaggatcacgaagatttttttgctttacatactcaagcagaagaatctgaacatcaaattgggaaatataagaaatatcaccatttctcatgtgcccaatgaattccaagagctctgatgatgcccattgtgtgtcacctataaaagtcattccttcattttgcactctcttaggtaagctttcagcaccattgttttggcgtttccgtccccttttccctgaaaaactattccgtcttcgttttcttgaggcgccatcagaactggcatcaaggtcaaaatttgcatcatagaggtcattggatgaatcttccttttctctcctagcggaagtgctacgaacagtccaacagcttttggcattgacaagttcttccaatgttagagagtgtttccctttaagatccaaccaatacaacttgaagagatattcccaattatttttatcatcgaagtccaccttagcctagaaggcacatatcaatagcaagtcatacaaaatgtctgagtatcttatcaacaaaatggagatttctaatatttgtgcaactaaagtagaagagaagtttagcttgtatgtttgtttcagcaagtcctctttatttatttttaccaagtaaatataagcctaaaatcatttagaacttcaaggtaaaagtgtattgctacttgttttaggttgcctagttcatacaagatgtgtgaggatagaactatgttggtaagattacatgaagtcatgaagattacgccaatatttcctagttacagatgcacttgagctaaaagtacagttctgcactgcaacataaaccaaatcaaagccacacatcgcaacaacctaaaggcaatagacaacggaatggataaattgacccagcaaaagccaccaactttacattacaaaagctgatagttacaagcctgcaactcacaaaacattgtgccaatatattggatcaacaaaatagagatatagcaaatttcatgtattccatgactttgggttctgcagttattacttctcaaactactcagagaaatatctatgaccttaattaatcatgattttcaatatcaaatgaacttgaaaagaaggtgcctagttgaaccaaatgttaaaaatgagcattatgctgtccaaaggactgagaaaatggatatttgcacaactctatagacatatttgcatatagatggtcatataattcaagaaacacagagggaatataaggattagcagcaggttaccttggcacgatcatctttggattctatcaacagtatagtgctatagcaggtatcacagaagcccttattccctctgacaccaaagaatttgactggcttttgtttgatgcaacctttgcagagggagtatgtacaagtatagcacatgtactgtactgccttttcacaggtgctgcataggtgccaacctgaaaaacatgacatcaagaacaggataagtcgtattgaactattggtttgttagcggaccagtcaggacatgcaaatacccaataaattttaccacggatgtactttccagatggtaaaatggcaaaaagaatgacctaatctgctcattaaattcaagtacataaaattcatagcattgcaaagaagggaaggcaatcataccaaatgcacttatatatctagtatccacaaaagatgccttttttaacagcagttatggccaccattacgtcaactataattgtacgtcaaataagatatgacactaatcctagtcctactcggcacattctaaactccatttcggttttattaattcctcgatttccgttagtatgcttttcaaactgttaaacggtgtgtttcatgcgtaaagattctatacagaagttgctttaaaaaatcaaataaacccatttttctagttattaataattaacagtactcaattaatcatatgctaatcacatttgtcattttgcgtgcggttaatcatcagtttcaaaacgcattttagaacgcgccctcggtgtgcacagcagtaatcactagatgttaagtacaaagaagcagaagtccaacaggagagcttaccacatgtccatttcgcccgagatcgaaagaatgattcgtcgcgcttgatgcaagcaggatgatagacttttgtgcaacccctacagccccaaaatggaagacatttggttcagctttttacgagcagacgaaattgaagctacggtactataagcagaaatgcaagcgccaaccgcgcacacgcactttttatcgcagaccacgagattgcccccgtcgaagcagatgaagcacaccacgtcctcgtcgtcctccctcttcttcaccggcttgggcggcggaggcggcgccgctccatccctgttcttcggcggcctccctctcttcctcttcaccaccaccggcggccccacggcaggcggctgctggtgctggtgctggtgctggtgcgcgggcgcccccatgatcgatccgaggaagtgcgagtcatcaaacccctcggcggacgcggacgcctccttcctcgcggcggcggccaccaccgccgcgccgggtggtcccacgggcggaggcggaggcgggggcggggacgcctcgccgcggagctggggagtggatggcggagccggctcgagcgggggaggaggaggaggatgcggcggcggcggaggcgggaggcggagctcgggcggccactcggcttcccccggcgagagcagctccgcccccggccccgtccccccgtccatggatggaccactcccctcaccccacccacccactcgacaacccaaaaccctaaccctaactccctctctctctctcgcgcaccgcctccacgggcaggtgggtgaggtgggggaggggaggaagcaagcacggaggggacgggagggaggcgagctcgaaatggaaaaggcgggggaggaggggagggaggcgcggtgaaacagtaacaactcgccgcggtaaaaaaaagagaggagaaaacctcactcaagtcacggcctcctcctcctccggtgcgcgcgcgtggccccggcgaacgggcgaagcgacggatcggaggaggggaaagagtggccgcggccggtggtgggtggcagcgcttttggggtcgtggtccccggttttttctttctttttattttcttttttgggctgcaggaat

SEQ ID NO: 8575 - DNA, 7885 bp, Oryza sativa
ttcttttttctttttgtgtgagtgtgtctcggttgttttggtgcttcaattttccccggctccccgcgctgctcggcgattggggtggggggtttgatggcgtggttggctggctcggctggatgcagttattgggctcacggcgcgatggacgggtcgtggatataggtgtccaaacgggcggcacggcccggcccggcacgggcacggttccggcacggcccgtttcggcacggcccgttaggcacggctgatgaaacgggccgtgccgtgccggcccacgtgccgagccgccggcccaagcacggcccgtggatggccgggccgtgcccgtgccggcacggcacgcccgcggcccacgggccgttcggggcacggcggcccgtgaaggcaggccgccagcccgccagcctgcagtgcacagtgttttttttataaaaaaaagcaaaggaaatgtataaggaaaaaaaattaaaaatggaaataaaatgtttaaaaaaaaagtaatgatttactaatgttaaaaaatgaaaaaatggtatttaaaaaatggaaataaaagttttttaaaaaagtaatgatttgctaatgttaaaaaaaagaaaaaatggtatttttttgttgtgttgaaaaatttaaaaatatagattgtgattcattatttttgaaataatttaaagataaatccacacttgcgaaaatattgcaaaagaatttgttaaaaatagtaatgacctttattgatgtttatatcattacaggatacaatgatacatgctgcctcgttaaaaactttgtcatgtaaaaactcataggggaaaatgagaaaaccatgacaaagaaaagagtacagctcaaaggtcagaactacttctaacaaaattctactggggttggtctggatccaggtagagttgctcgaactgggcggccaattcttggttgtccgcagtgtattgggcatgttgtcgagcaagctcccagtctttaacgcttagtagcatttcgacgtggtcgctgcgcagagtcgtcctccggtcttcgatgattcggccgcatagactgaaggccgattcggaggacaccgtcgacacgggcaccgtcaacacatcccgtgctagttttgaaagcacaggatatgttatcttgtggtcattccaccacccgaggacgttgaaatcttgtgcttcgtggtggatggcgtcgctgtccaaataaccggacaactcttcggccacaacatgcgaagaggcgtctccacttgtagccgacgaactgccaccaccttggattgaacttgaagacgatccaccccaaatcctaccccactgtatcttcttcttacctgtagtggggataggagggggtctctgctggcgaacttcctgaaactttacttcatatcttccaaaaacctcatataatttacgtctaacctcagtataaaaagaactataatctacacctatagtatctccaacaagtgataaaatagcagacaatccccttaatttacacctaggatctaaaacaaaagcaagagcatacaacataggtatatttttccaatatttcaaatatttttgtttcatgtgaaagacaggttcagttagaacgtcatcattttcgtattctttaaataaagtagcaatttcaagaaggttgtgcaaaattatattagcagttggataataaacttgtgacaaagttagagtacaatcataaaaagtttctagaaattggtaaaatttttggacaattgcccaaacatgctcgttcagtactgaagacccgtcactgtttcttgggccaccacgtgactgaacaaaatcaaaaagtaaactactataaggtaaaacaacttttaacattaaatacgttgcattccaccgatgctctgcatcggtggcaaacttacgagctttcacaccggccgcattgcaaaacctcttccatgcagcaatccgcgggttagaagcagttaaccacgcgattgcttgacgaacagcattgatgtggtcacctaccctcttcatgccagtcttaacaatcaaattaattatatgacatgcacaacgctgatggagtagaaaagattgagcatacacacaaaataaaggttgcaatatttcaatagccctagaattagcagatgcattatctagggtgacagcaaatattttatcagcaagattaaattcattaattacttccctaattctttcagctatgttttctcctgtatgtgagacatctattaacctaagccctaaaactctcttttgtaattgccaatcatcatcaacaaaatgaacaactacgctaagataatcctctctagctctactactccatatatctgaagtaacactaacagagaaagtacatgtactaaacagttccttaagtgcagttgcttccttgtgataaacattctctaaatctctagttgatgtttgcctactcacagctttaaacctagggttatgagattgctgaatgtaatgttcaaaagcaggggactccccaaagttcaggggtaaatcttgcctggcgattaaccggacaagagattcccgagcaaccatgggatcgtactcccaactgtgtaccgtaccgtctgggtttaccataagttgctgctgccggagttgtattccttgcttcttggcacacgactccgcatggcgcttgaggtgacctgtaccaccagaagaacgagcagataaaatttgcctacatattctacaacgggctttcgatacctcccttccgtcggggcatgtttcctttatctcgtcgaagctttgccacacaccggaggttctcgatctcttcgagccggtgtgtgtcgaaacacttccgctcgcggttccggaaaatccttccgaagctgtctccgcctgaaccggtacctcctcaacgacagccgtatgaaccggtacctcctccacagatggtggagttggagccgatccggaggtaccgtcaaaccccgacatgtagttggggtcgaaatcacccaaggtgaacgacggcgactggtatggaaagttcggatccattctgaaaatttaaaccgacataaacaaattttcgaatatttattgaattcacaaacacaatacaaataatacacaaatttgaatattacttacatctttccaactgcgagctcttcaaacctctgcgatcaaactgttgaactacgaaactaattttgatttttgacaaaatttgagcaaattttgtcaaaatcaaaaaaaatgcacacttgagaacaaagagagcacttaaaacacttgagagcacaagatgaggagtgtgggatgaggagaaatggctggggttcatgccctatttatagggcgaaatttgagattttttggaattttttcgaaatttttatgaattttttagcctcccaacggttattttcaaatttgaacggtcaaatagccgttagtgccacgtggcgccttcccattcgaccgccgcccgccctgtccgcgcctgacgggccgccggcgtgccgtgccgtgccgtgccgcgggccgtgccgtgccggcccgctacagtagccgtgccgtgccgtgccggcccgcgggctcggccagcggcccaagcacggcacggctactcgtgccgtgccggcacggcccgttactgtagcaggccgtgccgggccgtgcctgctacaggttcggccgtgccccgggccgcccgtttggcccggcccatttggccacctctagtcgtggaatactctctccgtaaaaaaaagaaaaaacttaacctatttagaggtgatatttttatacaatgaaactggacattgttcaaattcattatactagaaagggtctttttttatccagatttgttctattgtaaggctaagtttttttttatgaagagagtacgtggtggtggccgaggatccgctgcccttcttgagttttctgcgggtggctcggtgacgaggagattgatattatgtcgtcctcaaaaacaggtttcgttaaaatacctttaaaaagtggatttcgctacattactattgtaaaattgtcgttgctccttccactcatgtcattctcacactcacactatttcaggcatccagccgcctaggaagacaatggcagtgttcggtgagctcgagtaggctaggcgggatataaatcataccgttaccagtgccgtctatcctgcctagctgcactaaccctctcttttttttcttgccaagtcccaggaacatgacctcgtcgctagcgcggtgtagagcgtagctatggtatcgtgccaacgttccaacaacctcacactatccctgatcatgtgacgctagcacggtgtagagcgtagctatggtatcgtgccaacgttccaacgacctcacactatccctgatcaagtcacttcgccaggagattcacctagcatctaggaaggaaacgtctcatgaaactccttcaaccgtggaccgatcaaggagatcggcagcgcctttttttaactccggtcaaatgctaccggcgccaaatcctccgcaatcggtggatgtcaattacctgcagcagtgacaaccttaggggatattccacctcctgcattcgatgtttttggtgtgcatgtaccagattggaatgtccttggtgtcattgtcacctctgatgccggcatgccactcaccatcaccggagacgcttggagcttctctgcctcgggctgcttcctggtgagctccctcatgcctagtgtacccacatatatgcattcttccctcatatccagtgtacccatatgtatgcattcctgtagactagcatgcacggttttggtaggatatattaaatatgatgtttcttgtatatttggtaacaaaataaatggtaccatatatttatcaattttagcaaagaattgaattgtttaaaatggcatgaccgagaaacgtccatgggtctttcggctagctctataaggacagtcccaacccatagtgtccataagcagtgtctatggtgccatatcaataagacatcacaataaaaactacattctacaacccatgttttcttaaagtgatcattaataaatacatcatctctcttctctaccaatcatatttattcttcatctattatgaagacactattatctcccaatgcaaaacttcatagtgtctagtgcataggttctcgtgttgaaactgtgtcttgcatgagaccaagtttcttcctctctccactctctctcttaattaatatagtgcaacataagctaaaagtcctacatggcaatatagttaatgccatagacaccatcctaggtggagggttgagactgccctaaggtggtgggttagacgacctgagtttgaagcctcacccattctatttatttgatattatgtcattctctaatattctccactcttttaaaatggcatgaccgtctttggtattatttcagtttgataagtcatttttgacaataaagtaaacaagttctgcgagtctatggggctgtttggttcaatgcttcaacttgccacaccacaccttaggctgccacacctccttagccttgtgtttggttcattgccatagttatggcaagccacactttcttaccgttctaccccacatgtcatagactcaatcctttgcctaactttgccacacatgtggcttacaatttgtagcccacaaaaagtgtggcaagtcacacttgtctaacattgcctaaaatgagttatggcaatgttagttaagaaccaaacagcccctgcgaactcaagagctggtgataaggactagaaaatgggcagcacagcacgtgtaacatgtgcgaccaacacagtgagttgttcgtattctccaaccgcatgaagcgatttgcattgggccctgccgtgtctctgttaacgagtaaactttcactgacgctctttgttcggcattcatcatgttcttttgcaaagtcactttctctgaccatgacagcttatttgaaatattgtgttttaaatacaacaattttgattccaatactcccaagtaatattgtgactacttgatgacagtgatcggatttcatatgataaaagtttcggcgtttcggtcttatattttgaaaaaaagaattagtcccccgtttcatattataagtcattttgtttcaaacttaactaagtttatagataaaatttgactttgaccaaaatcaaaacgtcttataacctaaaatggagggagtaactacaagcccttacttacacgagagatacagacatgagactatatatatatagggcctgtttgagggaccttctagctgctgcagcttttcgcagaatcagaagctccctaaacagtacaacttttgatacagattctgagaaactgtacttgtagaatctagaaaataaattacaagccagaagctataaacataactttttcagattctcagaagctggctatcaaccatctaggtctctgaattttaatctctcccaaacacgtccatactactccatgaaagagtacaattatactctacatcgtataaattaaaacaatagtatataaggacattcccaacccaacgactaagatagtgtcatggcattaaataagttaccacctaggaaaaaaaatgatgtggcaagtgaataaatgaggaaagagaaggaaaccatgtcttatgtagacatggttttcacacaatatccaagacattatgtgagataagtagcattaaattaaagtatggaatagtggtgtttgcattagaagagtagtgtctagtaaaatttatagaaatcatgtatagtgttatgagttgggactgcttgacaaggacggaagacgaagacgccgcgagtgaggctgacgccccaccgccacgcagtgacgagagcccgtgacgcgtggcctgggctggtacgcgtgtggtggtgtctgcagctcgctcgcttgcccgtcacggcgtcacgcccccggtaaaaggcgccgacgcgccatgggacagcgatgagacgaggagccgtccagctccaggtccagccgcactggagagacaggagtccagctccatccgcagcacgacagaacacaggaggctgcaccaaaccaaaaggtactagcactagttaactgaacagtgaaaaaagagtgtctaactggccctgtttagttaaaaaaaaacttttcacatatatgaagtattaaatatgaaaaaaaaccaattacacagtttacgtgtaaattgtgagacgaatcttttaagcctaattgcgtcatgctttgataatatgcctctacagtaaacatttgctaatgacagattaattaggctttataaattcgttcgcactttcctagtggaatctataatttgttttgttattaaacaacgtttaatactttaaatatgtgtccgtatatccgatgtgacacccgaaacaaaaaattttgccatctaaaccaggcatgtatataagagtaccggcagaagttcagtagatagatagaggccatgtttagttcccttcaaacttccaaattttccgccacatcaaatgtttggacatatgcacgaagcattaaatgtggacagaaaacaataaattgcatagtttgcatgtaaattgtgagacgaatctttagagtctaattacgcgatgatttgacaatatggtgctacaataaatatttgctagtgacgaattaattaggcttaatagattcgtcttgtagtttacaagcggaatctataattttttttgttattaatacttcaaatgtgtgtccgtatacgctaattgtttttaccaaaacaactaacacggccaaaagctactccctccgct

SEQ ID NO: 8576 - DNA, 12055 bp, Oryza sativa
tctttcagcttactctcaataatctggattataataattccaagtctggattatagttatgggctttttaaattcaaatttcaggatgctaagtggaatttcaacaaagtttaggattttttggactttcagcagaaccgttctgattttttttttttaaatttcaggatattttaggcaataacgtcttacaatcgtgtgatgtgctctttgtagaggtgtagtaatacgaatgtttcctgtctcgtgagtcgtggctcaactgttcatgcatgttaaaaaaatattagagaaaggtctataaaatacatttatatcaaatcttaagtccaaacttaatttcttttaaaaataaaacaatttttaggtgaatagtgttgtgttactatttatctaaactttgtctttttttactccataataaagttgagtttaaacttaaaatttgatgtgaatgtatttaatgcttacacctatttctaatagctttctcatgaattcacggggtttttacgggtttttaagttttcaccggatgtatccccttaaaatattttacagttagtctcatatgtccccttaaaatatatccacagagaatctaaaaatcaacacatcatccacccacaccaactcccgatgattcttgctcaaggaagactggaagagctcgagaaatattccgtgtactaccatggttaattaattatggctgtgtttagatccaaagtttggatccaaacttcagtcattttccatcatatcaacctgtcacacacaatttttcagtcacatcatctctaatttcaaccaaaatctaaactttacgctgaactaaacacagcctatataaactaaattatggctatgttaaaataggcagcagcatttcctagatgcccgcccttgcacgagagatacagacaaaagagaagcccacgcaactgaaacgacctcccgagactgcaaggccgctgacggcaagctttggttcactcgggcgacagctttgacggtgttgcacatcttaatccttctcatccattaaaatccattattaatttaggccctgttattttctccaacaaaagttgaattaacttttggatactcatggcatgcttttcaaactgcaaaacggtatgtttcgtgcgaaaactttctatatgaaagttgttctaaaatatcagattaatccaattttcaagtttataataattaaaactcaattaatcacacgttattaccacctcgttttgcgtgaaaaacttaaccttcatcttcaggacattcaaacaccaccttaattgtactagagtagatcaatggataccgtagattggtctgtgtaactgtgtttattgtagccccgactcccgagtcatcatcaccatgccctgcgttcaggatggagcaaggggtcaaatctccatgagcactatcatcagatgttctacgggagctacgaacaggagtgcatcagatgttcaagctgttgatgttttcagaaagaaattcagacggtggacggccgcgacacaacggctatgcaaggctcggccgtttgcccagattgtcactgcatactgcggcatgtctgagcagatcagcagagaaccttgcacttgcagcgcagagagatgtgcaagaaaggcaggccacaatcgctgcacagtcctatcttttccgtgttgttattactggtgtgttattgggcatcgaagagatcaagaccctgaccttgttggttcttggcattgtgatagccacaagctgatgtggctggcgatctgcttcctcactgtgctcacggctgccggggatgagcaatttgaagggtcacctgataatgcaatgtgaaaaatgtcagaatttttttttatctaaacatacctcgggaaaaaggaagatttttcctctgaatttagtgcatatcgaccttgtgtaagtcactattgaaccatactagtaccatagacatagtaatgctactagagcatgcagagagctttgtatattcgtggtcctcaaaggagaaccaccaaagttaatcacaatataatactctctctatatttaaatacatggcactgttgaaattatccgatcaaacttttaaaactttgaccatcaataactctcaaaacatttagtttgaaaacataaaaatcatatagctagaattttcttgatagttatgtacttcacaatattacaattttgttgaatgttatcgttatatttcaatagaaaaattgtggtcttacacaccaagatctgaatatgtcaggagtgtcatatatataaatatagaggtagtattgcttatgtagttattttgtaacatatgtattcatcataccaagatactctagaaaacacttccaatctaccttcaatcctgaaagggagttgggggcatcctctcagatcagtgccatgtccgcaatttctacatttgattatgtatgatggcactacaaatgttggcgagcctcagttagtgcatgctgcaagtagagtagatacacaaagagcaaggctacacctaaacatggagatagcaacaagccaacatattagtagatgagaactttgaaagctcactatatttcgacgatttctgtttcgaggcatggcgccatggatcttgagagccatttgtgaacactattttagaagctgcaccatttttcatgcaaaatcgggaaaaaaatgtgagtatcaatttagcattcaggacaacagtgagaaaatctgaaatccagcagcgataaaaatctggtatctagaaagcagcacaaccatagtatgcagtatgcttacggttagtgtacaatgaaatttacagaccgtaccaaggtggcagctggactgctgaaattgttgattccatttcgcaggcatggataggccaatgattccacaaaaaaaatgctaatatacagagaataaaagctagctagagagacaaaccagcaattcttgtgcctccgtaatacaagtttgtcatgaacacatcaggataaacaccttcaccaaagacatttctgcataggtccaaatggtacctggagatatgcaaagcaaaaggcatatgtaatggtaaaagtattagctagtgaacttgattatatataccaaagagcaaaaacgtgagcaacagatagaaatcaaaagagtccaggatatctaagatacactgcattaagagattatcgaaggtgaaaatacagtcaaatagtatgctggcaatgacttcagtagaacatattgtggtgcaaacacggagtgatcacaacgagagtaatcgaaacatgacaatttcttaaacaggtacccaacccaaggcttgactgaaaaagaataagcatacagagatggaaaaaaaaacataggacattaccctgtattgatctctgtagagcgaatgctatcgtttttgggtgccacttgaaaataggcaacctcactgcaaacttggaaccaccaaagtctagaacctaaaaataaatggcaatgcactatgggtattacattcatggcaaataacaagaaaacgatgtcatggtgtaactgcagtttggtttcgctagcaaaagagaacaaatagaaaatcatttactagtatcatcaggagtcgtattcttcaagtattcctgatcatatgaagatacagttgtcccccatcttctaatgaaaaaatcttgcacatactgagcatatgtttcctgtaaaaccagcacatgaaaattcaagaaggctggaatcaatgtacttttgcaaatgtactgccagaatacaatggttacacgaggataaataaaaaataataggtggcctatgcaaattaaatgaaaaggtacaatgtttaaagaacataattatgacatgattgttgatatgtcaagattaagttgaaaacccaggcacaattttcattaaaaaaaactggcacggcacaattggggtgggtatccaaggctctactatcccacttcatatggtgtagtaatcttaggcttgcttcttgagtgttgaaaataaacctggatgtataccagacccgtacattttactttgattgttgcatcagtgtatgtgtgattgtgtaatgtgtccgactgcatccttgatagattcagaagccgggtatttttttaactaaatgaaactttaactttctaaaaaaaagtcaaaactctggctattatcaaaagtaacagatgaattaccaccaaacttctcccggtcttcttcgcattgattagaggggagcatacagcatcaggactcccatattggaactgcaaaatggcataggttttcaacaaccaaaaatatatcttaaagttacagtgatatcataattcacatcatgcatactcctatggccgccgcatctgccaggaagaacaggaaatcaccatcatttttcaactgcaaatcaaaagtggattaaagcatgcgaaaatcctggaaacagagagattgtattcatcgtgtagaactagaggtacttttatgttacaaaagtaaaaaatgcacatcccaagtcctcaatcacaaggggttaccttctctgctccaaataaaaccttcacagagcggctgtccaaccgaagctgttcatcgacaagtctagttacctcctgaagggcagctttgcattcagggccagctgaatcccctacctacacaatggtagccatacaaaaaatttcatcagatccaaagtggattacacagaacagcagcatggatacaaggatcatgagttcatgactcaccatgatccttgtccatagcactggtgaaactgtactcctaaatcataattcctaacctgcttgtcaaagtcagtgaaattgtacacagcaagcaccacccctgagctcgcaaggcttccacatgtcaagtgagggaacttgagcctgaaccatgcactaagagcacccgagtacgataccccgaagacgaaccaaggattgtcaaaccccgatgatcgattgtacctagcattcaagatttcctacaaaagcaacaaaaccacacagagagagagagagagagagagagatcagaaaatcacgtgctaaatagtttatccccatttgaaacgcaggggaatttcacatgaatttgaccataaacagttcgatttacacgggaatagggagatttttcatgcatttcgtcgatctgaatcctgacctggtaatgctggcggaaggcgaccaggtcgaacagtgcctgcttggacgacaggaacctcaggttctccgtggtgaggctctcgaacggggagctcttgccgtagtaccggtgctccggcgtcaccacggcggcgccgaacttcttggaaaggacctacacggcggaggaaccccaacaaatcagcagaaatggcatcggcaaccgtcgatgggtttgcgatgtctcacggccaggtagtcgttggggatgccgttgcaggaggactcgccgcagatgcgcaggaacaccgggccgccgccggcgtggtagtcggcgaactcgtagtaccgctgcttgaactggcggtggtcctgcacgccgccggcgacatcagcgcgagggcgctaaacccaaagaacttttttgtttctcgcgacattacatatcagcccctgatattaaaactaatacaatccatgccctcgacgagtgaacaagccagagccactcagggatcgttttgagaaacagttttaatccagggggttttagagtaaaacaaaactaattcctccgaggaggaagacgaggaagaagacgactcacggtgggggagaagtggtcgaggcgctggtccatccaccgctcctccgtcgtcaggtgccggccggcggcgccaccgccggcggcgatcggctcggcgccgcgcgcgaggaggaggaggacgacggcgacggcgaggaggtggtggtggtggtggtggtggtggtggaggaaggcgacgcgaggacgagaccccatcgactccgtggctgagagactcttgttcgagtgttttgtttggccgagacgaggactcgactctcgaggagtactacagctattatactattatagtggacttttattattcttaggattaggaaaaaggaacaaaacgatgatttctaagagggggaaaaaatgaaaattaaacacaggatctgaacttgttgacgacaaattaagagttgagcagttacactgtacccgctccattgcgaaatgtaaaaagttttagttttatactaagtcaaattattcaaaaattaattaagtttagtttatagaggaatattaattcatccctttgtttacaaagtatttacaaaccctaaaaaggtgccacattcttgaagtgtattacatcctaaatgtaagtataaaacttttgttccctttagtttaacgatttttttttgaaaatatccattttttttaaaacaaaattgcgtttatataaactagggcgaaaaatttgtgaaaatatacctattctgcagatcggttccgcgggagcgctaccaaagcgcggcgtggagcggacgacggaggcgctcgcgcggaatggggctgtgggaccgagcttgtcgtgaacttggaaccggctcgctctcgcagcaccagtgtgccgaaccgcggcgccatcttttttgttgtactgcatggcactgtgttcgacattgttctagtacttttgacactgttcgtgggtcggttccacacaatgaggacacggtactgatgtatgaacattgtcggacagtacttgaagtgtcggaacagtgctacatagggttgaaatcgctgggcaccgcggttccgtgtttgggaaccgcgggaccgtcgtcgttccgcgttttggagctaggggactgtgatggtcccgcacgactgtaccgcgggatcgtcggtcccgcgttttgaatctgtgggaccgtcatggtcccacatttctgtcctgtaggacggatatacttttgcaaaacctttccgtacatgtatataaaccatacatgtatataaacgtaaattattaaaaaaataagtatatttgcaatttttttctaactaacatcaaagagtaatgcatgatcgaagttaaagttgtcagttaattaaaaataagagattaacatctaccatgtcaaataacgaaacaatgaaaatatatttcataacggatataatgattttcatttcatatcttaaaaattttataaactgtcaaacttacgatagttatttcagaggaaaaaaaacatcggttttatatgttaaggatagaaggggcaccattcttgtgagattattggtaccggtagcctgggactcttaattagtaccaatcacccaatcagccaaccaaaccttgtgttatatattaggataattattcaagatagcttgtcttgttagcctttcttcagaaagctccacccatggacatatcggccaggctagcttcttgtgcgattgaaaacgatgcaggcgtctctcacgttaaacattcttttgtgtaggatatagcaggtgatttatcttgtacttagctcagtagtaacattttacatatcattggcactcttctgcagagaaaagcctgagagttacctgtaaggttattgacaaattataatcgacagtgattatctggtacttatcttatattttcaccggaagactgaacgagttcatccgaacgtattaaaaaggagaatagttataaagaacggtgtaccaaagtgtacgcccaagcaccacacgctaaccacacaagcacaaatcgctaagagtggggcctagcaccaaaatggcccccactaagtgtggttgatcgccgccaggcctatgacaacaccacaaagacaagacttcgaaaatgatgccaccacagaggtcacgacatcaaggatgttgccattgtccatttaagaaagatgtgattttcacccagagaaactcgtcgagaaaagaaagaggtaccctcgacaatatcccaaggggttacaacgcccgaaggcgtaaccattaccagcctagtgaactaccaagttaggcttttgcctggaacccctacaaccttacttgtagttcgccgcccactaactcagaaaccaccacacaggcattggcagcacgtggcctccaccacaccgtatcggcgccccctccaccgaccgacttccaaacttgccactccatccaccccccccactccgccccgagcgagagctggcccaggcccccttcgtcccgccactcgccagccttcttagatttggcccaaaagaatatcttgtagtagtagcagcagtgtttgagcaattattacggccgtacgtcctgagaatgtttgatcgataacatgagaatgattggaacactcaactgtctgtcttttagtgtgattgtcctggccttcaaactaacaaatggttgttggtagctcgagcagataatcagtaagcagctacgctccatccactctatatatgccctgagatattaggtagatcaacaatgaaattgacgaaaactgaattgaatttgaagggaattacagatgtgcttggctcaaaatgcagaggctctgagcaaattatatcgggagccattggttagaaaaaatgttcacgatcactatagctcaaatggtacaatagctggagtgctggacagctagcaaaactaacctttggtccgtcttgcattttttatgaacaatgcgatcgacaatctgctctatattttgcttcacagcttccgagatgcacttgacaacgagtgataaaggatatgtggttttaaccttgagattccgtatccaatcctcaacatactcataattcttagaaaaatattcagagggacatatctcctttcaaatcttgaaaaaaaaaaacttcacagcttctgaagatggacagttcttcactaagagatatcgatggattaccatattgcatcatcactcatcagtaagaaacatcgatcttactactccattaaaaaaaagtaaattttagctacgaatctggacacgtttgtagttaggattggattttcttttggatgaagggggtacagttgaaggatctggatgattagacgagcgatggatcaggtactaatccgaaggagggagagagaggccagggtttaaaggaggttttgttctgaggaatttctctcttctttttttttcttcggagaggggcttgttcgtttcttcttcctcgcgccgcgcgctccaatccgatccgccctgcttgatcaaaaccctagcgatcgaattcccccctccccattgcgagctagtggtggccaaaatcggccatggcccctgactgcgtcttgctcgaccgctacgtcaccttcctcgacgaccccgcaccggcaagcgacgaggtcgatcgccggcggcgaacccggacgacctcagagacgggatcgccgcctacctgcgtgccatgaggccgcgcgcgcaggtggagagaatcccccgcgggtcacctacctcgccatggtgcggccgccgccgtcgtcggatgacgatcccctcgtcccgcagttcgggcggcagatcgactccggcgtcgtcgcggcggccggcggcaacctcgtcgccctctacgccggcccgtaccgccccgcctcctcgtccatggggtgctacctcgtctacgacgccgccgcccgatcgagttcgccgccgctctccacggtccccggcgtcccctactccgactcccactcgagccccggccgcgcgaccgtcatcgcgccagccgccaccggcggcggattcatggatggccacagtgtactaccaccgtcgaccgccgagatcaccatcaccacatggacactcgatctacaggatgatcattcgacgtcaacacaaaactggacgaatcgggaagcataacttcaaactaaaagtgaacaagaacaggggtctgaagtaagctgtgacatgtacaagtaccacccttgacaaatgtacatgtgagcaggctattaaaatggaatgccttggaatatacattagaatggtatgtgggtgttccttactgttagaaactagtggtccacaatttgatatggaaataacaaattttggtacacagttcttgttgcagctagctgtcttctggctttcttttattctaaagttgttcgaatttgtagtcctgaaaggaagaagttgttatacataactccactttgcactgcacttaacattgtgatagggcagactttttttttttggaagtagataaagtctaaagagtcactctgatcaattttaacaaagtatgtgtgacaaatatatctgtttctgctagattgggcttctaagcagtggaggtaagtgcaaaaaggatgaagatttgatgatctacgatgcattgtcaagtgatgtgatgaagccttaatattatggtatgatttttcatagcttctgtggagaacaaggttgaatgtgttttagtttatctagaaggttgatcttattatcaagtagtactggtggtttgatcctgaatgtgtggttgtctaataaccatgcagtaccactggtggcttgatccttaatgtgtggcctaaatccttcctatatgacttcttttaatactgttccgtgcataaattgcattttatgtgttgcctgtactccccctagtcacaaatgctttataccattgacatttttggcctcctaggtttaactttgatcattacttttctattaaaatataactataatatctataagatgtatcccttatggtcaggcttttctaagaaaaaaagatgtagtcatatctcatgttaaaaatggttggagtaggatgtacccggttatctaatatcttagtctcatgaataaacaaagtttatcttgtacataattcagtaacattttacatatcatggtaatcttctgcagaatgggggagcctgagagcaacctgtaaggttattgacaaatgacagaggtcgtcaccatagtagtgtttgagcaattgttaccgcagtcctgaggataatgcttggtaccatgagaatgcttggaacaaccaactgtccgtattatttgagtgaatcatactagtctaaatgacagctgcattgtcttgtactcatggccttttgaacatatggttggtagctcgagcaggtaatcagtaagtagctatgctccatctactgcccagcaatggctcattgtcgtgtcctgagattaggtagagcaaagatgtcattgaccaaaattgaatttgaagtgaactgcaaatgtgtttgtcacgaagtcagagtgatcgagaaaagcagaagctcagaacaactaatatggatgtattagttataactttcttttttttttttgcaatcactatagttcaatagtataatagctggacagccaaaaccaaccttgctcttgacattctgataaccataaatcaatgtgatcgacgatctgctttcttactttgttcacagcttctggagatgaacaattagacgagtcacctggtaaacacaaaatacaaacatattatgggcttggtcacaactcacaactcaaactagagacttgatatatcttaatactagacgaggcaaagacagttatcaagtctctagtttaagttaaaatctacagctaaaaaggaaagtcacattttccctgcagtactgtcctcaagagaggcttcagcaaaggctggaatgttggatgtaccttcaatatgtgaaggagcttgagggcatccagatagatcactgcaatgtccgcaattgctgcactcaattaagtatgacggcactgtacccattgaaaaataatttgtaagcatatcataatgccataaaaaatgcattcacactatttaaccatgctcatatgagatacaaaaacagtgctattgaaacaaagaaatggccaggactgtacagatgctcacattcttttgatgatttctgcttagaagcatggcgccatggatacttgaggggctgcaggaat

SEQ ID NO: 8577 - DNA, 9160 bp, Oryza sativa
cataaaaaatgcattcacactatttaaccatgctcatatgagatacaaaaacagtgctattgaaacaaagaaatggccaggactgtacagatgctcacattcttttgatgatttctgcttagaagcatggcgccatggatcttgagagccgtttgcaaaaacaattttcgaacctgcaggcatgcagtatattgattaaaaaaaatacaagaattgattgcctgcagaataatgattataggctttggatgtcatactgcatacacagtacttcccacagaccattatgcacattcttggttatccataatatccattcaaaattcatgatatcgttataatatatggaacttgtttgtgataaaaagcggctattagcactgcagatataatcatataaggccatttaactctctagtcttctatttaccatcactcactgagcatgacctttacacacttgcattactagtgcagctcaatcacttgaggcacacaatatgatccagtaatatgaacatctagaaccttgtggttgttatttctctcttcatctcttgtctagtttttccatttagagaggggaaggggaagagtttcaaggttaagtaaaaaataatattgtagcttgctgcagactagcaccataccttaattgagatccaaacgaccatacttgaagaaacaaaacaggtaacatgattgaagctaattattcaaagaaaaaaatgatatacctgcaattcttgtgcctccatagtataaatttgtcatgaatacatcagggtaaactccttccccaaaaacatttctgcacaagtccaaatggtacctagaaagaaaagaggaacttatataaatacaatatctagaagcatagtcacatcttgaaaaagagaagattatagatagcagatctaaatcgataaggtaagatagcttccagtggaatatttatttgaggaaagtagatctagtaaccttgtgtcaatctttgcagaacggacactatcattttttggagccacttggaaatatgcaacttcactgcaaacttggtaccaccataacctatatgctaaataaaatcaataattaaatgcataggcaacataaacaattggccactgtctattcattaagtgctgcatttcaaattctcaaagcatgacatttggtaatatagaatatcagggttcgtaattaccagattcagcaggaggtggagttgtgttcttcaaatattcttgatcatatgatgcaactgatgctccaaatgttcctatgtaataatctttcacatagcgagcaaatgtttcctgcacagcagaatagagcaagcaaggtcaccaaaaggcatggtggaacaactaaataagagtcaagtttgacaaggacttatcacatgcttactaatgattacaaacatgttttttttttgtatgtgtgtatctggaattgctggcaactttatcctttcaacctatctcagatcattcttaattcctatcaccaaagggaggtattacttaccaccaaatctgtgccattcttctttgcttcaactattggggagcacaaagcatcaggattaccgtattggaactgcacatggtataagattttaatacaacaattgcatctgacagattataaagtcaaaataaatgtacatttagcataccgcaatagctgctgcatccgccagtagaaagaggaagtcaccatcatttgctaactgcaagcatccgaaagaagttggtaaataattaaatacactattagagcattcaaatgatattttataccatgcaaggaactaacataagtggtcataaggttgatggcacaagtgcacaatggcagtttaaggacgtggcggttcacttcaaacttagttctaatgaaattatagaaggtccatagacttggatactccataatatatttttgataagcagtttcttagtttggtataacaatgccagttgtctgaaaactgaacggaacccactagattattacatgatctccaaacaagtttcagaatgcaaagtcagggaaatatttaatatatttgagaagctattttttagcaccactactttacccttaaagttagcttgacctctttatacagttttctcctttcatgttttgtcatactgaaaccaggcaggtaatataaaaatcagtaagctgtcaaagcaaaagaaatatacttgcatatcacatagaggattaccgttgatgctccaaagagttgtttaactgcattgcgaccagactgaagttgtccgtcaacaagttttgttgtttcttgtagtgctgctttgcattcagggccagctgactcaccaatcttcagagatgtgaatcatgcagaaaggtagaacttttaggtgcatgccaaaatgcgataacattataacatgattaaggatctgcacctgtagttacctgtttgtcaaagtcagtatagttgtaaacagaaagaacaactcctgaactcgcaagacttccacatgtcaagtgagggaacttcaatctgaaccaagcactaagtgctccagcgtacgaccctccaaaaacaaaccaagaactgtctgctcctgagcgattatacttagcattcaaagtttccttcaaataagagaagccaaactcagatcagtaggtacactcgtttggacatagacagtacaaacggtcctatgcccacctgataatattggcggaaaacagccagatcaaacaaggcctgttttgatgacaagaaccttagattttccgttgtcaaactctcaaaaggggaactctttccgtagtaccgatgctcaggggagaccactgccgcaccaaacttctttgccatcacctacacacatcacacacaaaccatcccatgtgtatgttatcaaaacaggtgaagtaaaatataaccatatgcttaaagtatagatcacacctagaatgtgtaacaaataatgtctaattgctccagttggaaactgtacaactatatacttgagcatactcacagctaagtagctgttaggaatcccgttgcacgaagattctccacagatatataagaaaattggcccttttggagctcggtagtaatcaaggaattcatagtaacgctgcttgaattgccgatggtcctgcattgaaaataaaataaaggtccatgaatgccaaaaaaaaaaagaaagaaagaaagaaagaaagaaagagaacatctaacaacgatggtagaatgcatcaacattactccatatcacatcacatttgaaacaacttgaatcactagtcaagaggggattatggacaacagtgaagcgctagtttgttatgtagcaagtctagcaggctcgtaaattttcagatacacaacatatatacaaaggggaacatcaacattataccgctgaagtaccgattgcctttttatgaggtccgaaagtctcatgaacattatgtgtacgggacatgaacatcggaatggcgttatcaaaagtgaagctcacatgaaatctatgaaacaaaacagaaatttctttagcatcctcaaactccataaattctcccagcttcaaaatcaatcgattgtgccagtgcggacgtgggcgtgctaattcagtaccaattcgcttagttctcacactggagactatactaggatatagattgactagattccgacagagccaaagaccaaactgatgcaaagtgacggcacagcacaaatccacttccccatatccccaattcccccaacccattgtcccgttgcgcacgaagagcaaaaacgaggaactgaacaagagcgcggatcaaccaattcaaccgagaaaccgaaagaggaggcggtggtgggagatcgggactcaacggtggggttgaagtggtcgagggtctggtccatccaccgctcctcctgcgtcaggtacctgcctggtgcggcggcgccgccgaggcgccccccgccaccggtgggaggcggcagccacagcccgatcggctccgccccgggagccagcagcaggagcaccgccacggcggcgactgcggcgccgacggcgctggacgccatctctctctcgcgcgcgcttccgcttccgctgcggcggcggagaggagacgatgcgtttccgacgcgagcaagcaaagcgaagcaacctcccttggcgagaagtcagaagtggaagaggattttttttttttttttgagaactgaagaggtaacgtgcaaagtgtattgctaccgctacgggatgtgtacgagattttatccgggcgtagggtagggtgtgacgaggaggatacggtatacggcctaggaaatacggggtacggggccgtggaataagtccaatttgcctccctcatctcttgcgtttgtgtgaatagcataccttaactggaaaaacgggtataactcctccttcatctctaaaaccagagcaaatcacctcctcccttggtggtttttccgacgtggcattgttgacctggttgacaagctgactcagcgtggtgggacccacatgtcagtgtgtagcgctctctctcccccccgtcctttcccttcaccccggtgtggctcatcgacgtgggtcgggccaaggcggcagggcagcgcgttgcgacggagagaggtagccgtgcggcggcggtgatgcgggagagcgcacggcagcgggcggcgcggtggtcggctacgggcggtcgtgcgcagtgggccaaccttgcgcgggcacggcggatggcggcggctggcgaggctgggcacggggcagcgcggcgacctggcgcggcgcggacggcgatgcggccagggaggcgtgacggttggctggatcggcgccagtgcggccggcgaccgacgtcctctccgcgtcctctcccgcgccgccgcgaccccgtcgctgcctgcgcatcccccgccgatgccgagactgcctccacctcgcgttcctgtgacgcgctggaggccgagcgcgccgtcgcggagctcctccgagagcacggggcctccccggctgatgcggcttccatcgccgcgcgcgccccggggtacgccgccatgctcgccgacggcgtccgcgagctcgacgagctcgggctctgggagtcgtggagctccggggttggggcgggccgcgaggtggagatggccgggctcgggttcgggaggaaggtgtactacatggggaaggcgaagagtaggcacggccgcggcgtggtgccgctgctcgagagcgtcggggtgcggctctcctccgcgaagctcatcgagccgtatgtttcggcggctggtctcccggtgctgatcgatagggtgagatctaccacttcattttgagctcaatttgcttcatttttttagtgcatttgatgaccatctctgcccggtacaaactgcatagtatgagtggtgaaattcgctcatcatttcttctcttctttgtttcttgttgctccggcaattcgctcgtcatggcgcgaccgtgtggcggcggcgcatccaggccgagcggctagcgtcatgggcagtcggtgctgcggtgcatcagcgtgtggagcggatgcatgaccagtttccatggcgccgatgccgccgcttttcttttcttttctttccttttgcttttcttctttgtttcttgtcctctccggccgggcgttgtggcggagcgacggcgccgcctagatgcggacgcgaggtcgccactgggtgcgcaggctcggggttcgtcgccggtatgcaggtgcaagctcgctgctagggtggccacgacgcgaccactccccgccgccgatgcccagctcctctccgctagtctactccccgttcgtcgctagcgagcgcagctgccgccaacgagggccaccgccggccgcgcccctaccccgccaaagtgaagagaaaggccgagggagagagagagagataagggagagagagagagagcgcacgctccacactgacattgacatgtgggtcccaccatgctgagtcagcttgtcaacgggtcaacaacgccacgtcggacgaaaccgccagcaaaaccaccgagggaggtgatttgctctggttttcagagatgaaggagatgttatacccggttttccggttgagggatgttattcacgcaagcgcaagaatgagggaggaaaaatggacttattccacggggccgtagagcgagcccgtgtggttgcctattgggccctgggcctcgtttggtttctggatggaccgggagtccattgttctttgagagagagagagaagagaggatgttccattgggattgagattctcagcagtcgactgcaccgtgcctttgtcactgatatatagacccaacgacacatcgggtccacatgtcagtgataaaggcacggtgcagttacttccattgttgtagtggtatcgctagatttcagccccactacctctaaaattgtagtgaaatatgatgtgcaatgttacttcttttagttgcaattttgttgtatactagaaaaaatgcccgtgctttgccacgggtaaaaatatttttggatcgttatatattttactctttggttttggacaaaaaagctcatttcattccttgtcaagtggagttgtaagtccggctcgcatagctgactgtccttttcaacctccgaaagctaatgtcatgtccgtacatgccaaaaccgatccttccatcaaatccggtcgaatctttctcgatctttcaaaattggtttgagggtttttgatacactcgatctcctctttccgtttttattaaaatcggagcgataaaactcgggataaaaatggtgattttaaaatagagattaaattcagtgaattaaaacagagttaaaagagaaaatcataggaaaatgatgagggagcagtggggaattaatttttggcaatcaattggtggacgaaacgcatgggaagacagatcgacctagcggcgacgctagtgttcagccggacgataaaaaggcatggcatataaaagaacaaatccttatcgcgtgcgagaaaatacaactaaaaaacagcaacaaacatatgaaaaaaaacccggtaaaaaggcctgaaaaaaaggtaaaaaaacagcatgggaaaaaagtgaaaaaaggcgaagagaaaaaaagcagatggaaaaaaaaagacagacggaaaaaattgtgaaaaaaagaaaaagagtggaaaggacataaagaaagaaaaaatatacggataaaaaaagaaaaaagaatcggacagaaagaaggaaaagaaacggacggagaaaaaaaaaggaaaacggacaggaaaaaaaagaaaaaaagggcgaaaaataaaaaaagacggacggattttttttgacggaaccttgcttattttttaattaggtatagatatagttttactttgtttttatctaagtttggattttttttccatgtaattttataacttttatgaatagcatgtttatttattgtaattctgtatgttcaaatataatgctcaaccttttacatataaggagaaaaataggaagggtaactagaatcattggattgttatctaaggaatgaaaaagagactggaattttcataaatttcagtcaactgaaatccagacactcccttgctggaaacatgtttattccactgtttgttctattcaaatttacaaagtaagcttgttctcacagaattttcacagaaaaaaaattgttacttatcacaatgatcacgatatatatcaaaccactgtcgatctgtcattactcagtggcacgaccaatgcacggagcgggtgctgcatggtggtgatgaacccgtagtccgccgtgagatccacctcctcctcccatgggactcggcgccactcgaaggccgtgaccagattcgcgagaaagtactccaggtgcaggatggcatatcccatcccggggcacgtccttcgcccggcgctgaacggcatcattttcaccttagttgttgcctcctgcttgctgccgatggccaacctcaccccttcttccccgccctccatgaacctctctggcgagaactcttccgacgatgtccatatctgatagtggagttgagagacactagttagtgtatataagacgtatctatctatatatctaaagatggctgttgtacgctgcagctgattagtggattcaccggccatcaactttttgacacgtgtccattttctcagctgtgacatacgtcatctgtatatgagtcggtttttaagttcgtttttagaaatacatatctatatttgagtcgggctttaagtatgttctcttttgaaaatacagaagaagttgtataaaaaatctatttagaaaaacttacatgctaacttgagatgatcgaactcctaattgtaacttatgattttatgaaaaaaattatatatccaagtgaatttctacagtgaattccatcttatctaaaccgtataacaataataatgaaataaccttcacccgttgcaatgtacgggtattttttctagctaatataaaagttaaaaaattagataattgatatgtatagtatttcaggttttttttttcctgagtttatcactgtgcgtttgtgagttttccgtgtgatggaaaaaaataattatgtgacacgttgatgacgctactgtgcatacggaaaaaaaattctgtgcggcagcgccgcaccaagcttctcgtgcataccatgttgtcttctcccgatttcttctatggcgaagctgaccacgttaccccgcgcgacgtgcgcgccgccgagcatcacgtcgcgcaccatgtgccgctgcacggacgagaccggaggatgccgccgcaggcactccatcaccacggccctcaggtacgcgcacggctcgccgccggcggccgcctcgacctcgccgcacagccgcgtctggatgtccggccgccgcactaggttcgccagcgcccactccagctgggcgaccaccgtccccgtcgccgcgcccaggtactccgacacgaggcccaccatctcgccgtcggagagcttccgccgacgccgcccgtcgtccgccgggacctcgaggtacaggagagtgtccacgtacgtcgccggcgggggctgcaggaa

SEQ ID NO: 8578 - DNA, 1020 bp, Oryza sativa
tctgtttactactttggaattatcgtttttagagtttcgaattagctgattactgcaagtacagttccccgctgtgtttttgtttgagattctgaactgcaaactgatctaggatcgagaaatgttggtgtatttagagatttaaggggggcgactgatgtgtcaccatttagaaaatcaattatgcatttcctaattgtcatggctgcatgctgtcaagttaaatttgagataactgctgaagattacagaaggcctagaattctattaccccattcatagagtagctgtgattctgacaatacaatgcacagcaggtatttagaaaggaaactgttactacatggttgttaacagcaagcagctattattgatctgataaggaatgaagttctacagtatttttgacgcgacgtattagcatcagttttgctcaagattcacttactgttgcgtgcaactaatgtccaaatttcacatcaggtactaaagatcatatctcttcaaactggttaggaagcttacttaatgaagacacaattggattgattttagtggccaaacccaagccaacatacagactgtgcgcatatggctactcgcattcctggtactgtagcagctagcggggtgtactacaatgatcaatacagaatgccatgtaagctgaaaggaattcattgcatggcattgaattgtataccgcaaaaagcgaaggtaaggaagtgcatgaatggatatcaatcaacattcaggttttgtgtaaatgagaaaaatggacaaaccaccgggcagtcaaatggttccttgatccaacaaggccagaatttccggtgtcattcttatggttctcataacagcagtgaaactaaagagtgcagccttgaagatggcactgattcatacaggtaatatttgtactacattacaggataatgagcctactttttccccagatgaccaatgtttattgaatttgtgtatctggacatgcaaattcattatcatcctaattcctat

SEQ ID NO: 8579 - DNA, 13358 bp, Oryza sativa
aagttgatcccaggaaatgtggaaaaataagcatttctagctccaaaagtcgctatattttgggacggaggtagtagtagcttatttgccggattgctgtcatggattattgctccacggctctaaaaatacggcttctcaacaaaaaaaaaacatctaccgcgttgcttagaccaattgttctaagctatctgttaagtttatttctcaaagtatttaacttatccctatcatcaagtagataatctaaggcaataatctgtttcaaatgccacatcaacctaggttagtgcatgcatgaattttgtaacaagctttttgtgtttttagattagctatttgacttatttctattcgcgacttgttctgtttaattttctccaaagcaacacattggtgcacttggatccaccatttgtgaagaaatgcataaatttacatagatgataggtagcgcttagggtaaatcccaaatgcaatacatataaagcaacactcgtggatgtgttatccattccgaagctcatgataatatggtgcctacatcagaaaattagcaacagaacaaattcataaaatttccatccaacaacaaaatgatggcacaaagcccattgctttgatctgcagctcaatttctctgccgagtaaactaacacatctcactgatatgtggtatataagctacagcctcaaactaaactagccagtattagcatgcatgccattattattaatcagtggcggagctgttgggggtgccggagggtgccaacacacccctatctgaacccctcctccctgttgttgtatgattgtacttacaaggtcaggcagttagcaagtctaaaaaaacattagcccattagcaagaaacaatatctacaaaattagttagtgatttcccttttttttcaaagtaaaatagaagatgcctatttacattgaaaggatttagcattaagaactagttccaaacttccaattatattattaaagagctaaaattcaagttttttttgtaaagaactagtttacacatttattgttattgacagtgactatttggcctcctttgctatcgatattggttattcggccttatggcttatccctaccccacaccccccaaccccaaatcctggcttcgccacttataaatcacatgggacatgataaataacatcctctcgaatgcatagccatgctgaattgagcaaggagaagctatatgtatatgggaacaatttcaacaatgcagtatgaaatctgccacgtgcaagacctgaaacatgtgagcatacctttgctcccgtcgatttattgcgggcgactctgaccctggaccgctcgtcgctggccggttctgttgcttgatcgaaggtatcatcggaactgacttcccgggcgtgtatcggttcgtcaacgacggtggtcggctcaccggagcctgatccgaaaggtaacgacctatctaaaatgcacagaatacacgccaccacttagcgcgccgagcaccatgcccactattggttggtgaacacaagtaacaaataatcacatcaaacacatcacccgcataaacaatgcgaaatgcgtgatgtaaaatcataaatcagccggcatattccattaattaggagatcgtgaatgagtattagattattaggaagacgggattgacgattgaatgccgctgccgagtgatggaagtgaaaatggggatggattgaggttaccgatggggaaggggagcgggtgccggtgcgccgcggggtggaggagagctcgatgggtggccccgagagctcgtactcgtcgtcgtcgctgccgctgcccccatccccaccaccacccacgccgccgcctcctcctcctacccccgcgccgtcggtggacgccatgacccgcgcgagccgttgcgccgcggccctcgccgcggtattatgcgcgcggccacgtcgccccacggtggacgccgcccccgcgccacccagcgaccccgtccgcgcgtggcggtgcacgggcgacgccgtcggagatccacccggcggcgacgtctgcgccgatccaccgccaccgcccccgtagtagtggtgcccgtacccgccgccgctgccccggcgagcgtacccgcccgcggggctcgccggccgcgacaagcgatccatgggaacacggcgtcgcgggtgatcgatcgatcgatccccctcctcgattcgtcgcgagagggagagagagagagaggtggaggtggaagcggaggaatgggaggtggtggtggtttgtgtttgcgtccgaaggcggaggcggaggcgggggggacgtaacggtctcgagtttcgagggggggagtgatctcgagtggcgtgggggtggatcttgtgtggcgcgggtcgcctgtggctacaccggttagacgtgtacttctatacacttgggttctttttcttacatatagtggtaagcagtggcggatctagagggtggtccggttgaattatggaccataaaataaaaataatctaacacaggactagtacatgttaataaaaggaaaaaaaaatttaaagtgagaaaaataagagatataaaatctttattaatataaacttttatagtgagaaaattaagagatataaactctttattaatatattatggtacactttaaattatgtggcctattgtatattatcttattatatttatctgtgtttaaaaaagttacgtaagataggtcatccatatctaaaatcctgggtatatcacttgtgatagagtgctgcatattcatccaagggggaaaaaatagtgtggctatctcatatcaactggaggaaaaatttctaactgaaatgtaccatgtaatcattagtgaactcaaaacctaatgatactatatagccatcgaccaagcttgtcgatatactgtagtgaattgggcattatatgttttgttaatatttaaagtagtgaatgaagcctcgactatatattattcactgtattggaacattataacgtattcatgtaactatagtgcatctatgtgatactttaaaggatctagaaatctcttcagaatgtaccatgttacattcttgatgtatgtgttgcttgttatactggtacaatcagtgtcagtcaacctcgacaatttttgacaaaacttagtactgaactacttaaacgataaaataacactataaatttaagcataatcaccttattatgacaccgacattgaatccaccactacaggaagagaacaggaaatagaagagagtgccgagttctgtactaaaaataaatgataatgtattcttatcctacaagttgtatgggtcccaaagcacttgaatagaactagagaggaaagtatgtatgggtaatgcttgaaacttggtgcaaattgttttggtagaatccatgaaccatatattaacgaaagggcatatagtctagtggttacagtgacctgagtagtaccccaaggtcctgagttcaaatctcctatggagcgaatttcagattgggttgtttgcggggctaagttccctatttcaatggccgtatatatccggttggatatagaggccgggtaaaaaaaatacccttctctaaaaaaaatgaacatatattatggtactaacacattatattggaccaaagacaaacttggcactagtatagacatacttgtaatctagcttaaatatacctaacttcccttcctctcctaaagagaactggcctggccatgccataacattattggcttcattaatcaaatcatacaaaaacaatttacaaccatttagaacaaacgtgtttggcatttggcatgtctaagtccagctatttcttccaaacgcaggaataacaaaccatacaaaattataaagcacgagtacacatgaaacttgcataaaatggaattgcatcaacggttgaaactacaagaacaaactttaccattccttatgaaaactgtggcaccttcatttaaatttaacaaagagggagtactttctacaaatccaatacaatgcatttgtttatcctctacaaacaacatgtaaatttacagatgaattatacacttggaataatggcttccaatatgaacctataccagcttaaatacgtcgttctacacaaactatctgcacaagatatgacaacagtacacaaatgtatcctggaacaaaattgagtggtctctgaaaatttacagaaatgcttgcaccttctgaacctcaaactcagctatgttcagcctcagtcacagtgcccagttgagatccatggatgctccgctccactggcgaaccaggcacgaaaggaacgaagcctcggcccccgaacatcgggcgcatgaatctatcatcaaacttgcgccacacgcgatgaacggagcgagtctgaatggtgagaagaagctgaaggttgttctgaggggagggctggcctacatcgaagtcagaccccagcaggcttccaagaagtgggtctatgattgactggcttgagagatcagctgctatgtcaggccttggtgggatgaggagattgaggagaggcttggtaaaaaaaccaaaaacctgaaacaaatattgatggtgtatacattagcaaagtgataataattggactactttctttgtacacgatggaaacggaaatgtatgatatcacttcttttctagattaaacaggatcatatacattgataatccccgtatggctgcattgttcatgggtatttcacttaatctgtaagcgtcatataaagaaatgataaatactgcattagatttgtttacgctcatataatcacatgtcccctattgacttggctgaaccaaatatagcacacacaaacaaaagtgcacaaatctatcaacagattgctagaaatacacctgctgagcagaaaataaccatccaagataataacagagagaaagcattacatccttaccattgtgctgaacagaacaacaatgactgtgctggtgatcatgatagcattgattcgcaattcagtatgaccagatgcggtgaactgcaaagttttacgagaacgttacatatcagactaggttttagtaaattaatgtggtagtggttccaaatcactttcagagaggcaggttaaccatcaaacatcaccttgtgataggcaagtgctattgatactgctcctctcatgagacctgcccaccatatgattacctagagaataaacccatcacagttagctgcttagctccctctgttttcaggagggaaagaaagtgatacaactacataagaataaaaaaggtcaatactaacttgctgcttgaaggagatctttgggcgtgtctcttttttacttagattggataagaaagacaaagggaatacaaatgctgctcttccaaccataaccaagcccaatatagttgcacttaaagcaattggttttttaggactgcatcataaggaaaactgatataaattagttattatgttcagaaaaaaaaaacatgggcaagacatgcaaggtagttgctgttgtgtgagcctgtgtttaacagtgtgcaccatgccaaacaacaattaatagaatcatagaagcttgaagatgttctttgcagacttctccaaactgaaaaggaagggttccgactttctctcatcaacaacatatcacctcacatagaatatacttttgtcagctgacaggaccatcagtctaagaaggagctaagcaaattacagcatccctagtgatggaaaaattgaaccatagaggcaattgttcaaggcattaccaccggggacttgaaccaggaggcagacaaaaaagcaaaactagttcttttgtttgaaccaaaccgaaaaaaagatacttgctcgtggtttccaacatatgaaaggagcaggtgcggtcctttggcagacaggagagaatggatgaaagaacacgatcatttgtttttattctggccatggatcccaccaatgaataacacgctacaccagtggatgcaaaccaaaccatcggataatgaaaatatcagaagaaactttatgaattggtcgtggacaaaaacacacctgctgctagctaatttccatttttcaatgtccagtgcatccatcccaacatagagaaatagaaaaatttcagcaatgaaagataaagtagcaaaagtgtgcctgtaaaatgaatgaagaatatcaggaagccatatacataaatattttcatctaaaagaaaccacaagggttgccagtaaaactgattatcagacagtacatacttggtagtaatcctagagctttctgtcacattatgccaagtgtaatgtgacattactattccagagaagaacacagtgagaatgccactcagatctagcagctgaaatatatatatatgaaagggtcaaaaaaaatatcaatatcatgtactttggaagatgctggtgcaaagtgagattaaagaaattacagactgccaaaagaagtacaagagtaaaacatcaacaaatttacacttagtattacatggatataacatgatactccctccatcgcaaaatataagcatttttggatttcgacacagtctttgatatgctactttgaccaaaaatatctatataaaagtaaaatgttttaaataaagagagttgtatattatgatagcttgtttaatgataaatctagtaacatcaattttacgggattgatcttttttttttgctattaatagtcaaagttaaaaatatttgacttagcactaaaaatgcttatattttgggacggaggaagtaattgataaatgtccgaaataatttgacttaagagagttgcttattttgaagttcttatagtttgtaggcactcaccatcgacagcatatatgaaaggtacgccatgagtatcatgatagcaacttctctgtcagttgagtgtctgcataacatcacaagcttgccacaatgattttcatatctacataaaaaacaaactactctgtggcatgactaaatcacataggagcagacctggcaaaacatagtttcttaataatataggcactaagcaacccagcctgccaaagtgagtaccagtaattagtccaaaaaggcatggtcaaatgaatcatcagaaaggaaggtagtaaatggaaaagaaaaggaaagatcagtggaggttgtcaaaaacaaagagacttacaactactccaagaagggtactggtgaagaataggtagagaaaatttcctatgaacgctagtagaacaaggctatcaaaattagcaatatcaatgtcttcaattgcattaaagagcacaacagatgtagcatcattgacaaccccttcaccaaaaaccagactatagagtaggggtgtttcgtcttggttaagcacctgcaagtaacaaaattgcatatttaatggtgtgctgtttcattttacaagacattaacaacaggtcattaaatggaaaaacctgtaaggtgcaaacagaatctgttgctgagaagatagccccaattgctgcatatatggattaaacaaaaagataaacagcgagcagaatgatgatgtattcaatggtaccaaagtccaaccagtcgcttcaataattttgaagtgtagaaaggccaagaataaagtatctaaccaagatagtccccaagctggagtggaccaacatcaagttttttgaacaatgtcatggcacctgatatgtccattagaaaaaaggaaaatcttagcggccagagcaacatatcaaagtttgaggatgcaaggtttgagactttgaacaaatcatgtttgtaccattgagtaatgaatacaataaggcaaacaaccgtgcatctaacatacatacttttacatccagctccacaactgaaaaaaactatccagctggcttctccgtactgaattatggattttcatgcatcatgtagccacttcatatagaagcgattggctcattactgattcttttactctcttaaaccagtgtttaatttatcttaatctcaaagaaatcagtcacacatacttgaaagttgaaatgatgatatttggtttcaggtgttaaacaccaagattttgtattttggtgtaggtgttcatatagttggttatcttgtgatcattaatatggaaccaaaataagatgatgtaagctgagcaaagaattcagcaacttacctagagagattatcacaaaggatatcaatgtccccacagcaccaaataaaataattgtcataaaattgcggaagaattgttttttctttacttgaaacctgatgattataaacaaagatgcatttcagttaaaagcttcacttatataaaatgtaagtaacttcaggctatcactttgatgttagggtcaaatgttttagcgagaactgaaaatacatgtatttctgcacaaaaatataatgctggagcttaaaatgttattagctaatccaaagaaatacacaggaaattcatattaatcaattcagttactgcaggaatgcatgcaatttcctaggttcgaaacagggcagagtaaggatgctgattctctataaagactatatatatacttgcacagtcaggaaaaataatctaaatgactcacaagcttactcacgttcagtaagaatgtaagaatgattagacatacttggatccaatcatcaccaagtcctctaattgtaaaagggcttcatgtactactgtgatacaatcctttttaagtctgtatttcagggggggaaataattgtttgggacagacgtgatagtttaattcatttttcagtataatttcatgggaatgggtgggcagttgactattttatacatccagctcaataagtgtaccttagcattcacaaatcacataggttttgaggaagtcttagaaacatgggtttgatacatccagaggaatctaagtaatattttatacagaatggcaataataatatcatcatatgcatacttcagaaatacatgaatttctcaagtgagtcctattgcggtgcattttgctctcaagattaaattagccaaaaccaaattaaactaagacaaggcaccttcttttcttgtacagaagaacaacaaaataaattccgctttggttgggagctcactagaagagctataggtacacagaaagctcacccagcattaaagatgatcggtggaagcaaataaatgaagaagaggtcctcactgaacacaagaatgtgcgagttcttcccaccactgacgagcagaatcacacctccagtgatcagcccctgcaagcgccaacccacagaacaaaactcaaaaccactcccctgtaaggcaaaaccacaaacacctggggtgcaaggccagagagccctctcatctcaccatgacaagcgcggtgatggattcattgacccaccggttcccttccagcaggtgcccgatcacaatgcagctgcacagcagcgccacgaagatgttgatcgcgacgatcgagtcgtagtccgacaccaacagcccgccggatttgagaacgagagctcccaaatccagccccatctcgaccgccgccacctcagtggatcctcctcagctcaccctggcagaatggaaacgaacaattctcaatgttaaaaattggatcatttgctcggtgcaagcaagcagatcgatctccatgattgcctgaacactgtagccgtcaacaaattcagagaaaccgcaaagcaacagcaaatcactcccggcttaatcattccacaacccaaatcaacaaaccagtgaccagtaggatgaaagatgatccgagctacatattctcactgaattcctcaattccgactccaaatccaaatccgacccaagaagccaccatgccgccacctctcctctcaagaaaaggatgtgcacaaaataaaagtaaaaacaaaaatcgaaattccgcacgcacctgcagattcaagcgagatggccaccctgatctgaagcaggagagaggatggaaccaacaaaaaaaaatctggattcagagagagagacgtgagaagaagaagtagaggaggaggtggtggactggtggtcgtgtccatctggccatgaggccgtgagaaacggaggggaattaattaacgaaaatcgcgccacctgtcaaacggtcaaacgggccccaccaggcagaggaagggaggagacccatgtggatgacgggtggggccctgaaccgggttggccccgcctgtcagtggctgtggctgggttgccgtcctgtggttttggttttggttttggtttaacctgaggggtgtgaggccgacgtggcacggggtgtgtgtggggcccacccggggatggagaccaataatattttttcttagataatggaatgaatggagaccaatatggggtattgggaagcaatgatggcgaatggatgggtgattagaggaaggataataatagagtccactttctactattattttattttaaagccaacatatataatagattggctataaggttggctgcaattttcttctcctctctctatctcttacttatgcatttaatggatttgtcttggagcttgtgataagctagctcttgcataagagccaacatacttaattttccactacctcttttcttcacctaagtatagtaagcttatagttcactattatacttgctcttagatcgttcggatgatgattcatgagtgtcgccctgtcgaagaggcaagatgaaatgaaaggagagaagggtatcgtgtatcatgtgtggtcgtcgtccactgctattaaagacaagaacagaatataacggtaaagttatacttccttcatcccctaatataaaaaatattccctatttttaaacgtttgaccacttattttattttaaaaaatttatacaatataaaaaataaaagttatacttcaagtactttgaataataaagtaaatcacaaataaaataaataataattctattttttttaataagacgaatagtcaaacagtgcaagtaaaatgtcaaaattacttatattaggggacggagggagtagagtagtacagacataggtggtgttcttttctccggaagatgaagatgaggttttttacgcaaaacgaggtggtattaacgtatgattgattgagttttaattattacaaacttaaaaaatagattaatatgatattttagagtaatttttatatagaaagttttcgcacaaaacacaccgtttagcagtttgaaaaagtgacacgaaagtcttaatattctttcaacttttattggagaaaagaacgggactataggactcccttcattctaaaattcgaacagggctgactgagttcgtttattcatgttccctatttccctctcttgtttgtcgcgtgtaatctctatagaaaaattatttttaaaaatcatattaatcctttaaaaagttttttaagctatacttaattaattatgtgctatgttgctccatttttcgtgattagggggtcaattcccaactccatgagacagacacagtcttagcatgattgaaacaaaggaaaaaccatatgaattatagaggattttatcctatgaaaaataatcctatagagttatttgaaataaaaaatgtttcctatcaatttcttaggaattcatgtggaatgaaccttacaagattaattttagaggaaaataagcatgatatcttacttcatgataatcaaacaacttttcgaaatcccataagaactccctaagtataacattctattcctacatttgttcctattgctgtgttttctcatccccacatttcaaaggagccataaactcttaaataatgttttgagttaatggtttgcttgtttgatctatcttaaatccatttttagggcccctttgaatcgtaggattgaaaaaacggaggaatgggaaaaacataggattctgataggaatgcaagtgtaaaacaaaggattgcaaaacacaagaaaaacacaggaatggccgtttgattggaccgcaggaaaaacgcaggattcaaacgagagagatagactcaagggaagttttccaagaggtcggagtggatgttaaatttcctacatttttcctctagaatcgtaggaaaggaaagtttcctacgtttttccttttatcattcctacaaatcaaaggcatgaatagtgtaggatttcaattcatttgtttttcctccatttatcctccaattcaaagggggccttaatagcattaactttcttttccaaaataagtatataaatccaaaaccatgaaaagaagtatatatttttttcaaattttattccaaaactacgttccaacaagcatgctccatacggctaggctatagagttgatagagagatgtggagggcccacgtgtcagggacacccaacgggattgtgtttttttttttttgagatagtgttgacagcgaaagagtgtggaatgaaattcttggctgtagatgagcctgtaggccccgccacggatgcgaggccaccagcggatgagcgccacgtgtccgctacaggcatgggcagcgcgaccagagaagtggacaggacaaggccgcatccgccatcctccattgattcatctcccttcctttgcttgagattcctcaacctctacatctctctcctccaatcccctcctctctctctatctctcttcccggcctgtgcagagacggaggcaggataggccggcgagcaaaggttcgagttctttcccctcggattccacaaagtaggtgtcttttttgtttaagaaaaatagaatcaccaagttgttgttctcgttgagttttggttgtattttgtcactcgagagcctctgcatgttccaaaagatggtgttttattggtggtgttttgatcatgctagatgtggaggatggacggatcagatattctgttgtttactcgctttgaaatttatgcttgttttagtattatgcatctttgggcaattatcgcatggatggatcatacatgccatttctttcggttcgaatgtcttcctgtttactactttggaattatcgtttttagagtttcgaattagctgattactgcaagtacagttccccgctgtgtttttgtttgtgattctgaactgcaaactgatctaggatcgagaaatgttggtgtatttagagatttaaggggggcgactgatgtgtcaccatttagaaaatcaattatgcatttcctaattgtcatggctgcatgctgtctagttaaatttgagataactgctgaagat

SEQ ID NO: 8580 - DNA, 22842 bp, Oryza sativa
tcaatccctttgtgggagggattaaccgaacaagacctaagtggttttaccatcaaaaaaccattttggaacagttattcatattaaacttctaataggtttgccagttagatcaccagtcatcattatttttacttcgattgttcatcttactcaagcaacttcgtcatcgtttccagggatgtacaccagaaatggattgaaggcggaaactatgaactttgcatcgaagacgtgagggatgaaatctgggacatggtaaagccggcagatcctctcaggatcgcactaacagatcttctatcttgcaagcaaggcgggactattgccagcatgcttatagatgtgcgcggcttctgggcccacgacaacagagagaacctcctccaggaagaggaagagcaagtggaagaggcctgagttctccagctgccgtgcaaccaacctggtaaactctcaaccgcaaggcactggcaattgctggtatctcgcaaccgcaaggcacgggcaattgcttgtaccactgtatgtgtgccattgtagcttacatagtgtattagaatcaagttcaacctgttcgctgggagacttgttgtaacctgtaagtgttccatttgtgtaaccggagtgaaatctgacatattttgagttgaacatggttttgtcgtgtcgaccagatgtattaccgcagggcttggttggatgcagaaaggaaagcctcagcctgtggaatttgtacgtctatgcgacaccacgcatgtaattcggtttgcaactgcaagtctatatacgcaaaaatacattgtatgccctttgatgcagtggttatttgtgcccttctccgtgccaatcactagtttgctttcatttggacgtgctctactttctgcatttggaagattgcacagatttcattgactgctccctctacgttttctagcagtgtttaaggttgagatgaaattcgtttgatgccttacacaactttaggacccctttgaatcgtaggaatgaaaaaacaaaggaatagaaaaaacataggattctggcaggaatacaattgtaaaacagaggattgcaaaacacagggaaaacacaggaatggccgtttgattgggccacaggaaaaacacatgaatcaaatgagagagatttgagagatagacttagagaaaatgttccaagaggttagaactcttgctaactttcctctaaaatatatataggattactcattccatgggaattttaaaagcttggatatgattcaatcctttgtttcaaaggacttcataggattttttctataggattgaaatcctctaaaattcctacatttttcctacaaatcaaaggggccttacttgtttggaaaagacgatgcaaaattgcaaatgccctatatttatagatggtgggagtaaatattttgaaaaactttcaacaacatatgcttatttttgttgggtccccttatttactggttggttaaatacagtggtgatgccggttcggcccttttggacactactagaggttgtgttcggcagcccctcttccaacccatctctctcgttttccacacacacgttttttaaactgctaaacggtgcgttttttttaaaaaaattctatacgaaagttgcttaaaaaaatcaaattaatctatttttgaaaaattttttagcaaataattaattaatcacccgctaatcgctactccgttttccgtgcgggcacttagtgttgggaacccctggttggaacacaccctctgtctggaaaaaaaactaatttcatataaaaacgtgacacatctaataaaataaatattgacataaccaatttatctgaacatagagttgttgtcgtatcttagtataaagttggtctattaggatggagtacacactaataactcttaatttgacttgattttttttcttaatttgaccttttaatttcaaaaaacaactttgaaacgggccaaaatgtgccgccaaacagcgcaaaccccatccattttgaaacgaaagctgacaagtgaagccagcggagtggagtggacaaatctccgaaccacaaattccaattcaaaaactttttccccgagtagcctcgccgtcgccgtcgccggagatggaggcggcgcgggagtcaatggcggcgctcgtcgacgccggcctctacgactgcgcccagacgctcgtccgtaaccccccatcctcccttccctcccctccccctccccctccctcccgccccagttcccctctccgaatcactagggtttcgcttttgcccccacgaatcagtcgctgcacctgcgcgcgcgtggatcgggctcgcttgggtctcgtctctcgtcttgggacctgtggttggttcatcgcctgtgccgcgcgaggttgggcgggtggttgggtgattgtgcgatcgggctggctgggcgcgagatatttttttttttgtctttgttatctgtttcataatgtatcgagattgatttcgggtggagataatgctagtttgttacttgcaggggtgctttcttgtgtcttcatcacctgcgagcagcgaggctggtatgtccatgaaggtggaaagcttggtaagctccattgagtagctcgggaaatggtgctaatttggtcttaaccattgatagtccttgttctgtccagagttggatcgttgaagcatttacgctacttaatctatgggaagtctgtttatgttgttgctttgttgctaggagcttaactgaggattcttcatctagaagaactttacattgtcgatttctgttgtctagaaggtccaatattgatcttcttggagcttaaggtgtcagtgtattgcaggtactgcatggtgatgctttgcatggagagaaagaatttcgcagggcactggtaatattgccgataaatctatgttgatagaaaaacgataatgcattttgggatttcattgtattcggaaatgtaacacatgattcagaccccagttctgaaatcttagtctcttatttcctgtttcaccatggtagagtgcctacaaacaagctatgcaatacagcaaaaacattcctaggcaagcaacaagtaatactagaagctcagtaactgccactggccggtctccttctccaaattcttcaagtcttgcaccactcaatgaaaatgaggtgaaaacagctcggcaggccattagatattccgttcgttgttatttatttgtcatatctagcaagcaactcattctttttctactgttgcaggtgaaatttaaaattgcactttgctattctgctctacgtgagcatcgtgaagcacttcaagaggtttccatttttcattcacctttgtttagttctctattatattcctgaatgttactccatcctgggaagtggaaaggcaggatcatctgaatatatgtaggatgactcggactcacttgtggtagcttcttctgtatgatggaagacatatgatgcaaaacatggcctctatgttgcctgcagatggaagggattccttctaaagcgaggactctaaaaatgaatctgatgttagggaagctatatcggatatccagaaataatcgtgcagctgctgtatgttataaagagtgcctgaggtatgcaatgccaaattattttgcttcctagctcctcaattctgcaacagtgcaaacgatcacataactaccattttcttttgcatatcacgtttccccctaaacattgatacagaaaccaacattttttttcaccattaaaaatattgcccctcacttggccatttcatgaagatttagtttgacaaatttctttctacatctatatgctcttatgacaggcaatgcccttatgtttttgaggctattacagctttggctgaaatggggctttcttcaaaggagttctctttgatattctcacaagtaagtgttttgctccataggcagcttgtattttcaaactgaatatagtgcagttttagtgaggtcagataaatactagttatgctagatcctaagactcttgagtgcttgattgcctgccattttttctggttgcctattatgcttgccatgtatataggctgtctaatcccattgatgccatgccttggccagtattgctacacaactacataggtcattgtttgttttgctttacatcaaaggaccatttctcagcatcatataaacaatgatattttattgatggaagatgcatactgcaacagagaaaaagaagtaaattacatgctgttaatagttctatataatatatccctttattttattgatgatctctttatttcatatacaatatttaccttcgcacaattcaatgttattacagaaccatcatcccaccaattttttatcctttctatatttcctttggcgccgtgagcactgcaaaaaggaaataatgagcgcacatcagtttatcatgcaattgaagatgtggtattctctgtaggcaccaaatcgaggaggcaaggctccaggtgactctttagatgcacagcgttggtggaacgtaagtgaactacttgcacccttgtgtagatagaacatgcgaaccccaaaaatatttgacatttcttatgtttgatacaagtaaacttctatgctggattttcttagtatattttatttacattgattattgaacctcaaaaccacttttactttcgaaacttattaaattggaagagtgggaatgaagtcctttccttttcagctctatgttaccattgtatgaactgagcccacttgtggaacagttctatcatgcacagcttttaactcatggagttcttttccctgaccacaaataatttgtcaccactgcgtcaacaaatgcacacctgcacttctattgttttcttgtagtggggatactgtgatcaatactagaacattaggaagcaccatgatattgtacctactgatcacatgcagttgtatttttttttatgttgtggatttatcagaagaacccattttgttccgctcacagctacagtgctgctttagatttgggctcaattatgtataagagtttccttgcaaactctacttaactcatgcagcatacagttgatcatacttattgttcttgttattggttgactcaaacaattattgacttaaatcattgttttcttaacagcgctatgttgaggcccaatgttgcattgcttcacatgattataaaggtgataaaatagcattaatccaaattcatttgacagttctaaacgtaagatgcacttattttatttttgtcattgtcaaaaaatcgtgttgcatgattacagaggatttccactactaaacaaatgatatgtagtgttaatgtgttatatcaccctgtattgtcatctatgtcttaattttctgttggcccttgttcctttggtgttggtccttgtgccactgggtaaagcttgatagtcaacatttcttaacttcgatttgtttgcttgtatcctctcatctgttaagcataaacttgaagaagtaatactgatatgccaaattcatttatagtggtcgcaaaatataatcatgttatttttttgtttaggtggccttgacatatatctagacttaatgcagcgattcccgaacaatgtgcacatcttgctggaaattgctaaggtttgtttttcttcaagcattctgtttatgttttatgtgctctctgtaacatgtggattcttgatgcattgagcaccatggctatgtcatacttcttattgtttatgtacttcatgtttggttctgctgtgctcctctgtcctgtctataaaatttccttttgttatgtgttgaaattttggagttcctcttaaaattttcatttggtggatttaattcccctccattatgaattgatcctgaatttggagcttattatttgaaggttgaagccatcataggtaggaatgatgaagctatcatgaactttgaaaaggtaaaattaacaagtatagacttggaaccccttaaaacgtaagtatgtggtaaaattatttgcttccttgcaggctcggttaattgatccaaacatcatgacatatatggatgagtatgcaattctccttaagtcaaaatctgactacacaaagcttaacaagttggtacatgatatgctgcatattgaccctgcaagaccagaaacatgtcttgctcttgcagcattgtgggaaagaaaagatgaaagaaaagctttgacatatgctgaaaaggtttgtatcgttacataatcttttattgaaagctaatcttgatcctaatgttccttgattttccttcaacagagtctccgagttgatgatagacatataactggatatatcatgaaggtaataatgcaaaagattgtccgaacgactggattttgcactgttgtagacatgcagtggcattttcttgctttgcaaagtattatagagaaatctctgcaatgaattgcgtgggattaaaaccaaaatgttattttatcaaagttaaaaccaaaatgttgtgatggtttttcttggtatttactctgggaagttgtatacttgtaactttgctacctttgtttttgtttatccacacgtcaggcttattgtttgcttattgcttttcaagggaaatcttcatcttttgttgaatcgacctgatttggcagtcacagacttcaggggagctcaagaacttagggccgatcttcgctcttatcaaggtattttggtgatgctcctgattttgaagatcaaatcataccatcagtctaatacatatactatatcaggattggtacgtgcttatctagcgctctctaaatgcaaagatgcattattcactgcacgtgaagcaatgaaggttatgcatcagtctgcaaaagctctcaaattagttggtgatgtgcatgctatcagttccagtgggagagagaaggtaatatttattttccttggtcatttatacctcaattatattttggtaatggtcagttagtcacttggtcacaattatagtttgcatacttcccctcaataatagtaccctttgacaaattcattgcacaatttccaggctaggaagttctatgaatccgccattcgtcttgaacctggatttctgggagctgcattggctttggctgatctgcatgtcgctgaaggacgaaataaggatgcagtattgctgcttgaaagatatctaagacagtggacagatgattctctacacatcaagttggctcaagtttttgcagcaacgaatatgctttctgatgcactttcccactaccaatctgctctaaggtgcgacttttctcttggagttgaactgtcaaatagcatcattgttgcaatagcgtgtttcctcttttgttattgacctgaaacccaaagagtacttgagacactcaacacacaagtagtcaatatataatgcattgatatactggatataactaaagtatgtgggtaagattgtaatgctggttcctggactatgtagcagttaagttttgtgctgaatccgataactgggttggacggggtgaactgaattatctgtatgatacaaatttttttggagacactactgtttcagctggtggaattcgtttttttataacctttggctactacttatccatgtgccaacataactatttcatgttctagttgaaaaagtttccacccgtgatgcaggataaacccacataatgaggccgcaaagaaaggattggaacgcttagagaagcaaatgaaggttcgtgttccatatgtaaccatctatcatggagcctacccagctctcacatccagaacaagaaaaaaaatgactctgattttccatatgcagggagtagacccggacgcgcctgaagaggacgaagagaacgaagctgacgatgtcgacggtgatcaagacgacgctgaactactgtagaaaaaacctgatcaactcacatcaacccaaggcaccacctcttaccaagcgtcaactgcgaaagaggaccaaatctgcagccgctgccacagcaggagagcccctcaattgccatatatcaactagcaacttggaaggcacggcaactggaagacgagtgacgacgacgggtgcctctcccttaccgcgagtaagttttcttgctaacgcgaaacctcgtcgtagagttgcaatgctcaccgtaggtttatttttctaatgctggggaaatgtgaactgaacttgttggtttcaagtcaaactttattactacctctgtcctaacatatagcaacttagtacccaacagtccaaattcctggtatctaggatgtctcatttgatattagggtgctatattttgagacggggtagtagttaatttgctctccatgtattattgttttttacattattgtgttatatatcatggcgacaaaaaaggggctgcaagtcgtacaacctgtgcagtgatcagatacgtacggtatgtataagtacggcgattctaccacgcacagtggtacatacgtatacgtacactagccagcagctggagctggctggcttctctactacactggcatgcagcttggtgtggcaggctacacccagagcgcgccggcgtcgcggaggagcgggacaaggccgccggcgacgtggagcgacatgacccggtcggtggagccgacgagcctgccgccgatgaacactgtcggcaccacgacgccgcggccgcggccaccgccgttggcggcggtgccggcgagcaacatcccggcgagcgcgttctccatgtcggcgccggcgggctcctcgtcgagctccaccacgcgggcgtcgacgccgagctcccggagcaggcgcgtcacggcgtgggacatgccgcacgagctcttgctgaacaccaccaccgccttctgcgacgccagccttgtcaccctgtccatctctatatatgcaaatgtctatgtgcctagtgtcttcttccccgtctccggcgactacgacctggccgcggaatgcgccgggatctttggctggatggatgtcaccggcggtgatcgcccgatcgatcgaggttgtgtcacttgttagtgatgctgatctgctggttgtgcttgcatttgagaggttagggaaggcatgcttatatagtgttcttatgcatgttggcgaaatggtatatcgcgcgtgcaaatgctgggtgaagatggagttaaagaatcttcagaggaataattaaaggcgatcgatcgatttatgcatttctgcgggttttttttttcttctctctctctcttttggttttgggataatgcttggcaccatttctgggttgtgaaaaagatgagctgatagataggttggtaaggaatatggaacattttggcggcgacggaaacgatttgcggcgtttttttttgcacaaaaggtggctgcattttgaaaaggcctgatacacctgataatttttgttatgaacgatgatcgtgctgtgcaaggttactttttcgattatgatttctttcttttatccggtaaggatgatcagcaatccactagactgtcgatacgtaacaatgtaactcggtactatgtatgatgtttgggagtgaattaacacacgatcagagataaccaatgtgaatactggctgtcagattaacttaatccatggtctacacatgccgacatgcgtatacgtaaagagacctgcaagttatgatgatcttaggagtcaaagaagatcagcaattaaattagtttatcctatgttctgataaacttgtttcatttgagacaatacagagcagccaaactgacaaaatcttgctttgctacgtacaacaaaagctacttctgcaggtatatcactgaagctacaacaaaggctaaagagcatccttggacatttgtgaggctattaaactctggatccgggatagggactgatccaatcagacatctgatgcaaagggacaaagaaatactaggaaactaatacattttgtacttcatgtcagctatacttgacaattcagtaatttcagtcagtactgtggtacctggattatcaaattgtcacagaacttactcttatcttttactttcacattcagaccacatcattccttagagttatcgtcagctcaagaacaatgttctcaagtctgaaccacagctagtgataattacagacaatttcagtttctgccgtattaacccagaatcaacctctcgaagggtcagatcagcaatcaggggagccagattccacacagaatccctcaagaacaacaatggccattaaccacttgatcagtgctgctctatccaataacttaaagcgaatctccaaaagcagcagaggcttctcttctccccactagttttctcaccagatatggacagcaagcgatgccgcgatccgagatcgcttttgccatcggtaaatctttcaaaacagaccaggatgatggaatttcatatggataaggagcatctggtctgatatagggtagggattccaggtagagtgtggtctcaggagatcccatgccacactgtatgtggcagattgtgggaaacatggaaccttgggcagttgcagcaatgatatttataatgaaaggaatggaatggattctgcaagtggaagatcaaccatgcatattgtatttgacagattagggaatttcttctgtgaggataatctttatcttccaaactgtgacaaaaagcattcagtgttgtacaacagtacggtataaagaaccttgatgtggacaacataattcttagagaagtttactggaattgaagcatggaacctgcgaattatagagcaatggcgatggcaaaacgagtattgttcagggaaaaaaaatcagagatcattgggtaaatgatgagttaatcaattgttttaaatttttgtaggagacaagttatgatttcatacaacatcacacaatgaaacatagcttctgtggtctatgaaaagttaaaagactaaatcatttgttatagtaagaacataccctatgtggcttgaggagatgagggcatcaagaagatgtgaaacttatgacaattgtaaaaaaaaaaagaacaaatcaaatagatcaactttaaaccatgccgagcatggaattgttctccctattctttagggaaattactgccagtcagagccaggcaattagactttatactcctttttttagggagtatatgggaagtgtaaaaactagaaacaaaacaagcaagaaaattacaaacctttcaagatgttcttttttttttcatttccatatttatctttctgattgctgctaggagttatcagaatctatctgctacaatgcaacaaggttggatgactatgggcttcagctcaggtgatgagctgaagtgccttcttggggtgcctgtctatgatattccaaatgccgtgtgctgcatctaaaatgtctctacagtcttccagatgattccagttgatagcttttacacgtataccaattgaagatatttgaaactttacggtgaggagggcaaagacgagaatcaactggaattagaggagatccaaacaaagatggatgccatctgcggtttgttgtcacagtatcacaaaaaagtcaattcacatttaggcagaatagatgtttgtttcgttcataaaaagaatgggtgtttgttgattgcacctgtcaaggtgcttagaagtatttgaccacttaatgcctatattattgtgaaactaaggatgaatcaggcaggatacagcttaagaaccaaagaaataaattggaattcctgtcatcctatgctgtctgaatattttaaataaaagattaggcactcaggcaaactgatatccttattatttccaaatggtgcaaaaagctgaagtttcaatggataatttattatcaactttccaactgttaaagcaaaatcatacatattctatgcatgctatgtcgcagcaaaacctgatcgcataaccatcctaattcttctttgggtattctcttgcaccaaatatagtcgatccaactctaacatttgtgcttcccatttcaatctgtagaaacgcagaaacagtagaaaatgttagacattgagttactaaatctattaacatgatggttgcaacctgttcttaccgcttgctcaaaatcagcagacatgcccatagacagttcacactgctcctctggaattccaagctccttgcacacctctttccggcaattagccagtgcctatttgttcaacaaattgcacatatattaggccttacccctatggaaaatatagtccagctaagtgtgtctcagaaaataaccttgaaattctctggagttgaggagtaatcaagcatccctattgtcatcaaaccagaaaacacgagattcgggcagcctaatttgacatgctttgcaagctctacacatcctgatggatctactccaaatttcgctgcagaatggcaattcaatttcagagctatggataaaatattcaatgcttgtgcacaagaatatagtgcttccatatgcaagattgatcattccacgtacttatccatgactacagacaatccgatgcgtagcaatgctggacagtataacaataaggaacagagatgcaaacaatcatatgaattctattgtaagtttataaccaacccaacgcatgtagatctgttgctaccagaaattaagttaaaaagtagtactgtaaaggaaattagagtacccacattcttctccactggtgttgacctggactaagactttaaggggttttcttcccaagtcagctaccacacgatcaaggcgattggcaatctgaaaaagcaaacattgcatttatcttgttacagttgcaagattgcgaaactgatctgacaaccaattattcttccctaacttatgagtgatgcaactgaagtcatgctatacaaaatatgaaataatatcaagttctactacaacattgatatgcaatcattaaggcatactatttttttgttatgttactttcattgaacctgtaagtgatacctaattatccgaaaataagtatgttgagttgatgattgatcagataaatatggtgtatcttatagcgttagtatttcaaagcaaaaagtaatcacacgaagaaatattaatttgatgtttaccttctgatcatcaacactctcgaccatgtcaagatttggtacaccagctgtaggtcaaaacacaagaagataaaacttagttgaattttaaacctggaaaaaaaacttcaaatacctaatattcaaacaaaattgatagcttcattgataaagaatgagtctaacgttccatgaaaccagaacaagaatgtaattcagtgctttacatttaggaacatacagaaggcccacataatagtcaattgcacagttaactattcaacaaactgagtaattgagagtagataactctggctgctagaataaaagaacaagaaagcatatattgaacggccgacaaaattggcagtaagaaactaaagccatgttttagagatagccatggctaaccagtgaaagagagggaaaaaaaaagttcaagcacatcgtcttaattacaagtaccaacctaggagggctctggccttgttgctttgaaggttcccgatgaaatgccactcaatatcctctggaagctgcaaaacagacaatacttgctcagttgccaaagtttgaatatgtttgaggtcatttaattcaagaaaaacatccaagaagaactccaagtgaatataaaagaggaagaaaaggaataatgcttcactaagtggagtgcttgttacatatgaacacagaacacggtgagaggaataatcagtgaattccttgacatttatctttattttcatgaatcatgattcactacaggttcaaaatcaaacaatacttatgtatacattaccatgagaagagaaaccatgaatgagaatatctcaaaataatctacagataaggtttagtgatgtacatgattcacatgatgtgaggccaatccaaacaaaattatcaccacacaaaaccaacacatcctctcttcaaagtacaactgattgtaagccaaactctttggaactaatcatagtgcaacggcagagcgcctacagcttccaatcagttgacaacacggggatccctctgctctttacccagaatcgaactgtttgctatggaattgctgtgaaaaacctatgaaactcagtgttccaaatggagctataatgttcgaggatcaagattctactacaaagccgctttccagttcatttactaacaagctaacatgatcgatgattctattctaatcgacgaagcagtaaagcttacacacaaaattaacgcgctgcgaaggattgattacgaaattaactacttgctgatttttattacgggaaaatgcatgacgatgctaaattgctcactaccgtatatctatgagacctcaggagtgagttggatcaacaattttctctcaatcgcaatcgataaattcacaatcacacagccagcgagaaaagataaaagggcgagagctccgcgaggaaagctaagtagggcgagggaaacctgggaggccttgtcgatgagctcctggacgtagttctccccgaagcagcggtggccggcgtcgtacacgccgcggatgacgcccaccggcttcgtcttgctcaccgccaccacgcgcacggactccggcgcccgccccgaccgcgccgccgcctgctgcgcgcgggacagcaccgaccggagcgccgccgccgcgccctccgccgcggcaaccgacgccatcgcccccgacccctctccctcctcctccgccgtggccgccgtctccgccgccgccgctggtgttcggtggatagtccgccgcctccgcttcggatggagagatcctttcaccttaattcacatgagttttgagtcactgacatgtgggcctggtatggacctacatgtcagtgactctaggtggtgtttggatccagggactctaactttagtccctctatttagacactaatttagagtattaaatatagactacttacaaaactaattacataaatgaaagctaattcgcgtgacaaattttttaagtctaattaatccataattagagaatgtttactgtagcatcacataggctaatcatgtattaattaggctcaatagatacgtatcgcgaattagtccaagattatgtatgggttttattaatagtctacgtttaatatttataattaatttccaaacatccgatgtgatagagacttagaagttttagtcccgtcctagtttttcttttcgcttcttctcgaacttctcgagtttatcttttcttttttttagaaaacaagagagaatcgtgtggagggagaaaaatatacagaggtgcgggaacactctggaccgtgcgatatgaagtgaacggataagattgatcccccaccatgcgaaaaacaaatgtaaaaagaaaaaaaaaatccccttcggcgccaagctgagctgacacctccaagtccaaccaactcgtctccgacccaacggcaacgttttttttttttaaaaaatagactttttatgctttaattttattaatagacattttcaaaaaatattttcgaaaactgaacttttgcgtggcagcattgtcctgccacgccaacaatggtgacatgataaaagttatttggccacgctagacgaacagacgtggctaaaagtttcagattttaaaatacttttggaaatggtatattaataaaattaaaatataaaaactctaaacaaaatttcacggcaatgggaatcattttgaaacaaatcaaactgaaaatccactcctcaatcttaaatttttccttagtataataggctaattaggtccaactacataggaacttcttcgagctaaagccaaacggtttggcttggtcccgtgggaacaatgtcgacttgcaccactcctcttccctagggccgctctggcgagcaaaggaagcggcaacgatggaggggatccggtgatgggacgacaacaaaagcggaggaggaacacgtcctatgccttagtgcatccatcgattatggcaaacttagggtgcgttcgttccatggacaatgagtgagatagcacatcgttttccgcgcgcacgcttcccaaactattaaatggtgtgttttttgcaaaaaatttctataggaaagttgctttaaaaaatcatattaatccattcttacaatttgaaatagttaatactcaattaatcacatgctaatggcttacctcgttttgcgtatcttcccaatcttctcaatcccctattcctcaaactcacccttagagaacatggggataatggaacgtgctatgaattgaagctcgggttattggataaaggaggaaggtcgatggcgagttacgagtggagatatcggctgacttgaggtgtgacaacatgttcccagcatggggaatccattttcgacgttgtggaaagtggatgagaactatgtgatggctagtgcagctaaagtgcagttgggagtagaggcatgccttaatggtggactccacaatggtggagatgaagggaaaagggagggaaaccctagcttcggcgacacgaggaatcgacaagagattgtatgtagcgatagaaggatgagatgtcttgaccctccggattggctaatgccgatcaagaaccaaactagaaaagctatccactgcgtgacggagaaaaatatagatttatacctaattaaaaaatacatgtaaacatagagatttagtgatgctaacaagagcttgtgtgttgcaatggaaaacaaatgattttgtagcttattaagttaatcctatcttactataaaattacagcccactagtataaagctcgacatacaaatataccacctcaatggtggagatagggcccggccagcgcgggcaagtgcccaggctccaccactatgcagcagtttatcagcacttagttacaatgtttagtcaccagctaatcagcatacaatttataggtaatgccctcttgcacgtgaatcttcttgttgattaccatgcttaactaaatgcctgttactttcagataattaattcaatttcacaccatcacaattatgatctaaagataaaattatataactttctggtatcagtcttatttttttttcaataagatagtacaaactccatactctagcctatatagccatcatctcattgatatattctcataggatttcctctcctaaattagaactcgatgaccgtcaattttacatacgtatatgataaaaggtatacatatttgaattgatttatgtatatttgtttttcgctgttagacttgcccaagctcaaaagtattcctggatccgccactgtgccactcatcatccactagcaataattacactgaaaaacttatgtaagcatgcaacatcatctataattcattgaattctataaattaacatacaatcatctttctttatattgttttttataatgtttctaacatcctccggacaacataaacttcttttattttttaagtagatagtagatagaagtagaactgtagaagtagatagatagatagtataaaagagaagagaagagaagagaagagatagagataggctgtgtttaattctcttcaaactttcaacttttccgttacatccaacgtttgaacatatacatgaaacattaaatgtgaataaaaaaatcaattgcacagtttgtatataaattgcgagacgaatcttttgagcctaattatgccatgatttgataatgttgtgctacagtaaacatttactaatgacatattaattagacttaatagatttatctcgcagtttataggtgaaatatgtaatttgttttattattagtctatatttaatactttaaatgtatgtccgtatacgttaatttttttttcgccaaaacaactcaacacggtcatagagatatagaaaaggtcgtgttggatttaggcatgatttggttcggacttgttgattgggaggaggcttgttagattccacccttctttttttcttgggggtaagaagaggaccttcactgttggttccctccatggtgtctcccacgaaaaagaagagatgtttaggcaaagggatggacggtggcgccggcgatggcggctggtccaccctgagctacgacgccgacgtgctccacatccaccaggtttgcgcccattggcgcgcctccacggcccccttggctgccgcccggccatggatcgtggccggccacgagacgtcgcgcattgtcagcgccatcggcgaggactactccttctggctcccccatggcggcggccagaggatcatcccctgcttcggcgacgcgccgccggcggggctcccgtactgctgcggcacgccgcgcgggtggctcgccctggcggacgcgccgcgctccccgacgcggctcgtcctctgggagcccgtctccagggcggagatcgcgatgcccccgctgccccgcgcggggttcgccccgcagatcttcctctccggcgaccccctcgccgccgcggcctcgccggggtggatggcgatcgccagccagcccttcagcgtcgcgggcaagtggcagacgctcttcttctggcgccccggcgacgccgcctggacgccgcagcgcgagccgccgatggacaggatcgacagcgcggcgttccacggcggcttcttctacctcaccgtcaggtactggtacctctacgcgtacgacctccgccacgacgccggcgcgccatggccaccgccgcgcgtccgctccaccttcgtctacctcgacgccgaccgcgcgtgcgagctgtccaggcaaggccgcagcctgcgcgccgcgcacgtggtcgccgccgccgacggcgtcgacctgctgctcgccgtgctctactgggaatgccaccgccggagtgtacagatggtcgccaaggtgttcaggatggagtgggcggcggcggcggcggacctcgagctctcgccggtgacggacctcggcgagcacgcgctcttgctgggccgcggcgacgcgctcgcgctctccgctgcggagttccccgcgatcaggaggaactgtgtctacttcgtcgagcacgacaatgccccgcatcggcattgggctatcgccatggatttaggggcaaatgcttcggagctgattccgcatccacaatttcaggaagatgagccaagcgaagaagatggcaaatgcgccgccgatcgctccttgttgccgtattcctggttttgcctcaaacaacccttcttcaagcataagtgacatggccttcgccatcaataattgacatcattgactttactgtatacttcctctgtttcacaatataagactttttagcattactcacattcatataagactttttagcattactcacattcatatagatgttaataaatctagacatatgtgtgtgactagattcattaacatctatatgaatgtgggcaatgttagaaagtcttacattatgaaacggagggagtaaatttgatctattatggcaagtacaaaggtagagaccgatatggtctctacgttaattagaggctatcacgttacaatagttaagacaatacggtctctaatcattaatgtaccaaaatactttcttactagtcatctttcctttattagactcaatgcaataaaaaatttcctaataaatgctaagagtcgactctatgctgttgtcatgtgtagcaaccatctttctcttttcttttctctctctcttccacatcaccaaatatgcttgcatgacaataaagagagaccgctaataaagaccattgtacatgcccttagtttcatcaaggattctagtgattaggaaactatggaagggagatttttcccttctatgggaatttgttcccaagtagagttgtagagggaccaagcttaagagtgttttgccagtttgccggtttggtggtttgggagaatgcgaaagaatcagcatcttactcctgacaattcaatttgcatctgtaagtacaaaccaaagcttgtgacataatttaatttgaaaccggattaattcaagtgacatgacctttaccatcaataattgacatcatcgactttactgtgtaaaatttgatctgatagtttcatcacggattctggtgattaggaatctaaggaagggagatttttcccttccatatgggaatttgttcccaagtagagttgtagagggactgagagtgtgtccctagctagcttaagagttaagagtgctttgccggtttgccagtttgggagaatgcggaagcatcagcatctactcctgccaatttcaatttccatgggtaagtagaaaccaaagcttgtgatataatttattgtgaaatcggattaattcaagcgagtgccctttcctttgatgtggttattttctcttttagtttctctactgtgtggtgagcctacaacatctcatgtttcattggtccggtgatggtgtcgtatactaactgaaacaaatttatatttgctagtattgtcatcctctgtgttaaagaaaagaaataaaggcatttttattcaatttttgtgttactatcctgattcctgacacaagattgcatcgttgcgtagagctatcccagcaatatatcctttgtaaacacagtgagcaaagtgaattctttagtcttcaaatgaagtttgatttcccttggtcttctttttttgttgaaagaaaagagtatatatttgaaattttgtactttcagtgccttgtagaagaaatttgcagaacttgtccttgcttatgtttcagtcgttctaggagtccaagttttcccaagatcagttacattacaggggtttgagagcacagaagccctttgcttagtctggacatcagtttcaagtctttgggcactgtgataggatatggtgaagagatgatacattatgttggctgggagaaattccatagcaacaaatgagatagggatattgttcaatgagctgtatgattatatttcatctcaattgattttccattctaatgagtgaactaagagccgaagacttttctcgatttttcatcaatgcatccaaagaggaatcaaggtcctcataaggttaagtttttttgtcaacaagcagggtggctcaggaagcaatggattctctccctcagaatctcagatgttaaagcggtgtgagtaaggcgggtaagttcgctgacttgtttcgttatgtctgattgcttaatgctgttctaagttgaccgctctgcctattttatgtgaccatgtagatgtgagaataatcttcagtagtggtgaggcccttgtgcaggaaaagggcaatctcaatatatttgctgaataagttcatgaacacatgtcccatatgttcatggtggtcatggtcattgactcagtgcacaagaagttacatgaaaccttcctctaaagttcattgatgacagcggttctccttagcttttgttttgcagggttttgaaaccatgttcaggtcagcaattcccaagaggatctgcttcggtggtatgaagaaaaaaaatgccaagggccatcctattatatctcatgcaactgagaggtgtgctgctggtgtcttgcaacctgctgggcacttcaaattaggtcctaatgaattcaaagttctatacgaaaatttgacattttaaccctttcacaaaacttattctataaatgaaccatgacaaaaattataaccaaaagtaggcttctacctcaacgccatggactttggcgttgaggctcaacatcttagcgccatatttcacggtgtcaatgtcaatgggcttgacattgacatggtgggccgaagtgccaaggcctacggcgctgaggtaaaggtctatttctgattttagtttttaccaaggtctagttatagaataactttagtgaaaggatcaaaatgtcaaaattgtggtgaagtctagggttagtgtactatgtaatataggagaaaaccgaaaaaacccactaaaagttgatggagcagtgaaatcatggtatcatgcactgaacccgccaataggtcggttcaatccaggcttaaatttttcttggatcgaagaggcttgctgggtccaagtccaactacataggaacttcttcgagctcaagccaagtggtttggcttggccacatggaaatagtgtcgacctgcaccactcctctttcctagggctgctttggccgagcagaggaagtggcaatgatggaggggatccgaagatgtgacgacaacaaaaaacggaggaggaatgcgtcctatggctcagtgcatctatcgattatggtggccagcttagggaatatggggataatggaacgtgccatgaattgaagctcaggttattggagaaaggaggaaggtcgatgtcaagctacggtggagatatcggcggatttgaggtgtcacaacgtcttcccagcacggggaatccatttgcaacattgtgaaaagcggatgagaactgtgtgatggctaatgccaataaagtgcagtggaggtgtagagacatgccttatggtggactccacagtggtgcagatgaagggaaaaatggagggaaaccctagcttcagcgacgcgaggaatcggcaagagattgcatgtggcggcataa

SEQ ID NO: 8581 - DNA, 33650 bp, Oryza sativa
  unsure (1)..(33650): unsure at all n locations
agacggccccgttcaggcccgggacctccggcggcaactgcgcgccgctgccgctgtccagggccgtgccggcgcgcgcggtggttgggcagcagcccaagtcgatcctcaagaagacggtcaccgacgacggcgcgccgtcggcggcggcgctccgtgatgccccgcgggtgaagttcatgctcgacgccggggacagcaagctcgagccgccgccacctgcagcgccggcgagcggcggcggagacgccgccgcgccgctcgccaagagcgccaccaagtcggtcgggttcgcgccaccgcctctccagccgccggcgcgcccggcacagcacccccacctgcagccgccggcgcgtccagcgcagcagcctcctcgcccgccggtgacccagccactccctccgccgccgcctctccatcagcaccagccataccaacctcgccacaccgacgcgctgccgctgccgctgccgctgccgccgccaccgccgccgccattctccgtgcagcagcagcagctccctccaccgccaccataccacctccgccacagcatcgacggaatgcaccaccagctccccggaccaccgctgccgccgtcgtaccagcatcgcgccgccggcggcgtcgtcttccccggacagcatcagcagcagccataccgccccaacaacgacacccagctcggcctccccggcgccggcgccgccgccggtgacgtcacgccggcgtggaagagaggagggagagagttcgactctgaggagttgatgagggtgatgcggggaatcgccaagatggtggagccattgacggacaagaacggcaacttcccctaccacctcttcacctcagcttgagagagagtgagcagcgtctctcacagacatatgggccccactgtcagtggcagtagctgggctaccataacctcttcacctcggctcgagtgagagagagctgtctctctgacagacagatgggccccactgtcagtggcagtagctgggctggtagtactagtagttggactagtagcttggtgacttaattttgccaagaagaaaaaggattttaaaaacaaggtgtgtgtgcctgtcatgtgatgtactcttgttgtagcggtactgggattaagtttggtttggtatgggtgcatcgaccatactattattagtacctttatttctgggattgactcatggtcaagtgaagaaacagttgcagacttgcaatatgttatttctgactatgatgttgcagggataacataggaaaatcaaaatccacaaaccgtcaagtagctcttcacgaggcacgacttatctccattttaagctccccggctgcgttaaatagtcttgattctcgctctggattattaggttcagtaggtttagaattcaaaactgtaatagtagttctagatttttttaaaattatcggtgagaaactgagagtacgaaaaaaattctttagctcttccaaacaacaccttagctttgtattcttagttgttgctctttgtcaactagctattgggtcatgagattcccgtatataacgtgccatattggtgaggaactttatcatccttcatatatgactttcgccttttactctgttatagttcctagctacgcctctctctctctctctctctctctcacacacacacacacacattgagatggcctccttttttatttttcttttaagaagaatttgagatggcttcctagcgatgttctcttgtcaagaagcacatgcatgtctccctcgtcttatgagaaatggattaatgaaccagttattattctattatacctctaaagaacctctgtaaaatcctatattccacgatgccgggggtagagccaggattatatcaagaatatggcttaatcactagagtatgtacttcttgaacaagttttaataagaaaattagcaaattccttggtattttttccgtcaggtgtggggccctgcatgatgcccaaacattctggacatagagaggccagtttacacgatttagttttcttataacattacttcatttcaaagtataagttcacacgaataagatagtgttcctttctagtgaagataaaaataaagttagcaaacgtaaaataaaaacgccgaaggaagacctgaaggatggaacactgtcctccttagcaggggcggattcacaatgggggcgaaggggtcttgagaccccactaccgcccccgggacagtggagacccccctaagcccccactaattcttttttccatagatccataggatgtggggactggaggttcgatttatactgatgtagtttattcagtccccactattattttttttctagatccgctcctgctccttggctaaacaatgttaatttacatgccttgcgactgtcacatttgaaatgaagcacaaaccaaaccaggtaatttctattaacaaatcgatcaattctcattccaataatattggcacggctaacaatcccacatgacaaactcttacaacctctagtcctagttgaaaatacctacagcccgattaaaatttacaattactttatttcataatcatagaaaatatattaaaattaacatagttccacttaatccataaataattgaaaatttttaattcaattttactctattatattgcccattaattaattatagtaattaatttaagcagattttggcgccttgactgcctcgaagcgtggctccttcgcatcgaacttttgcttggcgtacacatccatgtactccccgaacacgtactccgggtactcgccgccggcgccggcgccgccctccaccgtcggcgagatggtcgcctcgaaggccgggttgtagaaggacgcgacggagcgccggttgccgtcgcgcatggggaggacgcggtgccacgcgctgcgttagcggccgttgctgagcacctccacctggttgccggtgttgacgacgatggcgtcggcgagcggctgcacgtcgacccactcgccgcccctgagcacctggaggccgccgacgcggtcgtcctggaacagcaggatgacgccgccggcgtcggtgtgggcgcggaggccggtgatgaggtcggggcgcgggcacggcgggtagtggctgaccttggtgccgaagaacggcgcgtggcggccgtcgccggtgaaggcgcgcctcatgcgccccttgtcgaggccgaggttctcgtccatggcctccatcaccctctcggcgagcccccgcagcgccgcgcggtactcccgcatcgtctccttgaactccggcggtttcgacggccactggttgtcgtcgtggaggtagaagatgtcctcccagtccatgtcgtccaccggcgccgccgcctcgccgcgccgctccgccgccatgagcccctccagcgtcctcaccggctcgactccatgaacgccgcctcccggagtcggtagctctccgagcacaccttcttcacccgatcaagaagctccttcgggacgccatggttcaccagctgcagtgatcccaagagattattaaccatcttaatcaaacatgatcgatattgctgtcatgatcagctaatcaccaatcatcacatgatgatctggttaactcgataatgaaaatgaattacatttccggcttctgttataagtcaccagctaaccgttaacttgcattataatataatttttggtcgctgtaacaatttcagctccaactaaaatactccctccgtctcacaatataagggattttaagtttttactcatagtgtttgaccactcgtcttattaaaaaaattatgcaaatataaaaaaataaaaaattgtgcttaaagtactttggataataaagtaagtcaaaaaaaatagataataatttcaaaaaattttgaataagacgagtggtcaaacagtgcaagctaaactcaaaatccctcatattataggacggagggagtaggagtgaagctgggtgcgttggagatgaacaagagagttggagatgcgttttgactagtccacaacttcactccagactcaacacctggagctaaatttaggagttggatctctaccaaacagaccctaaaaatgcacgcagatctgattaattagctacctggaagaatccccactcctcgcagccattgtcgatctgcgccatcgtctcggccctctccgcggcggtgccgtcgagcttggagaagttgatcaccggaaccaccatggctgaaaccttgaagaagatggtggtttagaagttccttgtaaagaatatcaactttggtgttttcagtaattgagctgctaatgctgctgcttaattaagttgtgatggcttgagttaagctggagatggagatggagcatggatgaacgcatatttatagggtagaattgcactgatcaaggatggacataatagtttattttgcaataatgaacaaatagtttgcttctaagaaataaacaggataatttggtcaaagcacaggaaaatgttggagctgacctggcatctgccaggttatctgggatgaagcttctgggcagcgacagccgttggatgcttctggcaaattggtactatttgcatctccatgtaattatgcaccaattggagcaagctgatgatgatcatgtccttgtcatacgtgacctttgaactaaccctcattacactggcagaggattgccatgttgacaggacaaatccttgtaccatgatttcatattattgttcacatgaatgatgattcataattcatggagttgatttgatctcgtttatcatgatggtagaagtttagtttatcgaaaataataaaaagaactcgatccttgaaactagtagaatgatctttattaaattaagaaaaaaaaactatacaacacgacactaataggattctcataaaccacttaataccttctgccggcccggcgaaaaataaaccactgaacatagcctatcttgtttggtatcttgtttggtgggaggtacggatgtaaactcttagaaatagagtctgtcgtcaactcctattattttttactaaaaaatattcgcgtatggcggtatctgtaccaacaagcactcctcaattcttggaattctctcgtggaaaatatgtgagactatgacaaatttctatcaacacggtaaattttcctgaaaattggcatctgagatagtcggtgctactctctgaagattcacacaccaaagagtccaatgatcgatggcaccgtattccctgaggaaaaagagaagaaaatgaaaaagcttgctgcatcttgccaaagaacaaattgttctgagagtgttattgatgtttcctggatttttttttctctccaggaaagtgtgaggaaaatggctggaattcgtaggggccagaattgtgttcctctctctatctgtgtctgaaactctatctctgtttctgcttgtgaattcagagttgccatctcctttaatttttaatttggtcactagctcatccaattgctcagacttcacagtggacttcttgttcctttgctcttgtgttttttctgcaagtgcagcaaaattccataaatcccagtcactgcacctatcagcatgcaactgggggaccaaatgaattaaattgtccatgtgattgtcaagctgtcagatggaacctcggttccctcttccattttgtttccattgtggatatgtaaatgaatatttcagtaaatgtttgcagcaagaaattttgggactccctctcctcttctgaggtttctttcaaacaaaaaagaaattttgggaaaaaaaatttcttcaggtgtaagacgtataagtgcataacagagcaattcattccggaaccctactagttttggccttgttttagatatattgttgagcaggttattttcacgaattatcgatttaataatatgataaattattttttaaaaaagttaacaaatgacttaaaacatgtgatttaaacaatacagtagaaaaaagtatttttatggagaaacatgtttttaagcttagatcaaataatttgttttaataatccagtgaataagcttaaaagaacgtagagttagtggttgatttagggctaatttttttattggaaatatgactatcaaaaatagatggagagagagtggatttatgaaatcagtttacagctacgtatggaagaaagtttaggtcaattttttcgttaaagaaagtttagacccaattatattgcatattgtcagtgctatcaattctgtaattaattttcacgttgaaatcggaatctggccgtcgcatcacgtcagtgtaaaaaagataatagacggccaaatgagaccaagaaaaacatttggcaggcaaatgtcgccatcacctttacctgcataggagggtcatgtagaattaggcatggttaggtgaagtaattaattaattacataatgccttgttgagttaattattcagttagttgccattcgttccagatcaagaattcaaagattgaggatgatatatttaatttgcatgttgcaacatgtatatgtaagaaaagataagagtatatatcaccattgcatcagggggtttgcaatttgcatccaagataacaaaatatatttttcttgaggaacatttgaattcttctccttctcccatgccactggtgatgtatgcattcatgcatgtgcattttgaataagtcatttgtgataactaatatacctaatagcccatgaagtaatcatgcatgaatcaattagttggaaccgtatctatatgtccatgaaaataaacgcattatatgtacgatggaccacatggcacgtcgacgaagaacacatgatgaaaaagaaagacattccaatttgccagtcctagctatgttgcattagggatgatgtgaaagacaaaaacttttaatcaacacaatattgaattgaattgaaatctttctcgtgaactcgagaaatctccaaattaaacatcatatattatcagttccctcacattgttcttgagcaaaacatgcatgcatatgaaacggtcagcagccacacaattgtcaaacatggatgatcaaccgtgtgcatctatatattggaacttttttaaaagtttttcataaatatgttactagaactactatagcgcgcgtagctgcaaagttgattttctcactgctcgatcttcaaatatcactcattttttttacggtgatcgttgaaggttactacttactagtcaatgtacacgtgttgcgtgtgttttgtggtcgaagttgtatcctttcattctctttaaacattatttttcttcttatttttaaagaaaaagtagcaaccaagcgttaaaaaagacgacaacaaataagagtacataaatttgctaattcctgaaaattcatatttttggctctagtagatggggataacagtcctaaagggcgtttgcctacatctggttatttggtgatgaaaccaggatttcttaattttatttggtgcaagggctattaggccaaattttatttaaattccgataagtacaataactactattgaaatctcaaactatgggagatgcctacctacggcccctaccatgccctataggttatttttcatgaacattgggaaattataatatattcttttttaaaaaaaagtgcccccaatttcatttgagaacacaaaaagctgagtgaaaataatcagaaaacagttccaattttgtccgatgcagaacaacatatcatgagtcgatatcctctctctgcatcaacttgttcggagatatatcaatcatcctttatgacttgatttgctttcttcatgttgcatcgaccggtagactagactctttgagtccgtttatcaatctactctttagaagagaagtcatacaaatggacaacacaatgactacgttgtttgggttgatgagaaaaaaattaaagtcattgataatgacaagtaatcaatcaaacaatggtatatatgccaaatctaattaagcatggcacatatccaaccaaatacttggcaatctatccaagcatcctggggtgcgctacatcccagaaacttctaatttttgccacatgcagaaaattatttattatttacagcagccaaccagctgattaattggcctataaaaccctcattccctagctccatttgaagccatcaactgcaagcttacatcacactagctaattagctacttactcttcttcttgctagcttgctagcttctgcatttagacattgcaaaatctgaaaaaacttgagaaattaactaaacaaaatggttgttccggtgatcgacttctccaagctcgacggcaccgccgcagagagggctgagacgatggcgcagatcgacaatggctgcgaggagtggggattcttccaggtagctatacataatcagatcatgtgtcttcttagttgttgcagagatcgaaagttataaatcctcaattatatataagaatagttggtgcagtgatcgaaagttattctcgatgaatttaaacatatcaacatattgtgaccaaaattatccttacatttttaagaatagttaatcaaatgaacatgtgatgattggtgattagatgatcatgacagcatccatcatgttgattaatgattaagatggttaataatcacttgggatcattgcagctggtgaaccatggcgtcccgaaggagcttcttgatcgggtgaagaaggtgtgcttggagagctaccgactccgggaggcggcgttcatggagtcggagccggtgaggacgctggaggggctcatggcggcggagcggcgcggcgaggcggcggcgccggtggacgacatggactgggaggacatcttctacctccacgacgacaaccagtggccgtcgaacccgccggagttcaaggagacgatgcgcgagtaccgcgcggcgctgcgggggctcgccgagagggtgatggaggccatggacgagaacctcggcctcgacaaggggcgcatgaggcgcgccttcaccggcgacggccgccacgcgccgttcttcggcaccaaggtcagccactacccgccgtgcccgcgccccgacctcatcaccggcctccgcgcccacaccgacgccggcggcgtcatcctgctgttccaggacgaccgcgtcggcggcctccaggtgctcaggggcggcgagtgggtcgacgtgcagccgctcgccgacgccatcgtcgtcaacaccggcgaccaggtggaggtgctcagcaacggccgctaccgcagcgcgtggcaccgcgtcctccccatgcgcgacggaaaccggcgctccgtcgcgtcgttctacaacccggcgttcgaggccaccatctcgccggcggtgggcgccggcggcgagtacccggagtacgtgttcggcgagtacatggatgtgtacgccaagcagaagttcgatgcgaaggagccacgcttcgaggccgtcaaggcgccaaaatctgcttaaagttaaaaatagacttttatttgtgaattaattaattgattagttgcataaactatacataaccgcttttgctattcaagataaaaaaataggtgaccttacaaaatttaagtggttattattgtcatgagaatacaactattgttatgttacagtatatagtttggtattttagtgtgtcacggtttgtcagtaggaatatataataatgtaatagatcgtgttgttatatatacatgaataaactatatagatttttttaattaagttttgtcctatttattcgtacgacatgtagtttccgtatcattaatgatgcgatgccttgctggttggacaaaacaaaattgttatcccaattcctcagtaatattattaacgactctcatgcagggtacattttgacttttcttaatgattcttctaatttgtgacgtttaagatatcataccatatagtactactaacgattgttttacatacaggccatacattaaaaattaaaaagtactcctatgttgacctaatgagtaggatgttattaatggatgagccttcagtggcttgtgtaatttacagctgtgtcactgacacgtgaatcataatagagtgggactcatatttcagtgatgctagtacccatgatacgcactattctaataaaagctcctttcccattttttaattaatgctatgagagaaaatataaaccaaattagtcatacaatcgtaccctaggcgggtgtgccgacctatgcatcatatcccatattttcctccaaattcagatcctgatactgatagtgtcggataacatatcactcatactatatcatgttccatattattttatttgaattagattcaagaacgaataaactatttgtatctctagtatataaatattaaatataagaaggcaattaaagtaccaaaagagatatatcaaggaaaatcttttaaaatattacatgtgagctcgtaaaatagtgattaaccaatcgtttatcatcatatttgtaggtggatttataatagatgttcatatatgttttataacatacgggcggatacaagtcttcacatatcctaacccataattttttatggatttggattcgaaaagtatctgggattccattttctctctcatattcttcccgcgagtctcgggtcaggtgggtggtcgggtaatacccatcccattttcacccctagtaggaagtgaccaagcatagatcaggtgataaaatttaccaaaaaaattggcaaattttgtatgagaaccatatgggtctctcgaagtaattagtaattgcttttagaatgttgtgtgcttaattgctcaaagagtgtagctgatccttaaacttgtataattgtatcatctagatctttaaacttttagaatgccgcaattataggtccaaggacttgttaaattgtgttatttcgatctcaaactgcaatgacctcatagggatcctatatagtttgccacatagacgctgacatgctataatcaactatcctacctcgagtgacaagtgggtccactaagagttcttttttctttcttttccgtttttcttttgtttccttctttttttttctctttcttttcttttcttttctcttcttctgctcatggtcatcgtggaagccatctaggggacaccaccagacgagggtggatggatagcggaggccggaggggacaccactatggtggcgaagcaagaagggtgggagaacagcggagcctggaggctaggatggacaaacgaattgtagaggcgctttcgtcaccgctgcctaggaagcaagagcaaacggtggggagcgacatggggacaagggttggtgggatggctatagcaaattctggagcaagctcttgctgtctagtgctagcgaaaagacggaaggagggacagcgccacccgttactatcaggtgccggaagaacaagtcacggctgctcgtgagattgtcttagtgggagggggatatgtgactatcagttggtgtagaattagtgataataccacattagcatccatgtggcatgccacgtgagcaccacatagatcttggaggggtcgtggcggtttgcgacacaaaagggcacaatttaataggttttgggacttagatctgtgttttgagagtttaaggacatatatgacacggccacgtaaagttttaaggactagctgtgcactttactattgttcaaaagaatatagtaatagtagtaggagtttagtacactcatcacaagtgcgttaggtcatatatggcatgacacaactccacgttccacgttggatttagagtttaaaagttaaattagagttatttccatgttggatttagagttatttcaatttgtatatttcatctaaaataaaaacaaaataatttatctaaatattacttatcaatataatcacagctacggttcaccgatttctgaagctgaacacccagctgtcagtcataagaaatcttgatctggagtaccacgggacggtttagtgtgcaaccgtagatccctagatgccaactttctggaccaccatcagtgcgcgtccaaatcagtgctccagcctccatgtggtagcgactctgccattggcgacaacaagggaacaggatgctattgcacagtgcacacaaatggattgaaagaaaaatggccacaaaggctctagctacctctatgatggaatggtctttttttttttttctctcctttccttttgcgtttttttggatgattggtccatagtggagcaagatgccttagctggaggctatccatatccctggtatagcataaatgtcttctgtggcgtaggttatgccaacttacatagtagaaatttaggccctgtttaattctatgggtgaaaagttttggcgtgtcacatcggatattcagatatacatttaaagttttaaacgtagtctaataacaaaataaattacggattccatctgtaaactgtgagatgaattttttaagcctaattaattcatcattagcaaatatttactgtagcaccacattatcaaatcatgatgcaattaggcttaaaaggttcgtcttgcaatttacacgcaatctgtgtaattagatcttttgtctatatttaatacttcatgtatgtgtctaaacattcgatgtgacagggtgaaaagtttttgtgtgagaactaaacaaaaccttaatagaaaaaagggcatgtaactagactcaaggttgtctacgaaattgttttgagatattttgcgttttgaatgaattttggttacttgttggagggaattggtacacgaatcccctaagaaatgcatataaataattgtttgaaacaaatatggttttaaagcgtattttatcgtcctcggcataatttccctcaaggattggtaccaagtcatccaaaatagtgatggtttttggttaggtttggtatcaccgaaattttataactacacctaaaaatatttaagcaccgacttgtaagacaaaactatttttgaattttagaactaaaatttagggttaatttagaggtattcactcgctgttttcatcacttaatgttacattttaaaaccataaagaataaaacgtactacctccttgcacaaatatatgacgttggttagttcaattttgagctaaccaatgtcaaataaaaaaaatttggagggagtaagattcttacaacctaattattttcactgcatccatcacatgtctgcggtttataagctgcaaccaaaacaatcctttcaaacaagtgcttggttaaaaaaacaaaatggataaaaacaaaatcatatatatgccgtacccgttggtacacgtaccagtccaagacatgtgcaagagtacaaacaccaaataaaacacccattgttcgattcgaatttcgaaaagcccgcacgaatctctaggcacaattgacggacagatccaacaaaaaaataataatgacgacgttaattagtaattactcaaccattaccatgtgctaagctaggaggaccgggtaaaaacttaaaaaccgctgttataactaacagcgagagaacactggcaaagcatgcacaaattcggggagccaagaatggcattactggatcacatcacccaccacactagtagtcgtcgtgacgccttcccttccactctcgccgccgccgacgccgacgacgacgccgccgacgaggaggagccaagaattgcatggcgggatacgcggcggaggcgggcgcagctgctggcgcggggcgtgggcgcgcagcacggcatccgccgctgacgtcgctggtggtgtccaccatcgccgccttctccgccgtcgtcgtcttcgccatcctccgctcggtgcgtgcggcgtctcgtctcttcgatctcactcttgtagtcttgttcttggcgtgttcgatcggatcgatcacctgtggatggcggcgtccatggcgtgcgtgtgtgcaggcgtacgacgcggcggtgtcgaggacgacgacgctgctggggcacaacctggagccgacgccgtggcacctgttcaagcacgacaaggggcggccgccggcgcgcgccgcgttccggtgcgcgccgtccctgacctgccggccgccggtggcgcagccggcgccggggacgacgaacgcgagcgcgaacgcgtcggccgcgccgcggctgtgcccggcgtacttcggcgcgatccggcgcgacctggcgccgtggcggcgcggagggggcggcgtgacgcgcgcgctgctcgacgcggcgcagcggcgggcgtcgatgcgcgtggccatcaccggcggcgggcggcggctgcacgtggagctctactacgcgtgcgtccagagccgggcgctgttcacggcgtggagcctgctgcagctgatgcggcgctaccccggccgcgtccccgacgtcgagctcatgttcgactgcatggaccgcccggccatcaaccgcaccgactacggcggcggcggccacggcgaccacggctcnccgccgccgccgctgttccgctactgcaccacccggaaccacttcgacatccctttccctgattggtccttctggggctggtaagaattaaaaaatactccctccgttttagattataagacgatttaactttagttaaagttaaactatttcgagtttaacttaaatttataagcaaatataataatatttataatactaaattagttttatcaaattaataattgaatacattttcataataaatttgtcttcggttgaaaatgttacgttttttctacaaacttgatcaaacctgaagcagttagattttgatcaaagttaaaaacgccttataacctgaaacggagggacggagggagtacttactttgtcttattgcttgtcttcttcccagtagtacgacagtagtactattaaaatatttgagtttagaacatgatttagttagaattttagaacttttaacatctacaatttcccaaaaaaaacttagttcatgaatagaaaatatggtatgtttaaattgacctcaaaatgcactttccattatatcataaatttgttacattttatagacatattctaccaatgttatgattagtggccaaaattttaatggtttactaaacatcgagtatttcccaccagagagagtagtattatccgttgggttctacaaaatatcaaatatggtgtggaaaatcacaaattagagagaaaggattatgcattgatgtttttttaagtagtgattcgctcgggttccgattctatgaccgatttgggtaaagtctctgtttttcagcaaatgtgagttgaggttttatgtatttttacataatatataggcctgaaacgaacatcgagccgtggagcaaggagttcagggacatcaaggaaggggccaaggcaatcaaatggcaagacagagtggcaacggcgtactggaagggcaaccctgacgtggcgtcgccattgagggtcgcattgcttaactgcaacgacaccaacatgtggcacgccgagatcatgcgccaagtatatattccactcacataaataaacacgtgatcaatcattacattatactctctccatcctaaaatatcgtaacttttagctattaatcataaccgaaagtattacattgtactacctatgccataaagtatcgtaacttttacctattaattagaacataaagtattttagaactaagatagtaataaaggttaataaaactgactaacattatgatgaatgcagaattgggatgaggaggtcaagtccgggtaccataactccaagctctccagccaatgcacccataggtaacgcaacggtgtcgtggcgttaaaaaaaccctatgatttagttttatgcaccgatcaattcaacccaaacctttgtttcaggtataaaatatacgcggaggggttcgcgtggtcggtgagcctaaagtacatactgtcatgtgggtccatggcgctagtgattgacccgcagtacgaggacttcttcagccgtgggctgcggccggaggtgaacttctggccggtgcacatcgacgtcgccgccggcggcatgtgcgagtcgatcagggacgccgtggagtggggggaggcgcacccggcggaggcggaggcggtggggcggcgcggccagcggctgatggaggagctcgacatggacgccgtctacgactacatgctccacctgctcaccgagtacgcgcggctcatgcggttccggccggcggaggcgccgccgccgcggccgccggcgcaggaggtgtgcgaggcgtcggtgctgtgcctcgccggcgagaagcagaggcggttcctggaggcatcggcggcgagccccgccgtgtcggagccttgcgtgatgccgcccgatgccggcgagtgataaaatgtgttacattatgttttttttagagcaacacggtaggatacgtaggcagaaaatttgagcagttcaacttgggattttaggatttgctttcagccttaaacttattttattttcagccgagcgcaaaacaattcgaaaattttgagcaaggcgtgcatttgaacctccacatgttgagttctcaactagcaaaagtgcttcaattacaagatcgaactttcaattacaagatcgctttcgtttaaaatccaaaccatacccaacatcttcatccgaattgaccgaaactagtcagcacttctcaacctctagaaacacaccaggagaaaaaaaacaagtgtgcttttaagaaaacgattccatacaccagaaccaacagcgctggtattttttttaaaaaaaaaaaacaaaagccatcctggtgattaaaatgaagatcaagagcaaacccaatatcgcatcgacgcggcgcgaccggttaaattaagacatactcatacattcgcataggaaattcgtaactaaaaccgcatttttttcttttttctggcacagggcaaatgaaacgagaacaaataatgtaagattcacttaatactactatttcatagagcaaataaatacccatttagcatccaggttaactcaggagtgccaaggacatacataaaagcatactgatgatatgcataataacggcatggttagcacctgcgcttaacagtgaccaagtgcctcacttatccagccgatatgccctgctaccgttttatctttgagattatcatcattctcctatccgatgacgcatgtacaaaatgagaccagaccagccagtgctgcagccagggaagaccgcggtacatcgtaacatagaaatgcccaaaaaaacaccgcatgaccacgaaatcgttgatgaagcatcatgacaccgctgcagcgaagctcgcgagtcagcaaagcttagctgtttcttgacttagcatcaaccaccaatcaagccaggtatctgtacacattagcgttgtccttctcgcgttccaggtaatcccttgtgatgaggtcctcgattcgcttcttgatggctttgaagtcaggctgcagtggacaaaaaaccaaagtaagggaatgcagtgtactgtagtcatataactaatttaaaagaaataacttcttccttatgataagaacaacttctcgagatgaaagaaaaacagctaattcaaaatgattgacatgtgagctcagaacacattagcacatcagctaattcaagatgcattgaagacaaaaatatgccgcatgagttgtactcatatgcaactatacaagatgtgataaggattaaaatatgtgggatttcctagaagtaatatgtagtcggtaccttgaacatgcggctgagctgctccacacattccgcaactagctgctgatggcccataactttgcgactcttcataatgcgcacaatcgatgcatcaattgcataccgcctgtccttgtcaacatcttcgacaacctttttcttttcatcaacaggaggtaggggtatctgcacataatatgaagaatacaaccattaacatcatagcattcatactccagaaagaaggcccaccaacacgcaaaacacaaaaacacgaaataccttaattcttctcatcctgtcagtgaattttgaattgaactcaaaaacatcgttgggagaaatagatctattagctggttccttgttaagaatcttgtattttgcacaggagagagaatggagcaaacgcactacatcatcatctgataagtttagctgtgttacaatctcagaataagtaagcctgtcagatccgttgaatagcagcagcaacgcagcctgcaaaaggagaggcatgtcaaaaaagtatcataaaggtttttagtgcaacagatctgttgacagtcatataatttaaatttacctgatatgttgtgacaatgagctcaatagtttttgcctcaaactttgcattgatattgcaggttcccaaggaatatatccaggtaagctttctgtgttttgttcttgtttggtaaaactccttgaaaacctccacgcatttcacctaaaaatgataaatgcaaatgttcatgtaaaaaggatcacatggcaataaatgtttcatggaaaagaagataaatatggatcatgtttcagcttaacattatcaaggacaattgacaagcatgtaatgatgaaccctaaagatctgcaagaaaaagtcacttaccatctcagcaggaaggttaatatcgaaagtcttgtaacttggccagaatcctgttgtcaaaacagtgacagccaagtctatcccaggattcaactcctgatgtgcagccacaaactcttcaaacttagtttgatggtcccttgcaacagtaagatcagtaaccattccctccattttagaagtaaattgtccaccacactgctgcttgagtttggtaagtatgcttctttcatgttcatcattggcactcttatcaaaaagcaatctccttgcaagttttttcctgcaaatagctccacacatgaagcaatatgaatacaaagtccaaaaagtaatgtttcttaaattcaggaggtatataggcttaaaacaagataacacaacattacctgtaaaactcagcaaagaggtctttatcgctgatgtatgcaagcaatcgcaccacctgaatcatatttcattttcagcttagatttccttctacaaaaatttaataatggtagcaaaagagaagggagaacatgcaccttctcaagagcatcttcgatggcttcatcactgagcttttcactgcaacctttcttcagaatattgtcacagaaggtggcaagcagttcagcacttgaactgccagagacacccttgttacagaagacctcgaatgcttctttaagggcctgtagaatgagaagtttaagaatgaggcatcacatttgacttaatgaaccaatggtaacaacaaggaataggaatgtgtcgattggcagaccttatgaaagagggtgtgaccctggaaacattctgtgacataagctacatacttgtcatggagctcaatgattttccagacaaaaacctaaaaagaaaatcacatgttaggtggaaaacatttcatcaccaacgaagtgcaagaagttcaagttgtgtacctgttcctgcataccaaccatgtcctttttctcgggctgtacaaatagttgatattagaatattagctaaataccagtttgttgcaacgaatttgaaataatcaaaagttctgaacttcaaaagatctatatatttctcagggaaacatataattgtaatcaaatataaacccacaaataatctaactacaactctacaagctacatgcaaaaacaatcttaaagatataatgtttctcagggaaacatataattgtaatcaaatataaacccataaataatctaactgcaactctacaagcaacatgcaaaaacaatcttaaagaatcacatagcatcccaccaaccgtcaccagtaggttctttatacagtagagcacaaaaaactaaatcaaataacatgaatttgaatcactaataataaatgcaagggaatcaagcatttgagtgtaaccagaaacagcatataccgtgtcaggaattgtgcacactaggaaaactatagaataaaggacaattttacaggattaaatagaaagagacagtcagcgacctctgtttgatcaactgaaaccagtttaaagggagctaatttaaagcactaatctggcatgcacaaatcacaatcctaataaccatactttgatggaacacaagtaagaaaaatgctaaaataaataccgcaccttcttattactagcagaatcttctgcttgcttgaccaaggctgtgccctcatttgtaacatgctgcagagaagtaataatttaatcagaatgcacaaaaaggttatagggaataagcagaccaattttgaggcaatgaggcaataccgttttaaacatgttagcaataggttctagaccgcggttaattttggagaagagcctgtacatcctagaaaggtcttcctcctggagaagataatgggtattcaatattatttgttttcatgatatacggttaagaaatgaatcatgttgtccaacaaaccttgtcatcacgaagcaatgcaaaacacccagaatgctccttctccaacaggggagttgcatattgtgcaagcaattcattttgcactttctgtgacaatccaggaaggataataatatgagatgatattccaaaccatacagggaaagtgcccaaacattatttaagaaacatcgatatggcagtccaaatacaaatctgtaagaacatatctcaaatgcaagtataagcactcatcaacatgaagtgattggaaactggaaaagggaattctcaaacaaacctccagtaacttctgttcactactaatatgcaagtagtgaccaactcgctccttctctttcttcaagcactcctcagcctaacaaaaacagcacccatttattacaccagagatgtcatttacaaatacagacagaaccagtcagaagatcctcctcaaatgtacctttatcatgtaatcaggacaagagtcctcgagaatccagctttgagccttgagagagtagtaatctgtagtatccttaagcaagaaatcttcaaagtcattctcataacattccatactgcctagtccaatttcaacaaatatgcccaggacattcttcagcagggccctgtctatctgttcgccttcacgctctttgtcaatctgtcaaagaaaggtattgcaactatttaagtatacgcgcaaaatcattttcccaattcaatgtaggaatgctgactcaccagagctatcactgcacctttaacttgtcctttgatttcttggtatatctgttatgagttggtcagattaggacacagaaagtttgcaacacagagattgaacaagagcaaaagctattttaccaaatctcggaagcaagtaagcccaacttgttcaagtggtataagcgacctccgtgagatgaagtatcgatcaagataaaagaagaaacgtgacagccaccgaaccatgattttatggtttgaccacctctttactagttccctcagcataaactcgtcatgtttatctcttaatgaaggtaagacctgaaatatattaaaattaagtgatataaagctcagagtgtacatacaaatataacaaaggagcatagcatacaaaaagagcatgtaatacatgttagaatatcagatcaatatgcacaagtaggaaaaatagtttttgtttcaagcaaaatgtgtcagtttgcttagcgcaatcctaaaaaattatgtacatgatttctaccatgtttagacaaaaccaggagagcaatgctaggatgcaaagcatgatgttcgtcaaagaaccagtatcagccagacatttaaggatatctcctgacctcaaagtcatggaaacaatcagcacactggcatgaacctaaaaggatgccttttatagttttatgtttctaggctatagtcacttttacagcagccttggccaaaacagtgggggcggaaatgcaacgttcacctagtcactagtcgttagttgatcaatgacccactgactagtcggaggctccaagcctccaaaataaccaccatttaaggatatcggcacaattttttacatgtttcgtggtatatgttgagaccacagggtccacactgcatacactagtgtgggtgtgcctgggactggcagaagggaagaccggtatgcgtgcggcaaatgcatgggcccactgtgagcaggggcatggcagtgtgtaggataaaaaagaagcaacaaaggagccagggggaatttggggaatttaggctaaccgtagacccctttaccccccttttaacccacacttttgggcctaaatatttcagctcataccatattctgtctcctagttggtctgcctgattgattagtcaccaactaaaaccaactgactaggaccgactagtcggtcgaactgactagcccactgtttactccctaatcgagacggtgactaggaccgactagtcggtcgaactgactagcccatgtttaccccctaatcgagacggtgactagtcaggctggtcggccaactaggtgaagtattacaacccgccgcacattggtagagcgatcagctgttgactgactagtcatagattcgtatcctacttgcagagttttgattcacaaggaaaatcatcatcgtttcagttaagttaactaataaaaggaaacaaattatgacctattcaactgagatagacttactacacaatcgaatcaaatagatcacctctatcaacaataatcaggtaaccgaatcagacaaaactaagatccccaagtacactaaccccattctcctcctaaccaaggaggaattataacccatcggtgcccggccaccacaaccaaaatcgcctggatcaaccccaaatcacctactatcgaatccaaccggaaatgacagacatgcacaatcatatcaaacatttacaagaactgcagaaaaaaaaagatcgtctcaccatggaggtgatgtactcctcgaatgactcccggtacttgtcgtagagctgctgcgagtagtcgtgcggcggcttctgcgtgcacatgttgtatatcgtcctgcagacaacaacagacacggagtggggggaaaccctagatcagcaccagatcgaagcgaatcggaggggaaaccctagcgggcgggaggaggaggaggaggaaacccaggaggaggcggcggcggcggcgggggacgtacgtgtagagcatcatgtagtcctcggagctgaactgtggctcgggcttgccctcgaggatgttcttcagcttggtgatgcccttctgcatgaacgcccatccctcctccagatcgatcgtcctccgctcctgccccgccatcgccgcagccgccgccgccgccgccggtgaacggaggccgcgcggaccaaaccctaggggagagacgccgccgcgtgggtttgggttgggttccgcgcgagaaaaatggggaggaagcgggcgagagagatagagagagagagagagagagaggaagagggagcggcagactgatgacaagttgaggcggtgacgcggttgggggtaagtataccgcttatatcggtgtagtaagcgtgtcacactgtcacacaaatccgcaagtgaaattgggctgcgaattgcatgggtgatcgggtcgaggctatcctctggatatactctatttcaaaatataataacttagatttatttattcaaatttgtactattaaaaaataactcatccgattctaaattgacaatgagagtattttacagcgaattattttgtatgaatttctttatctctatccattctataatcagagtcgtcatccttccgttccaccaaattctatgttttctctaagttaccctcatggcacatctctaattatatgggtttggcatgttataacatattaacatgttacctctactctcttaaaatcaccggatccactgctttattctcttaaaaacaccttcctgacacatctctaattatatgggattggcccattacaacgtatcagtatgttattggtgggagtatgagagattttttttttgcgtgcttcggtaataaaaccatatataaatcgtaactttgctatttgttgagcgattaaataaatcccaaatcacagataattgataattttgttggtttgatattcaatatttttcgaattttttcaatcttgagagttgagacaccgtacgtctctaaaagcaactgcttcttcttcggcaaccacacctctcctcggataactattcgagtgcactgacttaaattttgaggagtggctaagcatactgctttaatcgtgtcacatgagagcattgtaccaactgcatttcgcaatgaagtgtttttaaggatagtgggagacaaattcctcgcatgaatcggtaatagaggggtgctttgttgatttggtagttaaaaacatattacatagattacaattttagtatacttgttagctaattaaaaaatctcgaatctcacaaatgatctcaccattagtttgattcccaatagctctgttatatctttaaagggagacattgtctccctatcatcggcaattgcttcccaggcaaccacgtgctcctccgattctttggcaacaacccttttagggtgactatgacgttcctttagcgaacacgacttattgtattagatcaccacgctgactctatttcatgatggtttttcctatgcagcggtgggagagaagtttctcacgtgctttgttagtagagaaattttttacttcggtaatagaatcgtatataaaattctaacttttctacttgttatcaactaaaattttccaaatctcaatcaatttaatctcactgctagtttgatattcgatgaatctttgagtgtcttcagcctatagacatcatctatccgccaacaactgatccttctctagcaaccaaaccactcctccggcaactaccctcttatagtgagcacacccacaactcatcgtggatcaccatgtaaactcccttttgcaatggacttttgtcgacgtttgatatcacaactacggtattttgcatactatagggatcgttggtaccagggtatatgcgagattgaagtagaaaagatggagacaatgatttttatacatgttcggccccttatctgtcaggtaatagccctactcctgttggccgaagccggtgttgcttctttattcatctgaatcacacaggtacaataattggaataactcatctgactgtcgtcgacttggcggtatggataaccaactcgtagttgacgacagggtagtcttcctcctcgaatccgcactcggcgagatcagagatagcagctatatctctcttgttgacctccgcagacaccatattaggtttgtctaggcttatctctgatgtcgatatctggcggcgtgtgttggcttgtattgatctatattgatcttgctgtggctttgtgtcattgtggcattgtggcgtgtcccctcttctcttagggggccttgtatttatacccatagatgtccccttgttcaagtagaactagggagaccaatatggatacaatatgttgtttccatatataactctactcgtcattccttatccgcaactctttctatatacgaggtttgtttccgtataagacatagtatgtggtgggctctaccgtgcttaggtatatggtatccataaccctgacaactttcttgtgcggtggtggaagataaatttatcatgtgtttcagtgtagaggatttggtaataaaccatatataaattgcaactttgctacttgttatgcgattaaaaaatatccccaatctaggtaaatgatatccctgtgggttcaatatccaacagcttttgcatgtgctcaacctctatacatcatctatagatattttataaaatgttacgtaagatccatctatctttctaataaatagatagatgctttttttttgacaagttttaaacattgtttcacctgattaaccacattgccaattgtaatctaatttcaaacaacatgcaactaagtttgcgtggtgatttctatattgttgaaacatgtaggatatatctcaataaatatagtaagttgaagtatggtcgtgataaaaaagaagtattaatgctatgtttatcttacgatgcctcatatattacataggcactagaataagtcagttgttgcatttagtgaatctgccaaaccccaccaatctaatgatgaacttatcggtaagaccataggctcccaagagtcctattcatgtttgttaatcaccttggtgttcgggattgacatcaccctggatgcccgtgactaacaacataggcggtaaagcatgccctggaggaaccgaatggagctagaccaagatcaagggtgaccaatagaggtcaacactatcaaaatgacactggcattgataaattaacaatggaggatgatggattttggtttatattgcccaaatggctttcaggctcactgtccttgtttactactgcaaaaagggtgtggtagtagctaaagagaatgagagagaatgagagaagggagaaattgagggtacggtggtggctgggtagggagggaagaggagacttgggatattgacagctaaaacgagcgccatgttgtcatattataaaaatatattatttgataagcctcttatagcaattttttattttacatgtgaatgtacatgaactagctaataccaactagcattgcttttccattgttatgttgctcttacaatggcaaatttcgcctattaaattctcatacaaacgaacagttcattttattttatttgacagtgatacgatccatttataacctactgattttttggtatgtgtttaaacaatgtatcgcccttattatattaaccgtacctagtttttgatatcttgtaggtaaattagcacgaaaaaattgctgttctcttctaaatttgagacctacttcaacatatttcaatgtctctgaagactggttatgatgtgaaataaatattattcactatgatattttctatcgtagttagatagtacataaacctacacagtgatatcatatacggagtaattaaattgtgcttgattaccagcacactatgccacaatttaccatgtacaaatatttggctagagccattaggggtgggcatcggtccgatcgaaaattttggtctcggtcttcggcctttcggttagtttggtcattgaaaagtgaagaccgaattttaacgtaaaaatgtcaagaccgaaaaattcattattggtctcggtccagaccaaaattcaacaatagtttcatatatgcgatcatagaaattttcaacacaaaaatcacaaaaataatactttcttcgtttcacaatgtaagtcattctagcatttcctacattcatattgttgttaatgaatctagacattaacaacaatatgaatatgggaaatgctaaaataacttacattgtgaaacggagggagtagtacgtatgagtaaagactttttttttcatgtctagaaggaatagagatgtgaaaaattagaatttaaccctattgaactcagtggatcgtaagttgcatttggacatttttttttgttaatttggtcttttcggttgaccaatgagactagccgaattgaccaaactaaattcggcatttcactacttaggaccgaattgctcggtcttgatcttgtcttttcggtccggtctttttctgcccacccataagagctacagttgtagcaaggttcttttggaataaattagatccacaccaattttacattgctccattaacttgacaacaccatcaattttacattgctccgcatgacttaaccatctataagtctaacaccatcattgttataaccgtatacacatgacgatcacttaccctacactggctatgcttcgggagagggttgggaagcctaactccctagcgcgcaaaacaaagcatcgtttagtgcataattaattaagtattagctaaaatattaaaaatagattaatattattttctaaagtaatgtccatatagaaaatttttgtaaaatatgcacgtttaacaatttgaaaagtgtgcgtgcgaaaaatgagaaatgtgagttaggaatgtagagataagagctcaaccacctttaagggaaaaaatgaattttatatttttgcaaatagaaaagaaacatcgaatgaaatctgcagtatttcgaattcgaaagatttcatttcatacgcattttgtcttttttcttcacccccaacaacacgcatccggctggctcgatctcgacacaccaaccaaaaatcgaatcgcgttcgagccatcgagccgacaaggcgacaacagccacaacgcctcactccccccaccccacgcgctccgacgagctccgatccgccgcccacctcgccgcccgccggcgatgagcaccgcctccggcgacggcggggacggcggcggcggcggggatggcgcctcgtcggccgcggggggcggcgggaggcggatcccgcccgcctcgtccatgccgtgggtccgcaacctccgccgcttcgtcggcacgggcgccggcctcggatccgaggccttgatgggtcagtgccgttcgccgccgccccatcccttctcctttcctgtggtgtttggccgggccgggattccgttcctcatcgtggagatggcggtgcggttagggtttacgcgtctcttccatgaaaatgatgatgtgattggggaggagaaattatgggcccccctctagtgggaaggattactattatgtgttcctcaggtttgagattgcataacgcagcgtgtggatgcgtggaatgggctcgctcttgcttgatttgcagtgggtgatttgggtggagcggcatagtttcttgacatttgacgaaggtcacaactcacaagatgttcaggcttctgggagtcctctgcacagaggaaggcttgccggctgtggacgcagtcagtagtggcaatgtagggtgatgggctgggattttgagtcttcgtcgtggagatggcgataaggttagggtttacgcgtctcttccacgaaatggtgatgctattggggagtagaagttagggtgctctagtgggaagggttactggatgagttatagtgcctcaggtttgaaattgcataatgcagccggtggatgttgaaatgaactcactcttgcttgatttccactgggtgatttgggtggagaggcatatgcttttcacctttgaggctttcacaaaagtcacaagatgaaatcttctgggagtccttttcacatactccctccatcccccaccccccccaaaaaaaaacccaatcctggggtgcatcgctaggattgggttttttttggtacatagggagtagtaactagtaaggcactgtaggcttgtcggccacagacgagtaagtagtggtaggagtagtaaggcactgtaggcttatcggccacagacgagtgagtagtggcattgtaggaagacaaacatcagattttagtcatgtgcgttttacttgttgatacgtaagctgaggctattggtaatgtggcttgaggatatctcccagctagttcaggaaaactttgatccatatagtgcatatagttgaggcttagttgtccttttctgttttaatcgcatttgtggaattagggactataagataagatgtctcattggcatgcaatttttgggtgcatttgctacaataacatggttgctttgttgatcaatattcgcatgtttttcatgtgcctgcttgtaaactatttgttttaaacctttgatcgcagaactggaaacaaaaaggatactgcttgagattttcaaggagcgccaacggaagagtatggaagctggtgccattccaagtttttataagaaggtgcacagcttggttcagtttattggataccgagatttcataatcttttacgttattatcaaattcgcagcgtaagcaaaataaagatcttgacaacagtagctgctttgacaaacgatgataaaaaagatattggtttcctaagtatcatagtttagttctgattcaagaatgcattgccttctcgtcaactcatgaaattaatatctcctttatggacagaaacctgaagatggatccattagcaatagagttcagaaattggcaaagtacaggtttctaaaggtaatgtttgatttcttcttattgctattgagatattcgtgtttggttggcagcttacttgcattgccatttaaccttctcatggtttgggccttacaatagttattttaaacaaatggcagaaacaatctgaacttctgcttaatgctgatgatcttgatgccatgtgggtttgtctcagagaaaattgcgttattgatgatgctacaggtgctgaaaaggtaggttgttttatgtacctttatttcagaccagcaatctgccagtttttaatctaaaaagttcagatccttggatgacaatatgcatcatatgtctacaatatgcacgcaaaaaactcatccaaaatgaaaaaaatcttttggtgtgatatgcttaatctcttttaggggatttttttagttcattgctacttgcttgaatttggtgtacatactgccctgtaaatctaacgatgatccttgtatctgtatttgtgtttggtgtagttgttcatgtagcagttttggttcgattaccttgctcatctatttttctggagtcttgcagatgaattatgaagacttttgccatattgcaacagtatgcacagagcagatcggccagaagtgcaagcgtttcttcagcccttcaaattttatgaagtttgagaaggatgattctgggagaattgcaatcctaccattttatctttatgttatgcggacagtaagttattttcaaacaaatattattaggattaccaaatttgttttgtgtaatatttgatgtcttccatttgcatctctgataaactggtaattctagcccacaccatgcttcttttccaatttcccattggatgtactcctagttctttttactaaatgacaaagtaggctagttatatgttatcatcagttgctccattattattgttagttagcttttattagaaaagccattcaaagcaataacaccaaatcgctattacaatacaagaacatgagtcatgtcattcaccaaaataaacttgatgggtgtaacaatgcccaaggaagctaaaatcgtttcctcctattacatcagaatgggtcacatttaagtctgaaacatcacataaactctgaattcccatccagcaaattttttgctgaatccatatttatagctgtaacttatttcaaatcattatcatgcatgctactgtttctttttccttgcgtatacaattgtatgacattcttttaactaatttcttcaggtatctctcacacaagcgagaattgatatgagtgagcttgatgaggattctgatggtttccttcaacctcatgtaaggacatcctaacacacgttaacgccattgcacaccttagtaatgtttgacatgacttaattctattaacaggaaatggaagcatacataagagggcttatccccaatttggcacaactgcgtgatatgccatcagcatttgttcaaatgtactgccgcatagctgcacgcaagttctttttcttctgcgatccacacagacgaggtttagaaccaacctttaagtgcagttgtattaatatgcaaattactttaatcgatacatttattctttgtaagagtagctaactgtttgtaatcgatacatttttttttcagggaaagcatgcataaagaaagtattgctgagcaattgtcttcaggaacttatggaactacatcaggtaatagaagaaacatatttcatggtttgctggtagaaactctgtaaattttatacccttataggcttacaacataatattgctgtatcctatattctgtttctttgtggttacgattcttatcaactatattttcaggagagtgaggaagaggttactgatactgagcaggctgaaaattggttttccctgacgtcagctcagcgcatttgtggtatgccagccaccctcatgtctggttttctgatttttcttttgggtagcagtagcacacaatcagtgctctccaaaaagttaccttttgccattctattgcagtatagttgatgatctacctaatgcgcatggtcccatgcagatatgtttcttgcacttgacaaagatacaaatggaacattgagcaaacaggagctcaaggaatatgcagatggcacattgactgatatcttcattgaaagaggttaaaatccattatctgctctcatgatactttatgtttgtctttctagacgtcctaaccaaaaagaaacatgcaattgcagtatgtgaagtttttttatgcattatacacatagatcatggtgtatttcataaatctttagtcgtgaatagataaacaatattataacttcttttctttttccagtttttgatgagcatgtacgccggagcaaagttggaggtggcaacagtcgtgaaatggactttgaaagctttcttgactttgttttggctctagaaaacaaagatactcctgaaggattgacatacctatttagatgccttgatcttaatggaaggggattcctgacaactgctgatatccatacattatttaggtatgtacggggaatctgtattgtatattttttgggcagtgacggaaacatctgcttcggaaaagtggcttaagcaggagaaagttgattgttgttcattagaatagcttttccatggcatataaaagttgagctagcattgtttttgtcaaaattgggaacagcctctgcaatcacatgctgaataatttactgctattctattcctctgttaacttttatctcggaagaaaagaaaggaggatgtgagagttagcattcctgcctgatacaatcttcctagatttaatctgccattttgtttgcttgctgaactattagacagttttgctggccttagtgggcaggacatcaccatgacattggttcaatcgcacataggtgtcgctgtttcttacatactcacaagtgcaacatcttcatttgcacgtgtacatatttttatatacttcagtattttctcagtttcttatgagaactaattagtaaataattaggaaatcttgatgtgttcaatagactataggaatggttcaaactagatgtcatacatatttgtaatatcctttggacctttgtaaggccttgttcggttaatcccaagagggagggattggag

SEQ ID NO: 8582 - DNA, 29739 bp, Oryza sativa
aggtactaaagatcatatctcttcaaactggttaggaagcttacttaatgaagacacaattggattgattttagtggccaaaccaagccaacatacagactgtgcgcatatggctactcgcattcctggtactgtagcagctagcggggtgtactacaatgatcaatacagaatgccatgtaagctgaaaggaattcattgcatggcattgaattgtataccgcaaaaagcgaaggtaaggaagtgcatgaatggatatcaatcaacattcaggttttgtgtaaatgagaaaaatggacaaaccaccgggcagtcaaatggttccttgatccaacaaggccagaatttccggtgtcattcttatggttctcataacagcagtgaaactaaagagtgcagccttgaagatggcactgattcatacaggtaatatttgtactacattacaggataatgagcctactttttccccagatgaccaatgtttattgaatttgtgtatctggacatgcaaattcattatcatcctaattcctatctttctactgtctttaaatgacacgtcctatgtacaaagctgaacacagtcatttttaagatggacataacccatccaacattttttattttgtttttatggttgacataacctgtttgtctttttaaatttctaaatctattgttgcagggattttgaagaacattcaagaggagcctcccaattttcagataatcaagttgcagcaaagaaaaaatcagtcaaatctagtcaagggttggctgaagcttgcaaatttgtttacaacgatgcaaaatttgtgaatgaaagagctcaaaatgatattctcttgctttcacggtattcctttcataataatctttaaaaaatatatcccttggtaaaaacaagagatttgtacataacaaaattatgtgtctcatttctaatcctagtggcataacaaggctgaacaaacgtgcgtgccaggatgttgctgttttagggtcaggatttctcaagcttgatggtacatgatttcccttttagctgacaagctcttagtttctttggtatgatttaactatccatctaaagctattatttactgaaagctcgtgcaaggaaggacactaaaaaaattgaccacagtgtgaaggaaagggcagcgcggcttacccattttgcgagagtatgatttttcaatatgtttagataattgaaccatccatgtgctttactttttgttcctttctacctctatgtactttagcctgttacctctgtatgcatattcagatattaaaggaacaggctcagtcagacttgaagaaagcagcagatcagcattggagcgatggtgctttggaggtctgtgctagttctctgtccttcacttcattttgctggaactagttgaaaatactgagcgatatatagctgccaaatgtttctggagtaccgatgttgttttattaccggtgttaaccttctttgtgtgtgttactatcaaattcatgggattatgcttatataatacactatttatttgcaatgcaggcagatctgcgacgagctgactcggttgttagacgacgtgccatggaagatgctttcatggctttaaaggtagcccaacttgttcttttccatctctactgtctttaaatgcagcaagttggtttagttttcattacaatttacaagctaagatatgcaagattttaggatgaaaacataatcagttattttgatttatgaaagcaagatttataactcaaactcgtaacaattcttgattatttatttgcttaacatcatgccccatacatcatatttccaacaaattttgtttgttttatgagcctgctgtcatgaccggtttgctgttatgcattacattaatagctaaggtttagtttgattggcttagcagaaaataaataatcatatatctagacatgaataactagcctcagacttaatcatactctatctacaccttgccatatcgacatttttttggtatttgttgctgcacaaaaggaaaagtttatggatcacatactagatgttttgatcaatttgacccttcccaattcttggtatttctcatacagcatcttgattattaaatattacacttgtatgtaattctgtaatatttagtgcagtttgttcgggatatccatgacatgatggcaaacagattacaagagcagtaagttcatttcaaatgctcatttcttagagaaattcaatgtttaattaaggagggtatgattttacttcgctggttcatattcattgttagaacaatctgatttgtactaaaataaatatactttagattcgcaaaggatggttcctcttctcctgctaattcaagaagtttcatcacccttgagaaaaatggaaataccttcgagctgtttcctcatgaagtttcaacggaccagattaccgccatagaggttatatctagattaacttatttagcagaaaactcccatcatatggctaattttggttaaatttgttatccatagcaagcatactggagtatggcatctgcgttgtctgaggctgatggtatcgactacacagatcctgaggaggtgaaacattttttacccacattataaagatgaaccttcctatgtccatctttctaaccttctcttttctgtttctgaagcttgagttgttagtagcaactctcattgacctggacgccatggatgggaaaaagagtgtttccttacttgctgaatgttcaagctctccagatgttaataccaggtatatcacagcattattgagtacagttacctgcaatgtatgttgcttctgcgttgttagcaagatcgaatccatcttcaagtacagaaaatgagaatatacagaaaatgagagaatgttaatataaagaatgcagatttgatatgtcctgtctctatacatcatggctatgtgccaaaatagctaattagcgacaaaaaataatttatggataaaactattatgtatatgtccttagtgacttaaaagccaattcaaaaaaggaactatgttgaaaataccgtagaattaactcaaaaattaagtcttaaataaattttggcggtggctgattcgttgtagggcaaacgatgaggctctatgttatatttctgaattacatcgcattcgtattgaccattattatgtatgtataccccttgtaggaaagctttagctaatgcactggctgcagctccatccatgtggattcttggaaatgctgggatgggtgcattacaggtgaacataaatctctcctatagctcctcctattgacaatttctgattaccttcatatcagaattttttgtatgagaaatttctaagcctctcagagccaggaatcatgcttgccccacagttcaaatttgatcttcatattcatttgtaaccatgatttccaagctgtacaaactgaagctcatttctcccttgtgatcaattatctaaaaaaggttaaaatccatagtacaacgcagcctgtttctgcataataatcagttattgttgaatgaacttgctagttgctacttgctacatgaactagtttctttgaagttacttgggtaactattgatgtttcatcaatctttgcttgctctttcaattgcagagattggctcaagattccaattatgctgtagccagggctgcaacaagagccatcaatgaactcacaaagcaatgggagcttgaagaaggtgacagcctgaggtttgtactgaatcaaaatatggtttctaaagagacagccgatgacagtgcagcagcagatgacaccaggtgatcatgtgcaaataagaaggaaaaaattacactaggattaacagaaacttatacaaacatcacgtttcagagcatatatatggataaggtgaatgtctatctctgtcacagtttcagagcataatgtgctgcttggtatcaaaccagatcaccagaatcatcagaatgacagaatgcatgtaactgacacatcttttcagtgccaaactgccaaagaaattaggaactggtgtaaagataaatgtattccttcagtaagacatagtcaatagtgttagaataattgggctaggcccaacttatcctattaaatctcaaaggcccataataagtgttaaggataataataccacatcaggatttaagcgaggaatatcttaacctaaatagggagttattggaggccccctgttgactggttgaggtggggttcggaatgccacgcgcgcgcgcgcgccgggccgaggccgtgggcgtgggcgaggctggctggcggcgtgcgtgcgtcacgtcgctattcttttgcagccactaaccacgttccaacaactgcctctctctcctgatagataaggaggccgcgagtccgatctgtaacggacgcttgcttctttcccggtgttagttcctcctccgcaccagtgctgttctcgcttcctcgcttctgatctcttgcgcgcacgagagattggaaggagcagtgcctccaaaaccacatcttcgcctgagatctgcaccgggtaggcgggtgatcaggtttttgggtagtgcctctcgcacgattgctcgccatgtctggagatgccgccgccgctactggaggagatggcagaggtggtgcgccaggagctggagccggtgccgcgaacgacaacatcaacggaggcaattctgcctcataatccaacggagggccattctcgaggtatatccttctcctgttccctttgttagcgctatcgctttactgttatgtgcgctgtgttcctgttcctgacattcatgatgcctctagcatgttattgcgttactgtaatgtttctgttcctgacattcatgatgcgcatagtatgctactggttatgttaagatcactctacactgtttatgccatggttattgctttaacattttggattaaaatatgccgattcatgactatatttccaacaaatagatgaagcaaaagagcatggttgaagaaattatgttcctcagatgttttttgctattcgattgggaaatggataatagtgccacctcctgagtatttctttgagaaaaaaagtctattttacaaccctaaaaactttcactcgcaccgagttgttaaatcctgaactttagccaagtggcatactccccttttttttacatggcatactaaaatttgatacaaatatgcaaaattattagtcgtgcttaaagcacctaatgataaaacaagtcatgtcgaaataaatgatactccctccgtttcaagttataagacgttttgattttggtcaaagtcaaactattttaagtttgactaattttatggaaaaaaattgtaatatttttaatccaagactaatatattatgaaagtttattcaattatatatttaatgaaactatgctgatgttgtaaatattactatatttttctatagagttagtcaaatttagagtaacctaaaacggagcgagtatttacatagttcttttaataaaataaatgaccaaatgtgaggtttaaaagtcaacaactttatatttttcaaaaccgagctagtaagtagcccaacaatgtcacacaatccgtgtacagtacaatggcacttgtttagaaggtaatccaacaatcggaaacgatttagtaccatgaggtactggtaccttgaggtacttcttgttggaccggagcaaatctcgttgcataaaccaccctaattgtcactctagttttgatattctaccctataacctatttcgttgcaaaagcccacccaccgtacacacgtgagtagcttatttgctccatttcttctgacatggattcgcagtgaactgtataagccatgttgtgttcatctaatatggctatgaggtgagtttgacttgagctcgttcttaggtcctgtttgggagagcttaagattctgagaatctactggttgatagacagcttatgagaatatggagaagctactaaacatagcttctgaattttagtttattttttaagtagaataatagattctcaaaatctatgtgacaatctcgattgtttggggagagtttttgattctgggagaaactgcacctactagaaactccccaaaacagatccttatactagttcgaagtggcaagaagggtggaatgacaatcaatggcgttgatcggcagcgaatccatattgaaagaaatgggccaaatcaactaataatgtgtatggagggagtaattttggcctttggttgcctgagcttttgcaacaaaatgggttacggagtagaatgtttaaaacgagagtgacaacggaggaggtggtttatacgatttggtcagtttaaaaaggacccaagacatgttttgcacgaggacaaaaacatccatataactaacttatcatcgaagagattagtacaaggtaatactataccatttctagtttgaaatcggcagagatggttaagctagctttcgtgagcaggagtgtacatcaccattcaccacaccaagccgtttcactgaagcttccgccttctcgccgataaattaaacggaagcagagctgctgctgcaagaaggctttcagctcacacgggagagaagagagatgggagtgagggtgaccgggccggcgggatcgccgctcgtggcggcggtgctggcgagcctggaggaggccgccgccggcggcgggtacgagctcgtcggcacggcggcggcgcgcgaacagagtacccggccgcaccttgcccggaacgtaagccgcccaccctttctgagaatttcttttaaaaacctttttaattttaaaaataaatctacaaaacttatttttaacatatgaacaattttgccacgctaacttgcatggcaaaaatatattgtcacgctaatctaactgacgtagctgttatttactcataccatcctcgctgatatgataggataaaaccgtcacacctattgcaggtgatgtgtcaatgtttttttttcctaatgctagatgtggtcaaagagttaagattttggaaataagttttgaaatgattcattcttaaaattaaaaattttaaaagtattttgaaaaaaatccctttctaacgcagatttgcatctcttaatgtgtttgaaacttttttaatcactcgagtggacatctagtcgtgtagtatcatagatttgcatacgttgttctgttcttgcagccgtttggtaagatcgccgcctttgctgaggacggcgagctcgcgctcgtcgacgccgtcggtggccatgttgatggtagccgctctcatgcccgcgtgacgtcttgagccatcggcttggagaaggccccactgtacaggctacgtactgacagttgggccccaccgtgctgttatactacttaggagttgattattatggtgggggccatgtgtcagtctcgatttgatagcaatgtgtcatgcggtgaagatagaaatgtttgtgtgcgagcgccagtaattaagaacaacacagaggaggtaggggggcaaaggagttcttttgtgtcgattcctattgcatcaagataagactatttctttactattgattttacaaagaaaattactatccatacgactagtgtgtacgacttgcgtatgactagtacttagctactgcttgccgtgacttacatggaaaaaaactgacttgtatgaagtgaattgattggctgatgaggcagggtcgaataggggtcggatgtatagcggtactcctttacaaataaagttcatcgtaaaacatctcgagaaggtacgtatatgtgatcactaatgttgttgatgggatgtttttcgtaccgtgcttaaaatctgatgtacaagttgtttttggcttgttgcatcacttgtgcattactcctctaaaagaacttgtctaatgtggcgtcaagaactaacaattaagttacagttgagtcaatcaggaatatgaggccgcgccatctgtaaggtctccttctatgtccacgtcagtgtaatttgtttctatcgttcgatatatcatatacggttcggatgcattttgccagattatgcatgcactagaatgcacaggtactagtgcttgacaatgacctatcatattacaagtgtacataatgcaaaatgtatgaggctataatcctgcactgatttttatctgagggtgcatgcatggataagaatggatgctattggccatccatgtaacaagtttgcagggtgcacgaatgcacgatggcctcactccctcgtgtgttattgtgttaggtctgctattttcttttttaaaaaaatatagtccaaaagagagacgaggtggggaagacttgattatattgttctcttttttttttcagaacacgcaatacgattacgcatcttttcaccgaaagacggggaaaagaaaagaaaaactcaaatcacccatacaaactgattgattgaaataggatcacatcaaggtggaagggaaaaaaattaaaacaacatatatctattatatgaactctagatgacaacaacattaacagtcagatttaggataagtgtgtacattaacatctactccctccgtcctaaaaaaaaagaagacaaaccctggtttccgtgtctaacgtttgaccatccgtcttatttgaaaaaaatatgaaaaaaattaaaaagacaagtcacgcataaaatattaatcatgttttatcatttaacaacaatgaaaatacgaattataaaaaaattttatataagacggacagtcaaagttggacacggaaacctggggtttgtctttttttttttggacggagggagtatctgtattgtaatgtgtttttttttaaaaaaagaaaaagcttgcatgcatgatttctatgctagtttaaaaagagcagtgatggtgatgaggggttaatctgtcatcaccaactacttactcttttgtaataaagaaataatatgtggggtcaaaaggttcacatgttaaccaccccatcgtctctaattttactgggaaagacaaatgatattataacgtcatatggatcatatattaattacaaatatatatagaatttaagagatgatatatacagaaaataatgataatagcaagttaatcattatttttcgtcaattaaaattctgttgccacaaaatgtttcatccgattctaatttcttatattttttactcagcagcagtagtaataccattatcatcaagcctatggtcacatcattcacgccaagtgtccaagcacctactccgaagcttcttgctgattaaattagacggaaatggagctgctaactgatgcctaaattataaatgtcagcatgtgtagaacgaggaagaactcacatcaagctttctcaagagagatagagacagagacagagtttagagagagacatcggagatggtcgcgaaggtgtacggagtggcggcgtcgccgtacgtggcgacggtgctggtgtgcctggaggaggccggcgccagctacgagctcgtcgccgtcgacatggccgccggcgagaacaggtcccgccaccacctcgcccggagcgtacgcccctctttgccctctccaactctaagattcgcttcactttcatacatgatgcatctcgatctcttcttgcacaaaatcaattaattgctcgctagaaaccttttcatctctgaattaattaaccaatcaatcaaatcaaattcggctatatcgttcaaaaaaaaatcaaattcggctatatttcgttcaaatttgcacgtgtttctcgcagccctttggcaagatccctgcctttgaggacggagaagtcactctctttggtatgaggaacaccacacctcacccgaattactgtgatatgctccatctcaattacttatatattggaaatgaataatgagtattcactttttttgaaaggaatattcacatattattattattattattattattattattattattattattattattattattattattattattattattattattaccagagtcgcgtgcaattcaacgctacgtgcttcgcaattacaacaaaccggatctcttaagagaaggcaaccttgaggagtcggcaatggtggacatgtggatggaggtggaggcgcaccactacgaccctgccatcttccacattatccgggagtgcgtcatcaagccgatgatcggcggcggcgcccgtgaccaggccatcgtcgacgagaacgtcgagaagctgaggaaggtgctggaggtgtacgagcggaggttgtcggagtcggagtacctcgccggagatttcgtcagcgtcgccgacctgaaccacttcccctacacctactacctcatgaccaccgagtacgccacgctggtggagtcgtgcacgaacgtcaaagctgttgagattatgggcatataaggatttaatttattccataaataaatcatgacattacagatgaaaactagcatgaacgcatcattagatctacacatgtaaactacgcagaataacatgaacagatcaaatatgcgcaacatattgaacacgtaccgaggtgacgaaaagaccggctgcttggtcgaaatttttcgcaggtgtctacgaaggcacgaaacacgcgagcgaagaggaaggcgagccgtcgcgaacgaacagggagcagtcgcgcgaagcgcttcccaaaaaccttattgccgccttctcccggtgcaggacgtcaaaggcagaggttccggagacctgctctcccgatcgcaggtgcacgccggcgagcgggatggagtagtctacgagcgacggcgcagtacagagtaggaggcaaaccctagattgattttcgcatgtattgcgtgaagacggcgggtcggtttatatagagaagggtcgcttgatcagggcgcccgcacgatctctactgcgcgtaaccgaaccggataagtcgcgcgtaacttatccggactccacgccgtttgcacgcaccggatttttcggaacgtttccaaaacaaaacgaatccgaatttgcagcaaaacaaaactgcaaaaggaggctgcatctgcgcaagggtgaggagccaatttttcggaccattcgacgcgtacgtcgtgcacgcgctgccctgccctgccctgccaggccaggccaggccaggccaggcgaggcgaggcgagcgagcgcgcgcgtgtgtttcccctcttctctccaccacacatgcttcaagtggctaggagggcatcctcccttttaaggaggtccccctctcctagaataagcaaggtggtactaaactccacatgcatgccatcccatgaggtgggcttttgtgattttccaaagaattaatcttcgagtgggctaaggcccattcattaattccaacaatcccccaccaaatctcaaaatcccactgagatttgccttttccaatgtactgtttatataccagtggttcgatggagaccaattaaggttgaacatccacctagaactccaagctacacttactcacaacttgaacaatggactacgccttgaattgcaagtcttgtgcaagcaagtttcactcaaagtcttatctggtactagaccgtctgtagactacccctcgggtggagcgtataagtcatactcctaggtctttggtaagcttcctagaagattcacccaaaatcttcatagactgcgaccaacagtcaagctcacaaaggtgagttccttcaagaatgctctgcaggacaacatctttgctaattaaagccaacagaactcattaaggcatagccaacctgccttgcagctcacgagagtatatgcatcttcacttggatagggtatatatattggtactctcctctagtttattaatggtttgttcttcccaggatctaattcacgggatctccgatcacatagactgggttaccaccatagtataactcacatgggtctcaaacccatctccttcgatgcattgtctatcacatttcgtgatagtccctttgtgaagggatctgccaggtttctcgctgtttggatgtaatccaacgttataactccggagtttcttaatttcctgacagacttcaatcgtcttttcacatgtctagacgatttcatattatccttagaactattcactttgacaattaccgtttgattgtcacagttcataaggatagccggcaccggtttttcaacaacaggcagatccattaatagatcacgcagccattctgcctcaacagtagcagtatccagtgccgttagttctgcttccatggttgacctcgtcaaaattgtctgtttgcaagacctccatgaaacagcaccaccacccagtgtgaaaacatatccactagtggctttgatctcatccacatcagagatccagttagaatcactataaccctccagtaccgcaggatacccagtatagtgaagtcccaattccacagtacctttcagatagcgcattactcgctcaagcgcacgccagtgatcatctcccggattagaagtaaatcggctcaacttgctcacagcaaaggagatatcaggcctagttgcactagccaggtacatcaacgagccaatgatttgggagtattccagttgattcctagcaattctcttgttcttgcgaagcaacaagctaggatcataaggtgttggagaaggcttactatcaatgtagccaaagcgattcaagatcttctccacataatgggactgcaagagagtaatcccattctcacctctaattagcttaatgtttaagataacatcagctactcccaaatctttcatatcaaaattttgagacaagaatgatttaacctcatttatcacctcaaggtttgtcccaaatatcagtatgtcgtcaacatacaagcacaaaataactccctcacccccaccatggcgatagtacacacatttatctgcctcattgactgcaaagcctgcagatgtcaatgttttgtcaaatttctcatgccattgcttaggagcttgtttcagaccatacaaagacttcaacaatttgcacactttgccttcttgaccttcaactacaaacccatcaggttgatccatatagatctcctcatccagctctccattaagaaaagctgtcttaacgtccatttgatgaacgagaagaccatgtgaggctgctagggaaagtagcacacgaattgtggtcaatctagcaacaggtgagtaagtgtcaaagaaatcttcgccttctttctgagtatagcccttagcaacaagccgagccttgtacttttcaatagtaccgtcaggcctaagcttcttcttgaacacccacttgcaccccacaggtttacacccatagggtcgctctgtcacctcccaagtcccgttagcgataatggaatccatttcactacggacagcctccttccagtagtctgcatcaggagatgcatatgcttctgaaattgacttaggagtgtcatccacgaggtacacagtgaaatcatcaccaaaagacttagccgtcctttgtctcttactccttcgaggagcttcactgacatcctcctcagagacaagttcatgtgtatgttcagtttgttctggtggtgtgattgaactgggaattatttcagagggttggttcgaaccactatgtgtatccttcattggaaaaaagctctcaaagaaggtagcatcacgagactccataattgtaccaacatgcatgtccggtacctcggatttaactattaaaaatctataggcaatgctatgatgagcatatcccagaaaaacacagtccacagtcttaggtccaagtttgcgcttcttcgttattggtacattgactttcgccaagcacccccatgtgcgcaaataagaaagtgatggttttctaccaatccatatctcatatggtgttttgtccttatttctgttaggaattctgtttaacacatgatttgaggtcaacaatgcctccccccaccatgccttaggcagtcccgcggtgtccaacatggcattcaccaagtcagtcagtgtgcggttcttcctttcagcaatcccattagactcgggagaatagggaggcgtcctctcatgtatgatgccatgttcttcacagaataagtcaaactcgttcgagaaaaactctccaccacgatcagacctaagcctttttatctttctgtcaagttgattttcaacttctgccttataaattttaaaatagtctagagcctcgtctttcgttttcaacaagtacacatagcaaaatctagtagcatcatcaatcaatgtcatgaaatatcgttttccacccttcgtcaacaccccattcatttcacaaagatctgaatgtaggagttctagtggtgccaagtttctctcctcggcagccttgtgaggcttgcgaggttgcttcgattgcacacaactatggcacttagaacctttgacaatggaaaacttaggaattaaacacatgctggaaagccgagacatcaagccaaaattaatatgacataaacgtgaatgccaaacattagcttcatcatccacactgccacaaatatggttcacagacttattgcagaaatcagaaagggaaaagcggaacaggcctccgcactcataacctttaccaataaaatatccatgtttagacacgactactttattagactcaaaaaccaacttaaatccgtctctagtcagacgggagccactaacaagattcctgtcgatagaagggacatgctgcacgttcttcagctgcacgatctttcccgaagtaaacttcagatctaccgtgccaacaccatgaacagaagcatgtgacccattccccattaggacggtggaaccccgtgcgacctgataagaagaaaacaatgagatgtcagcacaaacatgtacattggccccagtatcaacccaccaattagtagattgattaactgaaaaaacagtaggtaaattaccatacccgcttccatctccagtgttgccaatggtcacattagcagacttagaagtctgccctgcaggtgccttcatccccttgcgttgtggacacttcctagccagatgaccaacttggccacacacaaagcaagtcctctcatcctgattaggattgttgttgttcttcttctgcttcttgaagttggtggtctgctgagctttgtatttccccttgctcttgttctgggccttgtgcacaacattggcactggactgcccaccatcgcccttagacgcggcatctttttcccgagctttctcctcaacatcaagagacgcaatcaacccctcaacggagtattcctgtctcttgtgtttgagtgcagtaccgaaactcctccaagatggaggaagttttgcaataatgcacccggccacaaatttgtcgggtaagacacacttaaggagttcgagttccttagccatggtttgtatctcatgagcctgttcgactacagaacggttgtcagccattttgtagtcatgaaactgctccatgatatacagatcattgctagcatcagtagcaccgaatttagtattcagtgcatcccacaactccttagcgtcggtcatatgcatatacacctcgaccagacgatcgccaagaacgcatcccacaaagagagtagtggcttcctcgaattgcttctgctgttcagcagtaagaactccttcaggtttgccagtactcacccagaagcatttcatagctgtcagccacagagtgaccctgatctgccatctcttaaaatgcacaccggtgaatttatccggcctcagtgcatcggcaaaaccagccatagtaaaatcacagtgcctataataaggtttttggattgttgagattatgggcatataaggatttaatttattccataaataaatcatgacattacagatgaaaactagcatgaacgcatcattagatctacacatgtaaactacgcagaataacatgaacagatcaaatatgcgcaacatattgaacacgtaccaaggtgacgaaaagaccggctgcttggtcgaaatttttcgcaggtgtctacgaaggcacgaaacacgcgagcgaagaggaaggcgagccgtcgcgaacgaacagggagcagtcgcgcgaagcgcttcccaaaaaccttattgccgccttctcccggtgcaggacgtcaaaggcagaggttccggagacctgctctcccgatcgcaggtgcacgccggcgagcgggatggagtagtctacgagcgacggcgcagtacagagtaggaggcaaaccctagactgcatctgcgcaagggtgaggagccaatttttcggaccattcgacgcgtacgtcgtgcacgcgcgccgcctgccctgccctgccctgccctgccaggccaggccaggcgaggcgaggcgagcgagcgcgcgcgcgtgtttcccctcttctctccaccacacatgcttcaagtggctaggagggcatcctcccttttaaggaggtccccctctcctagaataagcaaggtggtactaaactccacatgcatgccatcccatgaggtgggcttttgtgattttccaaagaattaatcttcgagtgggctaaggcccattcattaattccaacaaaagcatggtgggagcggctgctcgcgaggccggcggtgaggaaggtggccgctctttccccccctgtgacatcaacctgaagaagctccacctcttggcgttaatgacaatgacagttgggccccattgtattgttaacttaggttatggttgggacccacttgtcagtgtcagttcgctagcatatagaattactatatgaagtactatgcattattgtgcgtctatcaatagaagaataaaacagaggagataccactatacagtgtacacggcattggcaatgtgtcaatgtacatgacacctattatttttttatcacaaagcagtataactaccattgttcatgtcattattgaaattcgttgtgaacaggctaggatcatatgtcctaattactggatgttgtggaggaaactagaaacagaggcagtgcgaggtacaagcacaaagtagaacaactgtttgctgagccgcacacttgtttggaccctaccactttcatgcaaaattcatgcatatatataaatatatttacacctgatgcattttagcttaattaaattcatttccaaagaagtagtagcaaatcaagcgaaacaaaagcaataaagatgaaggcttcctcgttggccgccgtcgccgccgcggtgctcgtcgccgcggcgtgctccgggcgcgcgccggtggcggaggcgacgatcgagagcacgtgcggggcggcggcgaagggcgaccggcgcgtggacgtcggcttctgcgcgcggcagttcgcgtcgtaccacggcgcggcggaggcggacgcgtgggggctcgccaagatcgcggcgctcatcggcgtcaacctcgccgacgacgccgtgttcgacatcggcgccggcaagatccgcccctcccccggcggcggcgccaagggggacaaggccatggacgcgtgcgccaaggcgtacgacgccgtcggggtcgccttcgcggaggctgccgacgagctgggctcgcgccggtacgccgcggcgaggcaggagctggcgcgcgtggcggcgctcgtgcagcggtgcgacggcggcctctcccgggccggcgccaggtcgccgctgcccaggtacagcgccgactgccagcaggtggccatcatgggcatcgccattactaacctcctcaagtgacacgtcgccgcgtcgaacacctttggtggtgtggcttggttcttggctgcttacctacaaagtgaataaattttgtatctgtagtttataaaatccaataaattaagacaattcattgggtgtttgtttggtttaggaggttgattttcattgtgttagattatatttggtcgagtgatataaatattttgggactatctatatttatggcgccatatttttcaacaaaaaatagtcggcatgtatttatgttgtagcttcctaaattacatatgtaattttagtgtatttacaatgtaaatcccaaaaatacatatataagtcctaaaattacatatgtaaatcccaaatttacatattaattacatatataagtgatgtgtaagtgaggtgtaactactgtgtaaattcgtataaatatataaataattattaattttataacggaggtgaagtgctaatgagcttagagcttgattaggtgcagctggttctttcacaaaaggtgtaagatgggtgcatgtgcttgaaacgaatcttatcggaggatctcacggttaaaacatccgactgtaaattatcctaaaatatgtcgacacaaatttagcaatatcgaatatttttgtgtaatgtgaccaaagttctagatcaatgggttgagaaacaacatcgagaaacgtgggatgctatttctgaatggttttaaattttaacaaggaaaagatgagattgtacctatgttattaggatgggaacaatggttcagaacgagggatgcggcatgattccacgttcttggtgacttagattttgtaatgttggatttgaaaattcatgttatttgcccacttccttttaccaaattttggccaagaccatagataccatgttactgccaaataacaaaccttttgtgtattcaaaatttaaaaacctgtttcaaaaaaaaatcgcataactgtcagtgggaagttccatgcgttgtaatccaaatgaacaactcatatttcgttttcaccatgtaactgaattctagtccaatatgagtttggtccaacaaattgtaggatcaagctgatggcaaatgaacaagggggaattcagatcaaccctcgataaattaaatcaataaatacgaataaaagttactcaggtttatgtcaaaccgtatggttcaacatatggataaagttaagcgataaattcaaggcgagatcatagcatttcatatccttatcggactaaaacaaacaaacaaattgataatagtagtcattttgacatagatctttgttccaaattcatatgtgcaaattagaaagggataaaaacttccatgatatattcatgtcactgccaaacagtgcaatgcccattgtgacacctgattattattaattacatcaagagtcgtgcagcacgtacggatggatcagcagctcatgccggcgtccaagggcgtgtccatctcgccgtcggcgagcatgtcggcgagcaccatccctgcgaccgcgccgccgacgacccccatgccgagccccgcccccatccccatccctcctccaccgccgtgactcgccgcgccatggccgtacggcgctgggccatagccgtacccgtaatggtggtggtggtgatggtggtgctgcgcgtgcgcgccgccgccgccgccgccgtagggcgagccgtggtggtacgccagcgttggcgactgcgccgcgccgcggcggccgccgctgtggcgcccggccgacgggtacgcggtgatcgcgctgagctggaggcccttcccgctgacatgccgcgtcgacgacgcgccgcgggcgccggcggcggacgccggctcggcggcttcgtcggtgatctggtacgatatgtggagcacgccgcacttccggccgctgacggggcggcgcacgtggtagctgaggtgcctgtgctcgccgccctcgggcgccgcggcgacgaggtccttgaccgggacgaacacctccccgacgtcgctgtcgccgaagacgcgctcggcgcggagcagcacgtgcagcgcgatggcgcgcatgtcggcgccggcgtcggggatggggaagcggagcggcgcgtgccacatggggctccggccgccctcccggtcggcgtgcgtccggtgcgtcggcacccgcgggtcgccgccggagatggacgccacggcgtacacgcgcatcttggagaacatcgtcaccttcttgaggttcttggccgagaccagcgtcacctccagcacccggcgcgccatcgccgccgcggcgaacagccggccggtcactgacggcgaccgatcaaatgaagccgcaaatgattttttctctcgcaagtgttcacgttcttggattaaggaaggacgatgcacgcagggtggttaattgcaaacaaggttaattaagatttgagggcttaatttgtgtttacgaggtgtaattaatttgtgcggcgagccgttcatgtcggtggcatatagtgtcatgggtatttttagtagtagaggtttggagagcacaaaggtcatttctctgttggtttcacctccattgctgtggcaatgtgactggatttgaattctacttgaggatatgtgttcaatctttttaaaacataggcagaatttttgcctcattttgtttgatagagaagagatacacaacaccaacaaagaaagggctccctctcaaacactaatctatttaaaactcaaaagcacctcaagcacaccacataaactacaatgatatatgatatatgttcatgtttcacttttaggtcatgtttggaacagaggaatggaaaacacataaataggaaaaaagaacataggaaaacaatggaattcaaaacacaggaagatacattttggactgtttggatcacatgaaaaaattgacagagaaacacagatgcaagcatgaagcaaaggaaattttcctttagatcaaagtagatgttttttatttcctatgaaaatggaggaattactacctttccaaaggaaaccaacaaccccattcatttgttccaactaacttcataggaaaaatttccaaagtattataaacgtaaaaaaaaatccttcaaaaatcgttcctaacatggacttagaggttgcgattatttagaatttttttcctattttgagcctaacgcacgctcccagtttaccccatgggccccctttatcggcaagtgaccgacaggtgggtccgtagacaattgggatgaaaatttcggttgtaatgctccacatgtcggctgacaggtgagcccgttacatccggttgatgagttgatctgtttggagggacaacgacaagatcaagcatatcaacccatatgggttgggccccactttcgtatacatacatgtgtactgttgacggagcgcggcgctcctcaccgggagaccgcacaggcccccctttgccggttcggccgggggctcagggtgagatctcaagctctctctgtagatgacggaaagatcgcgacctctcaagagaacatgaaacacaagcgatgtatacaggttcgggccgctgagaagcataataccctactcctgtgttttggtggatctgtgtatgaaggagctataaagtgtgagccgacctctccctcgttctaggctctgaatctggaaagaatcaacccctttctctatgggcaaggtcctccttttatacttcaaggggataccacatgcacccctccctttccaaactggacttttcttcttttcataaatggacggagatttgcatggtcgtcctccgaacatcctcctgacgggacggcacatacctacctccacttctgcctgaggcgggcacgtcgtgggaaggtggctgtgtgctgacgacatgagcagtgtcagaccggtcacaaatcggtcattcttgtccaccacacgtcggctcagcaacgtgcatgtttgcccttcttcaaacaacatcttgcttgtaatggttaggatgaagcctggcatatatcgatcggggctaacgtgtcatctctgggatgtaacacgctagctccagccggggacgagtgcctagaagctctcgtctagacaggatggggcgaagcatgcgtctgaccgcctgtcgccacctaacccgcgatttgaccggtctgtgactggtcacagaccggataatcgagtgcactgcactgcacttcgtgcggcgtgacacgcttagccgaggcgcaataaatgcggtaggtgagccctgctgtgctcacctaacccatacacgtggagtagaaaacgcgaggggtcggggcgcctcggccctcgggggcgaggctggagtggtccgacccccccctcggggagaccaagaggtgggcgcacacattaccctcgggcccgacgtcccccgagggtgccaggccacgtgggcgattgtgtctgcctcaagcctctagtcatgatactcccggtcccatgtcaccgacaactgtgaaagtgtgaactccccttaacgtacaaaatgaggaactatgtcacaaagaaggaggttcgactagctaaaataggctaagttagattcacatctcagactcaacaaaggagggttcatcatgtccctgcaagaaaaaggattcatcctctctcacttagatcatcccaacatcatctgccataaacttgatcatcatcacttagagtgagtttgaggagaagtggattaagaagattggaaagatacgtaaaacgaggtgagctattagcgcataattagttacgtattaactattttaaatttcaaaaatggactaatatgattttttaaagcaactttcctatagaattttttttacaaaaaacacatcgtttagtagtttgggaagcatgcgcgggaatacgatgtcctttctcaccctatgtcacctaaacaaacgctcccttagtgcaagaacgtaggagtagggcattatgatttcgagcaatctaaacctgtataaaccatctgtcttcattctctaatatcccctcgttctcatgcacgacctaagcacgagctcgaacctgcaccatgaccgaactatcaaacgagggtactttgccttcctgcttggggagttccttgctctaatagtattgaacacttggcacattaaacatgaaaaaaaatatactatcatggacaccatatcaacaagaaacacacgtcgttgatatatattttgttctttttatacttaaattgcactgatgagttttaggataaactcaaacaatcaatttctaccaaaataataggtgactaattgataaataagtaacaaatgacatatatgtatataaaacggatatatcaggcccacattaacatcacgcggataaccatctatgctacgcgcccactgtttcgacgaaaccgctcctgcgtctattcgtaaaataccccgatacaccattacaattatgcgcaaatgccacactactttgtctcactttataaaaactttgctacccctatatgtcatttcgcattatcgttcgactatataacataggtcccgcatctggcttgcctgacatagaaaccatttctctcatttcttttttctcctctcttcccaatttcccatcatgcccccgatcccctcccgttcggggcccaagctcccgaaatcccccatccccaaaagtcccaaacccaagcccaaatcgagagaccccgcaaccaaatctagggtttcgcctcctctccgcaggatgtccgatcccgcccccgccgccgccgcctccaccgccacggccacggccgccgccggctccggcgccgcggcgtccggctccggcgccatcgtgcaccccggaggcggcggcgcgtggccgcgcggcgtccggttcggcgacatggtctggggcaaggtcaagtcccacccgtggtggcccggccacgtctacagcatcaccctcaccagcgacggggaggttcgccggggctaccgcgacggcctcgtcctcgtcgccttcttcggcgactcgagctacggctggttcgagccgcacgagctcctccccttcgaggagcacttccgggagaagttcgcccagccgggtggccgcaacttccccaccgccatcgacgaggccgccgacgaggtcgcccgccgcgccgccctcgcgttcctctgcccctgccaccgccccaacgccgctcgcccccacgagctcgacccgaggtacctcctcgtcgacgtgcctggattcgacaccgacgccgagtaccaccccgagcaggttgccgcggagcgggagaagatcgatccgcgggcgctgctggactacctgaagggtgccgccgtggagcagctggacgccgccgagctgatcggcaagcccaagcggcacatcccggcggtccagatgagctccatgcttgaggcctaccgcctatccagatacgcgctgaaggatcccacctacgcccaagctttcgggatggactacgacgaggcgcaagcggcgaaaacagcgttggagaagaaagctcgagaaggtatactcactcgcatgcccaatcctattaatccttttagctgcgctgtatgctactatgctattgtttctgctgctatgtactcaaacatgctcgttaagctaaccgtaataccattgctgagatatagattgaagtttgattcctttgttctgaatagaagtgtagatctggttcaattagttttctgtttcatatttttgttgatctgtctgttgcatgattgttgtttcattggggttgatgtggtttgtcacacgattattatagaattgattcaaaatgaagtaaaatttgacagatgcattgcagcaaccaatcttgagttgtcgtagattcatgggtattgccatgatctccaatttgatatcttattttttccaaacaattactaagggtacaatgagaacttatttccccactaccttgtaggaatatttttttataaaaaagattagggcctgttattattcgattgtgattttgttttgtcatgcttttattcatatatctcaattagagatttacgtgctacttagtacttgctgcagtttataggccaggcctcagttcctaacttgctatatgtttggaaatcgtgaggtcctctcttttcctaacatttatgcatcatttttctgttcattgcccatgcacttcagattgtatgcttgctgtttgttttttttttcatccctatagtttggcatttagacatgtgcaagcagtgcacaacacaacatttgttggttaagcgtaactaaagtcatgcatcataaaggactactataaatattggttaatgtacctgataaaacagagttatgagaagtgaatgtgattgggtttctcatctgcataacatgttttgttctggatgcactattccttgttcattgatgaagcaggctctgaggtaaggtggttgagttcacctttacattgtgaaggaaggcaccaagttaagatacgtatgactacaacatttgttagccgtgcttgttggttattatatttattaaacatgtataaaatgtatgaacattaactacgtataagtttctttgctgttattttagatgcatctagctgaaccattcggaagcggtaaatatgattaggatttctgttctttatgaaaaagggtaattctcaagatttgcgcataacataacaatcacaagaaaggaaatcatataattatgtatcgtcaacctaaaaaatatataaacgaagcattctttgcagactccaagtttataagtctgagagatccatgcctggagtaaagcaaggtgcatctagcttgcactaggatcagaggttccaacaccatcaaatagtgagggtactgaaagggggatcaatcttttgcctctcctgtccatgttcttgaccaccactagtgtgtttaagttgctccttcggttagaagcccccctccattcttcccgtgatcacaaatccttcatattggaattgtctcttcatattaccttctgctgctgctgtcctgttccagtgatttacttcccttctcgtccttttcttaactcgactagttcctttcttaagatgatgccttcagctattgctgctgctgctgctgctgctgctgctgtccaattcctggaattaacttctcttctcgttcttttgttaacaaaacttgttcctagaatcaatgctagttcctttctgaaaatgatgcctccagcaactttgctttgccttcagagttcgtagcggttatcataggttccttttgcacagaacagaatgattagggaaacactagagccttcagttcagtttagtttagtttattactctttccatccgaaaatataagatgttaggactggatgggagacatcctattactatgaatttgaacatgatgtttagattcacagtgctatgatgtgctccatctgatcctagtaccttatattttgggacgggggagtactacactagagccttttagtttagtttatttttgaaaagctaatcacagtgcacaaaaaaactgaacctctccggttgccaccaagaaatagctccccgcggttttgcttgttctaggcgatgcttcttcctgcccggacaaattctcctctttcctaggaaaaagcaaagattccatgaattgaatatatagacaccccttaggttgaaattcatccgaaattcgaaacgaatccacataagattatttcagtaaatggacatgaataacattaaattacaaattccacctgaattctccatcactctcttttggcgagatggtgataccgagtcacatggaagcttggaaagacgtggagagccaatgggggttggagaggcatcacagaatatgctcctcctccgttagatatttggtggccgatgagcgagacagacgccagcatttgtgccgtccaggagcaaagcactggtgaattttgtcctgccgtgtcagtcggactgtcaccctgtcttggcttaaataaaaaagctcttgaagcattaaacccccaaaatggatcaaccaatccttgcctctctactctttagcctttccaattttctgcgttagataatgatcaattgacaaagaagaaagttaaaggagctcattggctctctctggagctatttttcaactagacataataattcatggaagggaatgaagggatttcccttcaagaagaagatctcactttgcatggcaaatgagaccaaaggcgaatctcttcctgccacaaacaaatcccaagaccaagaatataggtgacggtcacgtagtagtagcagcattggtagtggtcgtacgtcattacttgcaatttgcatgtgcgtccacgtatgtaggcacattttcttttttttaaaaaaaaaattctgatacattgtgttcgctcgagagagaaagagaagccactacatactcaattcgtttcaaaataagttaacctagcacattatgtgactatcctatttaaattttaaaataaattaacctaatacagtatgtgacatattctatttaaatttatagtattaggatatgtcacattctgtattattgttttgggatagagggagtataatatttttcttttcgccatagaaaaaaaatcactgtttctttggttggatattaacctggcccaaagagagaatcccaggagaagcagagtcgccagcactcaccttttgcatccaccgacacggatggacggctaggatggatctaccgacggtctggattgcgcgctggaagagtcacccatctatcctcgccagtcgctgattctttttttaatttttggcattgctacactttctttctttctttctttctttttgcaaggtcttttttgtgtgtcatacacattgatttgtcaaggagatgagtaacaaataaatataaataaaaagaaaaaaaatcaggatgcatttccctttactactctccagctcgtgctttctcatcattcttcttttttcccccaagagtgaattgcacttgcacgtgttctgttacacagtatcagtgaaaggcttaatttttttttctttttgttgagacatgtggcagtcaaagccttcataaacgaacgaaatgtcatgatgtttttttaaatctctctaggcaagagacgtgtttggtgggaccggaaaacacaggaggaaccccaggatgatcagggcgagtcttcaaatacaactcctgcaggtattgtactgtacagtatatatacgactgtacatattcttctcatttttattatacttgtattattttgtattttacatttttcttccttccaaaaatccaatttctttcaaaacaaaaaaaaaccccgactattttaactcaatcacaatatcattagttaaattagtttattgttgttttatatatttcaaatacaacttctgcaggattgtaatgtacagtatatacgagtacatatattcttttcatttttattatactagtatagtactttgcattttcttccaaaaatcctatttctttcaaatccaaaaacactcgtctattttaatgttgatataatttccactagctcaatcacaatatttaaattagtttattgttgttttatatttcatatatataaaaatggaaaaccatttgcgttgacttggtcttgatgtgtggctacgatgcgtttgcaggtcgtccggcgaagggccgcaagaaggcggcggagaatcccggcggccgccgccggaagggcagcgcggccagcacggcggcgaggctcatggagaagatcatgcccagcgcggcggcgatgaagcccagggccaagaagaaggaccagtacctgctcaagcgccgcgacgacgcgcgcgccccgccgccgccgtccatgccggacgccttcccggcggcgcccatggcccccgctctcgacgacgtcccgccggggttcccttccgatcccccgacgccgccgctccccagcagcaccctcgccgccgacgaggagttcttgctgcagaggcgcactccaccgccgctgctgtccgcgccacccaccccgctcgcgcttcctcccgccgccgccgggcaggtcggcgacggcggcgcgcccacggacgccgccaccgccgccgcggcgccgaagaaggcgaccaagccgaagaaggcagccgcccgcaagcgcgagcgcgaggaacccgctgacgccgccgccgctgccgccgcaggcggcgttgccggcgagcctaagaagaagaaaaagaagaagctcgccgagctcaacggcgtggcggtcgccgccgccggcaagccggggttattgcctgctaaggtagaccatgatctgaagcaggtaatatccgagcttcaaagccttcctctcgttgcctcctatgtcgccggccgccgcagcatctctgacgaagctcgctccttcctcctcgccttccgctccaagtctttcaagaagagccatgagaacgatccacccgaggacaacaaggcctctaagcccaatgccgccaccgccgccgacggccagaagccgccggcgaagaagaagccggccgcgaggcccggcgacaccaccgccgcctccgccaaggttgccggcgtcaagcgcgccccgtctgatcgccaggaggagcttgccaccaagaagaaagccaagctcaacaagatcaagacgctcgccactgacaagaaggccgccggtctggagctcgccgccgcggcgcctgcggcggcgaggaagaatgatgcgatcgctgccaggaagaaggagaagg

SEQ ID NO: 8583 - DNA, 57600 bp, Oryza sativa
  unsure (1)..(57600): unsure at all n locations
agagaaaccaaagggtgacaagaagagcaagaagaagaaaactttggggaagggtacttctgctgtactgatgttgcttagggaccttgtgaccaacggaaaggaggttctttcggtgaattctgcactacttgcagagtggggaaccgagctctcactgttgtttgatccaaagtgtcccagattggtgtcccttgtggacaaggtgaaggagattgttgagaccaatgaagtgaggagattgcctaaaattcccaaggtaagaattatgtaatttgcataaggtgttccatttacatttccttgtttggcttaatctctatgctccaattgcttgaaataaggtttcagaagcatctttttagccagagtgccagactggtatgatttcacccttttacgatgcctgatgcttttctttaatcttgttagggaacacgtgactttgggaaagagcaaatggccataagggagcatgccttctcaataataacaggtgtattcaagatgcacggtgccgtttcacttgatacacctgtatttgagctgagagaaacacttatgggcaaatatggtgaagactcaaagttgatttatgaccttgctgatcaggtattattttcagtcccgctgtacactttaggtcggtaggtgggttaaattttgcactgagcctcaatttatgctggtttttgacttattttcataacattcttgatttgatcagtatttgtgggcatgctacattcagctgctcgattattcatttctttgcattattttccatagcttgtgtgctcacagtcatgatttgatctttacaccaaataatctgcagggtggagagctttgctctttgcggtatgatctgactgttccatttgcccgatatgttgctatgaataacataagttcattgaagagataccagatagctaaagtatacaggagagataacccgtccaagggaagatatcgagaattctaccaatgcgactttgacatagctggagtatatgaaacaatggaaccagattttgaagttatcaaagttttaactgagttgttggatcagttggatataggcacgtatgagataaaactaaaccacagaaagttgcttgatggaatgttagagatctgtggtgtgcctcctgaaaagttcagaacggtttgctcaagcattgacaagctagacaagcaaacatttgaacaagtgaaaaaggaactggtaagtatccaaactaacatgttatggttcgtttatttgatgttactgacttgatcatggccctaactgtttgtcgtgttgacttaggtggacgagaagggcatatctaatgaaactgcggataagattggtgatttagtgaaaactaggggaccaccgctggaagttttgctggaattgagaaaggaaggtagcaagtttatggggaacgctgggtctgttactgcactaaatgagctggagatactattcaaagctctagataaagcaaatgcaataggcaagattgtttttgatttaagccttgctagaggccttgattactacactggtgtgatatatgaagctgtgttcaagggcaccactcaggttagataatttttattcatctctgcacctcatttttaaactggttagtgttttcagttagcccatcattttgtttattcaattgcacacttgataaactggaaatcgttctatatcccttctgttcttatcattcttataattggaaaggatgtcctcgattaccttttttttttctaattgcgtagtctttagtagttgattacaatttaccaggcactggtttatatctgaaaatcttccactttatttgtcatctgaacttatttaacacctttctctgaccgattgaattatagttgcttcctgcttcctgaactaaccctatttcccaacaggttggctccattgctgctggaggcaggtatgacaaccttgttggtatgtttagtgggaagcaagtccctgccgttggtgttagccttggaatagaaagagttttcgcaatcatggagcaacaggagatggaaaagaatcaggtacctaatgctcctatcacctattcattctttgaatgagttgcaataacataacaaaatcgttcctgagttgcagatccgggccaccgagacggaggtattggtgtcgattatcggcaaggacctcatattggccgctgagcttgttagtgaactgtggaatgctgggataaaggcagagttcaaactcactactaggatacagaaccacttgaagtacgcgacgcaatctggcattccgtggatggtgctggttggtgagtctgaaataagcagtggaaaggtgaagctgaagaacttggcagccagccaggaagaggaggttgacaggacagagtttgctcaggtgttgaaacagaaattgagaaacccatagagaagatttttagaatataattttgtagttcatgtttcaacttgtgatgcatcatacttgcctgtgtgagttcctggaaaattccgttcggcgttttgatttatactggctgtttgaattggtttacatgttaaagcgcttggtgtaattgaatcaaattaccaaattcaaaacattactctactgattggtgaccaactcatagtgaccatgcacattattttcgcatttatcagacaaacatcagctactacctactgattgatgacagacaaacttattcttattattctcgaaataaccgtcacacaacaaaaatgagaacgaatttgtccagaaatgcactcaattacaacatcatccttgcagttacagcatacaagatggaaactttactgaactataccacgtttcgctccatccaccgtgttcttcagcaacatcgccaccgtcatggggccaacgccacctgggactggagtcaggtgaccagcaaccttgctcacctctgcgaaatccacatcgccgacgagtctgtaccccgatttcctggttgggtcactgatggagttcgtcccaacgtcgatgacagcagcgcctggtttgatccagtctcctttgatctggcaaccaagaaatctgcagttagaactgggcagtggattgtgatgaaccatgtcataatttggtggtagaacaatgtaccatcatagcctggccagccgctgcaatgacaatgtctgcttcacggacaatactttcagggtttggggtccgggagtgaacaatggatacggtcgcatccgccttcagaagaagcagggatacaggtagcccgacaatgttgctgcggccaaccacgaccgctcgcttcccattgatggtaactccgctccgtgttaggagctccatgcatcccttcaatgaaaatcaaaacatcaaaactgcaaacgaaaactgcagcagcagtcatattctagcattctgttgtagtgtttccataccttcggcgtgcatggtaggaacagtgggtctctgcctttcattgcaagcttgccaatattcagaggatggaacccatcaacatctttctctaagctgatctcgttcaatatcttttcctcattaatatgctttggcaatggaagctggacaagtatgcctgttatgacagcacaagttcattgtcaaatacttgtgattgcatcagaattcagatccatatagatgtagtcatatacctccaatcaatacctcaacattaggcagaggcaaaatctgaagttacagtgctgtttcagactaactctagcttgtacattattaaatggacattaaatctagagttaattgtgtttacctgacatccacgtggttaggaaaatataaatcacactttttgtagacaagctaatagattatatctaagccacttctaagccccaatttttttactacaacatccatcttgcatatgaaacagataaagtcagtccttaagcatgagcaagaaaaataggaactactttgtcgaatagcatgaggagataattacaagtttagcagatatagatcaaaaggacaagctcctgtaatcaactaggcaacatatcttatgtaatctttcaacttcaaatgcctgtatcccgatatccattcaagagcagacttcaaaagatcacacaaatttttcagtccagatgtcaagcaacagaggactggaattgcagtgtgaatctcacgattaagtaccaaccccacattgtagagattggagatatccttaaatagccttttcagtttcagatccaaatagtgaatataaacacataccttaaatccttcaataacccccaaacacatatcaccctgactaccgatgttccgattcgaagacaagatcaagtcaactccaccgtagagctcatgccaaggtaccccaaatcattacagcatcactatgattaccttagattccacctaagcctaatctaaaatcatctccacatctatcccactaaccaggtagtactaattacactagaatgaatggggattattgttcttgtagtaagaacggatggattagatataccatggacggctgggtcggcgttgaggcggtggacctcggcgacgagcgccgcctcggagatgtcctcggcgaggtcgacgtcgacggagcggatgccgacctcggcgcacgccttgcgcttcatctgcacgtacgtctgcgagtccttcctgctccccacgatcaccaccgccagcccgggcacctgccaagaaacactcaagctctcatcatctccaacctatccgccgccgcagccggcgagtgagtgagtgagtgggtgacttacgaggttgtgggcggaggagagggcggcgacgtcggcggcgacctcgcggcggatgtcggcggcgaccgccttcccgtcgatgatctgcgccattgggggtgagacgagattctttttttttttttcttttcgtcgtcgcgattgttggtgagaggtgagtggcggcgacgaggcgacggcgacgggcggcgaggtgggtggattggaggggaagcggcggatgtgggttaggtgactgggctcatgggccccacttgggtggggacggggagcgttttgggccttgggccggacgggccctacttagggaatggggtgggggagcgtttgggacttgggcctgatgggccctacttgggtggggatgggaagggtgtaagccttgggccgtatgggtcccacttgggtgggggacggaaaggttttgggccttgggctggatgggatttgtggaggaatagccgaataggtggatgaatttatgggccggaccgcttttccgatagttttggtttacagctgatgtaaaagctttacttctgacaatgtatttaggcataatctatatttagattcgtagtcaagattctggaatttagtttgttttttcatgctttcaaattggagaattttttttcaaagacctttgataaaatttggagggttgagttccattgaatataagtttgtgagccttttgttttcttttcaccaaatttgtgaatcttttttattatacccggtccttaataactcggtgagtaatccctaagttctatatataagttattttggatttgttctaagttaaaaaaaaaataggtttgattaagtttgtagaaaaatgtagtgacatttacaacattaaataagcttttgaatatatttttatagtatatatatatatatatatatatatatatatatatatatatatatatatatattgtgttggatatattgtagccctttggtttaaaatatttgatgctgttgacttttggtcatccaatttattagaaattctatgcaagcaaatatatatgtcatgcttaaagtgtctttaatgataaaagaaatcaataagtcccaaagtcagtgacaccaaacattaaaattagagggaatactttttcctacagagttagttgaacttagataagtttgacttagtacaaatctaaaataactagagagagtgtatgaaagaataaagttattcttttcttgtggataagaagccttcgtaccttaattgaggaaaaattggaatttttttctttagatatttgaccaaataggatcgtccaatttctatagagcttatcactaaaatacccgataaggctaagcggaatgaaaaggattttatctgagattgtagatgaaaacgagtagccccatacgaggtttgggaataagtgatgaacaaggaatatacatctttctactaaagaggttttattaaactcataactcattagatcattcttatcaatgttaactaggtagttgcgctgccgggctatgtatatccattgtggatgtagaggccggattttaatccattttcttaaaaaaaaaaaaaaggtagttgcgttgccacagctgacagctacaaataatggacagagtgtttaattggtatcaactttttcaagttttggtcagacatttccctactgagcactagcattgagcagtgaacagaagcaactgaacacttggccattgttgatgaccatggatttcttgtctcgagcaaccggccactgccggcttaaaccggcctgcaacccactggtcccggctatatgcttaatcttgcactagcagctggatttcttttacatagttctaggctcttatgtacatccttttgaggtcaggtttttaatccattatctgaaaaataagacttatgttggatgcatgtgtgatgatataattaatcaatggtgggtctgcaacctgttaagaacctaaaattcccttcccttgaaactttttttttaaaaaaaaaggatacatgagaacactaactcttaacttaacctgtagaatagaagcccttctatatctaaagtggatgtacacaaccaaagaaacctaattcctatgtatagttaatccatctatattttggtatattttttgtcactttgttgcaagatgacacaacaacaattcagaaagaattattcggttcccctacgtcgaccagcacctaaccaatttgatccaacatttcagagcatcattaccacagttcattatattgtgatacgatatgtatcgatgttgattgatatcaagaagtagagttatatcgctgtttgggatgaggtacagaaaaataacttctgattaacactaaaatatacctttatatcttgtacctcccaagatcgtaaaagaagtcatgttacttattgctagccaatgcttttttatcttaaaaaaggtgagtggaagctatatcccaattgtgtagatctcaagtctcaactctttttcatcatgttgtcacatcagatggctagcaatagtgtatcttcttggcatatcacagtggtccatggatggagctatccctctgcaatctccattgctgaagaggcaatgatacaatggatattttggaatgtaccaatccaattgatcattctagagagagaaatagagagagggggatgtgattctctctcattcttctatgtggttgatgggtagagggagagaagatgctacaaaaatgtaccaaaattcagtgagactgcctagggagggatcgatttttcggcatcaccagtgttaggggggaataatagcatggagaatcaagccacccaatgtatatatcttcaccatatgccttttagttttttttcactttctagatagtgctagagggatcacatggagatctaacacaagatttggacctgtatgaagatcagattaggtacacttctttttcattatgataatcaactactgcagggaaaaccggaggagggtccatcagggttttcaattttgaaatttctttattttctgaggggggccgaaattttggattttttggctgaaattatttgaaattttgactgattttgaatgaatttgaataaaatttgaccaaatttgcaaaaaaaaaaggggaaaattttgggtgagatatgagcttgccagtgggagacgaaatttcagaaatttcaaaacgaaatttcaaaccctagggtccatcaatgattattactaccttgttagacgttccacactcaaaataaagtgatgggggtagtatttctttaaagtggagatcatgaaaggggttaataattatttcatttccttattacccgaatattgagctaaaatttctgcagaggaatatcgctgaagaactgaagatgatctagctcgctcatgaataaatttgcatatttttttagaggacagcgcaatacctaatatatcacccacacatatactccttttttttttctctcttttgtatttttgtttaacttgagaatatgtcgataattgaaccttgagatgccgcagttttcagataaaagagaagaggaggcatgaaaagggtctctcctatcagaatcagcctatggagataagtttgagagggaaagaaagaaataaaggttccctttgcttgtattgacatcaaagaggctgaggtcaactaggcatcaaaaaaattggccaggaacaaaaacaaggtacatccatgtatctggccatgtaaaacacccaatgcattgcatgaaagaatgcacggtgagagcatttgtggcaatgtgcatgacatatgattgaaagcaaattgctagctgcaggattattcagataagtctttgcaatctcaggctatagctgctccatccataacctcactgaaaaaaagttactagagaagcaaagagaaaagggggagcaaaagaggggagataagtgacatcaaatcatgccttgttctgatcagtgagtgatccaaggagacggcataagtttgtttcctcatcagataatattgctctgtgcatggctttccctgcagtgcattgtttgagcacagttatgcttgtcatggtgtcatgttacatacattgtatcaatcaggggattctctacttttgcagggaagcatttcggtgtgccgtgccctggctacaatgccgacatttaattataaacatgcatggtacaaacgcacccatatacatcctattcctatgagcatctccgaaaaattggaccgatatatcttgagattgacgaagtcactacgggtgcctcgctgctgacggatacgtcacctaccactgaaagaataattagccgtaaatacgagcacccgtgtcaagtctgaacttgaacctgggtggattggttacaccactaaaaaactaactagttgagttatgcttactccgcacattcttgacggtttgatcaaatctaggtatttttttacctatttggaatatataaattctacaaaataatttatttatcgtgatatttttttaaaaaaaataagttgcaaaggatagattaacatgatcaagcttttctcttggtccaaaacccatggcactgatgcatacccaatgtttttgcattgtgttcccttttttaaaaaataaatccctgtcttgtggtatgtttgtgcatggaaggtttatacctagtgttcctttttgcagatataaatccctatgttgaggtatgtttctgcagggaaaggtttatgtcttgtgttcctttttgcggatatgaatcccgatgttgatttgtaacagtaaggtttgctctctccgtttatttttccaaagaatattaggaaatgcaatcatatttacatggaatcactggccaactaatcattttatttcctcctttttggggcaatgagctttgctaattgttataatgccatgttcctctacttgtcttgtgtttggtcaaatggctagtcaagttcaagcatacaatatttagtaggtggttagagaacaattaaagttaagaatcctttcaaaggaaagcaagaaacaaaggacaaagagagtgtaccctctcatggagaagtgttccattctttggtataaaaatttgagatctccagtgtaccaccatggcattatattgtgatcttcctctgttgtttgttactggtgttgctcttgtggaagaacattggtaactgatgtggacaaatcttctccttgttgctttctcttctaaaggaatcttaccaactttctcaacgttgggttgtgcagttaaagctagctggactcaaagtagagcccattgaaatttaatttttctctgaaaaaaagagaggcatttattatgctggtatgtttgctaaacatgaaaactactcccaccgtttcaaaatgtagaaacttctagcatttaaatcttgttccagaatataagaatttctagtaatattcgtagtattacttatcaaatcaattacctcccactcaaagttgctcttattttacccacaattattctcaccttcacacatccttatttattgagtactaaagtattttcttttcaaccttaatctgtactaaacaatttaatctctactccctccgtctcagaatgtaaaactttctagcattgtcatatttatatagatgttaatgaatctagactcacatgatttataccattgtctacattcatatagatattaatggatcgcattgtctacattcatatagatattaatgaatctagacacacatgatttctagcattgcccatattcatatatatagatgttaatgaatctagacacacatgtctagatttattaacatctatatgaatgtgggtaatgctaaaaagtcttacatcgtaaaacggagggagtactaaacaacctataagtactaatattttggaacggagttacccctttcacagaaattaaatagaaaaacaacatataatttgctttaaccatatttagaccctagctataatacgatgtatttttttatataaaagaatattatacaaaaaattctcgcattccaaacagggacggagggccgctatctcgaactgtggtatatcaataattcagctttcttccccagcttagttccatgaagatcttatgggctttgattttgattaaacaagtgaagttggagttaggtcctacctgttgattctgcattagcgttcctctcacattgtttaatttgcatctccaatcaatccattcttttaaggtttatttatagtgtccgttctaatcacgtagattgagcccgtacaaatgttgtttatttttctcttctcaaagtaatccatgcatatctttaaaaggtttgtattggtttctctgtccaaattaaaaatggtgattttgattagctgctcgaagtccattagtggttgcaaaagttcctttccaagccaccacttttatgctaatataattaaaatctaagttgatgattttttttattgcacggtagacgtgcaagcatacccctcattttactaaattcattttgaaaacttatttatgtatggataatattcatgagtatctagatttgaaacccggtgagtggagtcatacatcatgactccaccaccaccatatcaatagtgcttcacaaattatgatgatttattattctttcatgttctccaactttactgaaatattgcaacatgaaaagaattttgcagtttgactgaaatattgagccccaaaatatagttcaaattgagatcatttaggcttgtgctcaaggttaggtcaaatacccctctttgagttgccctcaagttgagacatggcacacatatttacatcaaaattcttgtgtcctctgattgcaatgacattctattttagaggaatataatgtaatattatttcttggggctgctctcagtagagcagacggcagcagttgacattcttgttgtatctatcaaaatatattctagaaaatagaatataccattttttcccttcaatttaaggcagttattcttacaagttgccaataattgaaacagcataaattgcatatccattcaatggtaaaatctcttaggccctgtttgattcagcttaggattattataatctggattattagaagtaaactgaaacaaacaaatagattattatgatagattattataatctataagccagattactataatctaataatcttctctagaggagcttttttcagattattgggtggctaaagacccactacccttagatatctccaataatccagagaaacaaatagctcgcagcttattctatttcaacttattataatacagcttagagtaatctgatttaataatctagtttataataattttaagctgaaacaaacaaaaccttagttttttttttctcatttggagtttatacatttcctttccttggcaaaacaaggtttctgaaacataaagcaaagtgatcaattaagcatggtttcttaattatatcgaaatttgatggtgcaatgaaggttgacactcttagttccacttactatgaccactcaattattttcagctacattatcactacaatatatacatcaggacatccaaattaatttttttttgtccaatacaaaaaaggctccagcttataaatataagtccctggatggatggctacaatgtgagaatatttgtagcaaatgctgcttaattaacacaattaagcactccattaattaactcagtaattaattaactaattaatcaactaatcgatccccctctcacatgacgctgcatgcgttggcgttctcctcgctgaacatgtagtacgacgacgccggcggcggcgccgccgccgccgtcgagtagaggtagccgccaccgccgccgccgccgaaaccgccggccatcgggtagtagtaggcgctgctccggagcgggtgcgccgtgctgtagctcatgacgtacggcggcatgtgcccgccgccgccgccgccgtagtaggacgccgggtagctcatcggcgtcgccggcgggtagaagacgccgccgtcgacgacggcgagaggacccgcgttgccgggggacggtttcgtcggcgcgtcctgcgggcttgcctccactactgcaccggcgccgtctccggtggcattggcggcggcggcggcggcattgccgttgccgttgccattgccgccaccgccaccgccaccgcctttctttcctttcttttcgccaccgccgccgcctcctcctccaccgccattgccattgccgggaggtgcaacgggctgcttaccgtgcggcgtcatggcgaacggcggcgccaccgcaccggcgccgccgccttgcccgtctccggccaccatcgtcttcggggatccaccaccaccgccctgcttgttgccctcgtcatcggacgcctcatcacacgagcccccatggtcgtcattctccggagggacagagccacctccaccgccgccgccggcggccacctccgccgtcgcagcaggcggcgccggctcgccgggctggccgttcgcaggattcttgttcttgttcttattctttttcttcttcttgccgccgccgccaccgccgggagagttggccgccgctgctgccgccggcggcggcggagcgggctccggccatggctcggcgtgcttacccgtcttgacgagcttcttgacgagcgtgtcgacggagacattgccgatgaccaccaccttctgatgctgcacgtctatgtccgtcttgtacacccctgaaaatgttgacgatcaaatgtacaagtgcaaccaaatcagtacatatttgtttcaaatcagtataaatttcactggtttttttaatataaatttgctcaaaaagcattgtgctaacatttcgattcagataatgtaagcattgtatgaccattatgttgcagctaaatttgagacagggagcagagttttgtggtgagtttcagagtatggttgtaataggaaacaggggatgaacataaaagaaattaattttctgaagataaacagtgcaggtctgcaggattgcaaataaaatgatatccttgatgagattcttcttccgtacatgtatcattagcttgatagtaaccgaactgtttgaaatttaataggagtactgtccatgggtaaaagtaaacatgcaaaaataattgtaagaactgaaacacttctctataataggaacatcaggagctatatatgcttatcaaggagcataaatgaaagttttgaaggtgtaattttctcacttcagttctgtgatttcctcacttcaaaaaaaaaagagagagagaggaatctttcatgattttttttttgttgctacaactctaaaatagagaacatttttttgacgatcaacaaaaaaaatgcagttgtatgaagtcattctcttatgtccttcaaaatgttctgataagatgtggtaataactaaaagatttcttcaaagttgtgttttgtttttactccatctataccttctatgctatgtagcaccttcttgaccttcttcttgcagccctcacagtggatgctaaccttcaaagccaaagtctggaggagaaaaaaaggaggaaaaagagcacaaaccaaagacaaaaagaacaccatcagcatcttcctacaagcagaagaatgaccagtagctctgcatatctgccaacaagattgcaagaaccctaaactgcttacctgatacttgagtggctctggaccttcttcagcagctgccatggctggagacagagagagaaagagaagtctgagagagatgatgacagaagtgaggagaagagagaatataatgttgtgctagtgtctagtattggtgcaagtatttgagggagtgaaaggggtcaccaagaagagagagagagagagagagagagagagagagagagagagagagagagagaggggggggcagaacaaagtggcaatgtttggccctgaggagggacatgactaaatagcatcagagagcaaaagggaacaattctattggttttcttttgtattcttttctttttctctttttgttttttgggaggagggaatggtattgatgaggtatttattccccacatctccagatgcccaagaaaatgcattcacaacaataactagccttttatcttctcactctcctggttttgtttgaatgttcaaggtactcgcattttcttttttgcgaccctgtttggaacgcatgaattttcgcaggaaacagttctcaattcatgtgtttcaaatagatctgaaggacacatcttactccaaccggtcgtaaatatttgatgcttagcaaaagattcaatcaaccttttaaaattctgaccatcaatagtttctcaaatatgcttagtttgaaaacaaaagaaatgatttatgtagatttacctcgaaaagtactatttaaatatcataaatttattctaatataaaattaatggtcggaattctaaaatatatatgatcagagggaaactatgagtacacagctacatgcagcgaccattttatctattgtctaaaaatgtattccctccggattgataatacttgtcgttatagataaggacacaatctccaaaaagtaactttaacaactattgtctattataatttatatagaaatattaacaaatatatgattttgttgaagtactttttaagactaatctatacatatggttttcatatttctaagataaatattttaaatatttatagttaaaaattctaaagtttgcttcacccttgtccaaaacgactaatattatcagtccgaagggagtaatcaaacggaatttctacatgcttttcatcgagaaaaagcacagaagatgtatatgcatgggggttgcacttgcaacccagcagcatcacatgcaaagtccataatttgccacacctacatgagaaaaaaggggatgtactatgaactgctatcgcctcgggaattgagggcaatgataagacagacagcagaggaaggccctcccctgtcttctatgctagtactccactccagtatgcaaacctggaagagaatcatattcatcaccttcacatcctcctgctatctatacggatatgcaattatgcacaaaccatgtcagtgaatgattctctcaagatagctgatgtaaacaagcgcgcaaacacacacatttctttgcattgtgaagattcttttttcttacctgctgaagcatggctcgttccagtggattggatgcatcctagagctcttcagattgtgcctgaatgttgatgacaaactgaatttttctctctgtcaagaagatccatacaatgagttttatgaccataatactcaatcttcagaatgcagctgagaggtgatgaactgttcaaagctcacttttgcagttctgaagaatcagaagttcagaacccaatcgtcaagagtgtgcctgaatgttcaaggcacactgagcttttctctgtttttttttcaggaagatccatacaaaccatacacattgtgaccatgacactcaatcttcaggttgcagctgagatctgatgctgctctgcaaattccaactagatgtgatgcaaaaccatctaccttgcaattctgaagaatcagaaagttcagagtccccaatgctcaatgacaccatcatccccgccgggatttcagcaatgccatgaagcaccggagtttcctatccaagaacggcggtgtctaccttgtctgctcctccggccggaccggagctgccgccgccgccgccgccggctgatcgccaccagcgggagcggcggcggctttgcctctccctgcacctccgaaacgccggagttgggatcgatacgaagcacatagcggaggcgccgcagagaacggcaggccacctcgccgcagctgagcggcggccgcccttctccggcggcggcggcgccgtctacggcggagacgacgtggcacgtcgtccaccgtccgatcaggcgcctacggcccagatgaatccgcgagatccctcgagggcaccctgagccactgacagcgtgggcccacatgtcagcgacagaatcgcggggtttcttcctccttttccctcgcgcgattcgaaaccaaaaacgaaaccctcgccgccggggccatcccaatcctcgcggcgagcggcggcggcggcggcggcggcggagggcaaccgattgtggccggtctatcctcgtcggctcgccattccttctcgccgcgccaggttcgatctgaccaattccccaagaatcgttcgacctgaatcgatcgacgccgcgtgttcctgccatttcggcgtgcttgattccctcaaaatggttttggtctagggatcgtgcttagctattggtggcggtgctcctctagcggcgggttctcgacggcagaatagtgcgttgtgagggagcctcggtttagttggttctggggatggaggacggcgccgcggggggcgatgtgtccgccgaccgtgtcatcgctgagttgctcgacatggggttcgagttcgacgagatcagccgagcgatcggtgcagtcggcacgcgctgcgccgatgtgctggagtttatgctgggtggttcaggcaatgggaaaatgaaaaaggcgagtagggaaacacgaagccgtagttgtgtctcatctaatgcagaagcacgcccgagtgatgatgggaacaaattggttaatcctaggaaaagattaaagcaatcgagcattaccgatcatcttgcatcgaataccggctgcagaaggggatcttgtggtgagaaagctagcacgtcatatccctgtttagcggcttccgatgatcctagagcgccagtggcagtcagtgctgatgtgtgttctgcattgaagcctgaatctcaatttttgcttgctaattcaagaagtgagtctgacctcggacacaaaattagtgctgttctgcggaaacactttggattttcctgtgtgaaaggattccaaaaggaagctttggatgcttggtttgctcacaaggattctcttgttctagcagcaacaggctcaggtattctttaaataaatgctttgctctttatctttttgagtaatttgggggcttcctccattgttatgcaactagcagttttgatgtgatggttgagtggctgtgttgccaggaaaatccctttgttttcagatcccggctcttctgactgcaaaggttgtggtagtgatttcaccattgattagtctaatgcacgatcaatgtctaaaacttgcaaagcatgggatatctgcatgctttcttggttcagggcaacctgatagccgtgttgagggcaaagcaatgtctggcatgtataagattatttatgtttgccctgagacagtattaaggtaatcactctgcttttggactgatgatttcctaattacgtattgctgcacttattttgggaacttatttacatgtaggcttatggaaccattgaagaaacttgcagaaaagccagggattgcactttttgctatcgatgaggttcactgtgtttctaaatggggtcatgattttcgaccggactataggtctgctcttgtgttcgatatcctctactgaaggtgcatgtcattgtttacattgttttttctaccacaattagtaaatttatatgtgcaagccttcactgagatgtttttctcttggtactaaaaaactaacatgtgtctgccatactttttaggagaatgccttatattttcttgcagcatcttaaatctctactttattttccacatacaggagattatctgtgcttcgagaaaatttcagtgcaagcaaattgaagttcttggagcatgatattcctttgatggcattgactgctactgctaccatccccgtaagagcagacattatcaagtcgctgaaaatgtcagaagatacagtggtcgtcttgacatcttttttccggcctaatctcagattcagagtaagtcaaacttgaaacttctgaatttgttctgctggtttccatttttatgttctttctagaggatgtgtaaaagcaagtagagaacattacattataatatgctacattaaattgtaaaaagtttaaattatttggcctttctaacagtttagctacatgtaattatgttgaatgaccaatattttattacattttgtaaatagatgcctccttgcaagtagatgggcacctggggtgtgcatttcacttaaaagatgtactacatcaaagatatgaatggttagctttgctagaattgaatctgtattttggactagtatatcatgtgaatttgaaataatcttgtccggggctacacaaacaagtttccaaactgctctattttgttattgcctgatgaattgccttactaaaaattcatagttagatataatttgagaagttttatagaactacctactgtttatcttatgccactgtattaaactgggcttcttagttcttaccctctcccctccccctccctcatgtttctggttgcaggtaaagcacagtaggacctcagtctcagcttacaaaaaggacttcagagaacttgtagtaacatataatgattcaaggaattttagggggaagggacagaaagctcttagtgagatcaaccctgattctgaaagcagttcatatgagtctccggatgatgctatgtcagatgatgaagatgcaaatgttgattccatgagccatgaagataatagttttggaaaaactaaagtcggcatgcccttgataaatgaaaatgctgaaaatgagttggatgtatatccaggagtagatgattttgatggtaatggactattttatatgacttttttcttttgagtggaaattatctgcttgatcctgaaaagaaatactggttacattattttcgaacataaatgtttcacggccaatgcttatgtaaaaaattatcattcttttggggatttaagatcctttgatggaaatcatatgtaagcttaatatggctattggaaattttggaggatatgtggtagcagtgcttttaatttcgtcattttgtaatttcatgtatgtatctgattgacatgcttctcttgtagttacatgcggagagttccttgagtgctcgtggcctgagaactctgcatcttcttctcaatgcaacaaaactggttccagttcctcagaaattgctgatcaaggtcctaccattatttacgtacccaccaggaaacaaactgtggagttagcaaactatttgtgcaaaactggtctcaaagctgcagcatataatgcgaaggtaaatcttctttgattgatttgtgtggcaaatgatacttgatcagtagggcccatttcctgatatatgctaattctctagaagcaatcagcttttttgtaacttacagtacatttgattatatttatttcttaattgctattcacagtcctgtaacttgttttgagctatttgactcttttttcagatgcctaaatcacatttgagacaggtgcatcaacagtttcattgcaatgccttggaggtaataattacttgtttcacttcctagcttatatcttgccactgctaggtgcaatttccatgtgctcatatgatggtatacaaatttagtttgagaaaacagtatgcatgaaaaagtgataatgttagagcaagttacttctctgtagaggcagtcagatgtacttccacagtaacatatttttgtctaggagatcttgaaaatcttgatgtctggtgttgtactgttccatggttacacaagcttacaggttaaccagtgtatttgagttttgagacacttaaaagtttttcaacaatccaacaaggaaactttccacatttctatttgttaatatgatacaatcttggatggatgactgctatggtgactgattttttagaagaatgttgtagaacaaattcattgtgtaccattcaaattcttggttgtaaaagttctctatattttcttcatatctccgtctctttgtgaacccttcaagcctttatcccaactctaatggccttatcctctttatataggttgtggtggctaccatagcatttggcatgggaattgacaaatcaaatgtcaggagaattattcactatggtttcccacaggttggtttaacctttagtgcttcattcacgaaaatacatagaagcctctctaatgctgccaaagacttgctctgactctgatgatggcagacagatttccacacttgaacctgtaggatgccaagctagaatgtaacagtgatggcaattgaaggagatactgtgtgcagtatgaaaattgtaggagttgattatacattttccttcttcttgttgaatggtggagacaatattcaaaaggcttagtgttgggttgcattactgatctgcaacatgcagaaacaatatggcttttgttctctaagaatccagatacatcccaaattggattaatttatgtttatgcttcttttccgtgagttttactggtcagaacttgattgatgcagagtttggaagcatattatcaagaagctggccgtgctggtagagatgggaagttggcggattgcagtgagttgttatactccatagctcatacttgctataattaggaagcttcaattattttcttactacatccaaaagtaagccacgttgtttcgtattataagaaaataacaacttgcagacaagcataatgttacaagtaaaaacttcaattattttcctactacatccaaaagcttcagttataagaaaataacaacttacatccaaaaggcttcgcatgccttatttttattaggaagctgaccgtgctgttagtttagagttttgctgacatcttatcacccatctattccttttcacgctaaaaatctcctgttgttgtcttcttattcaaagtcatcttacaaaccaaaggttgtattaatgttagtattaatgcactacttttatgaataattattaggccttgctttaattttccattcaacgtgtcacttgtttttattttgagatttctatacattttacatgcagctctatattgtaaccttttgagagcaccgacactccttcctaataaaagaagcaaggaacagacaaaagtagcatacagaatgctacgtgattgctttcagtatgtatcgtaaccatatgttcaaattctggtaatgtcgtaatatgtatatttgctaaaatgtttggcaactaaacttgattaatgtttatttatattttctatgttgcagttatgctttgaacacttcaatttgtagagccaaaatattagtaaagtacttcggggaggaatttggtcctgatggatgccgcatgtacttttctctaatttctccatgtctcctctcctttaatgaaataatacatgctcattccagtttcatgtgatgcgaatttcttaatggtatgacagtagtatcacaaatatttaaaagatgttctgtaatattgacatgaggggctgtgggctcacacgttactgcaaaaaatattggtcgttgtggaacttgcatttttaacggctctatttcaaatttatctcatcaagcattttatgagtctaactgacttgtcacctcaggtgtgacatctgtattaatggccctcctcaaatgcatgatttcaaggaagacgcagttatgtttatgagtgtgctccaagctcaaaacgtgagtttataattataaattaccctaaattgtgctgaactgtgatggatgtgatgcccattacaagttgaagtatttttttttctttacaaccttagttatgtgactttgattggtcattttattttgttgcatcctcaagcatatcttaataaatccagggacaagcaacggaagatatgggttgcagcaatataccccgttatatatctggaaggcaaaggtttggggaggttccgaatttcagaggggtggtcagttatataagggaaaaggtttgtgttctcgtgtatttcccatctcctatttatgaaatcgggagcaataagcagggaatttgccttaaggatgcaaaatagattaataaaggttgcatgataggctgatagcaacacaagtatttgaagtatcttttgctcgaccatagctgctgagtagcaatgctaaacctcaaatctgttgtcttgattaaatattgtttatagtttcctagatttgccacaactgacaaggtatggtgggaaggccttgctcgcatattagaaggcaggggatacatacaagaagctgctgaaattgtaagtgatttacttcagtagtttgttgcagatttatagttctttttgttgtgaagctcgtgatgtacctcacacctcagtttatattgttcagatagttgaatgatgggcatactgagatccaagtagggatagtgaatatttctctgacatgagttggacatatgtaatgttaaataatttccttgattaattaagtgaaaatcaattgtatccatataccattaacatgtttaaaagataacccatgaactacatgatttgctttgataaaagaaaatatagcatgcatctctagggactatttggaggattgcatcttccatcatttttctactttagttcagagattgaaatcctaaaggtagcctgttaactatcatggattattgataatcaccaaaactagcttgttactgacatcaaatggacacaaatatcaaccctgaactacattcagttttcagaaaaccaacttgcatgtgttttgttcatttgtaatggataagcccaatctagatataacggttgtatcacatggtcaacaaattcaattcatcagtggatcatctatgtgtatcacaccggtactgcattattgagtcctcattgctttattaaaaggacagataatcctgaatagagccaggacaaaatgagttgctaagaaaaaaaaactgcttatttgtttccaatattatttccgttttatcccccgactgattaatggatccgctttcagcctcgtgttttaatccagtatcctgaggtgacagaggccggactgaactttttgagtatgcaatcagaagaggaaggtttatatgaataccttaatgctgctatgctattggtaatgaatgacccaaaacctatttctacatcttccgagtggggcaggggttgggcagatcctgcgatacgccgccagcgtctagcaggcaagaaaatggggagaagaaaaggaaagaggcattctcggagccactctacaggtttcaccactgcaagacagagattagctgaaatactctcaaaacgcagaagataatacagaaactattgagatgctgggatagcgggatgaaaattattcatctaagcctgttactacttgtttggttttagcttgatttacacagcttctgtggttatttgctgcaatttcctttgtggcgtatgaattttttttctcaagggaacaatatgaagtaaaaaaatgatggggattattgtatagcactgttttggctacccatctgaacattgacactccatctgaacaagaatttcctgatgtgattttaaggaggtacagttccgttcccagatattattgcccaaggctgattcatctgaacagtgatggcatcacatcagttttcacatcaaatccccgtagggttttgtcaacaatgttcactctcacttgtgatcttttcaaccaacaggtggatctgtgtggatcctggagtgccaaactggaacttgtttttcccaatggatggtccagttaactccaagtgttaggaagatatatctgacaaggtgattgtgttgtatactgttttcatactgttcacttgcctgaaatgaaaaattgtttggcgcagagctgctaaaccctacctcgtggcagtaatgcaattttttaatcctgccgacgagtgacacgagtacgattctggcactgtggtgttttgtttttctctccttttttcgacatggcaattggcactgccacggagtatggtctcacagtgttaaagatgcatacggaatataggagtagagctttgttatagaatctaattaaactaagagtaaattatactcacggtactaggtgggtgcaatgaaaagcctgagaatgaaacagtgtaataacttgacaagtgggtgtgctctgatacaagaacttgagaatgtaacgtctaagtgcaataacctaacaagcgggtgcagttcaatataagaatttgataatttagtattttggtgcaataagttggcataggtatgtactactttgattaagagtgctatgtaagttgtttcacgatatcaatatgtcattacatagcaatgttttggatattatcattgatttaatctgcaagaattatgttcatccatttttagagtcgctcatccaattttcaccatcggttttgaattttttttttaatcttccaccatctcaacttaaaaaatttctacacaataaattttgattgacaaataagcatgcttatacaaatctgtataagtaaattaacaaaacaagtacttagaaactgaatgcgtatagccgaaaaatcttatgttattgtaccaaaattacgcgcacctttcaaattgttttacccatacgttcacttattaagttcttgtatagattgcatccgcttaacaagttgttatacatgctcatttctcaagtttttacattaaattacttccacatgctaagttgattatcgggaatgcaatttatcttgacgtggtagtgttattcttgcatgtaaagttcaaatatgaacttacatgacatatggactttgtttaaaaatagaagtctttaacactgatgtactgtactaaatttatgtgaagaaccaaaaacgtaaagcatttgcttccaccttactacacaataccagttttgatctcgaggtataaaagctttgaccaatactcctactatttttcagagtactcaattgtgaatcatgaaagtagtactcctatcatttgattcccaatcaaaagcacttcactatatccattcgtttagcattttgcttacctttcatggtcgaaatttgatccatagctctcagtcaaatacatttacacaacaattacgaccaaaacttgaattttaaaacttaatgttaaaactgattctgagatccctgcattagcttctaaaatgaaaataatacatatataaagctttattcataaattattattaaatttaaactttttggtaaaaatttatcaatataaaattttactttgttcatttttttttacccaaccaatcagacactaccacatcccctagctgcttggaagcacgttactacacggacgcggaaaaaaaaaggaaaaaaaaaggtgcatgtgcatcagcattattaaattcactgtaccctctccaaactccaaaggccatcacgcatcaccaccttacgtatatcggtaccttttatttaatcgttcccaaaaaaaaattagaaatttagaagaaagaaagtgaaaaaaaaaagctggacaagtcgatgatgttttcgtgaaggcaggcctgaaaaaggagccgggcccacagtgtcagaccaaagagaggagaaaaataaaaaaaagcaagaaacacaagcctggggcagtgacgtcacccaggggtgttttggtaattttaccgtgcaaatgatttggtcaatcggatctggacatccgggcccacctcctacctcccatcatgcactcctctccctttttattttcccctcattttttaaatcttttttaaaatggatagattgcacttggggtgtggagaaaaggggatttaaaatggagaaaaaaaagttggaaaaggagggggttaaaaaaaaggagaaaatgatgggcatcatgagatgggatgatgcattgcagagtgtactaggcctgcctctctgtagccttttgccggccaaaaaaatgggaaaagtgaggggctcccatgaaaagagcagatggcaggatgccatctaggatcatcgatctctgcctacaaaggtcatcagattctactactactccgtatgatttcataatagcatttgggttttatagggtttggatgagattcaaacttttggcatcatggtttctctggatatgatttcttggttagcatttgactaattgctctcttacatccagtgtaagatatccgatccgagctatatagtcaggctaccagatgacggattatcgtggacacacttttaaagcttatgatatgtttttttaaaaaaaactttcaccaaactgatttgggtagagttaccaccccctcacggtttgtggttatcgcgaggtatatcatggttttaaaaactgataaggttaccacacatgataaccatgcgataattgtacggtcttgcaaaccctgtcctgttattagcttaggtgctacataaatattgtaaaaaaaattgggtaggaataaatttttaaccacggtaatattatcattcaaaatataacgcggtaaattattattggagtgaagtgcacgagcggtccttaaacttgtacggatatattatctaactccctagactcttaagatgtattttttgataccaaacttgttatgggtgtcatataggccagacatgacatgccatggtgacgcctatgtgttagtgggatccacatgtcaatcgcatagaaaaagtaaaaattaaaaagagaggagagatgagaaaatatatttaaattttgaaaaaataaattaaaaagagaggagaaaatgtgcgttcttaaattttctatatgtgattgacatgtttgttccattaacacatagacgtcaagcacacaaagcaagttgaagtccgtttggatctaaatgacactcaatgaaagtttaaaaacctaaaaatacattttgagagttcatcagccttagggggggcttctggaaactatagaatcagctcacctaaatagtccagttttttttctagattctgaaaagctgtagttatagaattcaaaaaaaataaactataagttagaagcttctccacattttcaccagctaacttcttactggttgtttctcataatctcaacctcccctaaacaagaccttagataacacacatgcacaagtttgaagattacacatgcactttactcttaccgctggcaagatataaacggtgacactgggccatgttcgtttcttctgcaagcagaagattaaattttggatactcgtggcacactttttaaacggttaaaggtgcgtttcgtgcgaaaactttctatataaaagttgctctaaaatatcatactaatctattttttaagtttgtaataattaaaactcaattaatcacatgttattaccatctcgttttacgtgaaacacttaatttttataaacattttcatcttcatcgtctaacgggagaggtaccccgtgtgaccagtttcatctcggcgagcaaaattatgacaagccgataatttcaaactaaatatactctaaagttttttagtgaaaaaaaaaagagaaagaggttgcacgttggaccggtcttctgaaaactgcaaaaaggagaagtgaaaaaacgattcaggaccatctccaaatcccgtcagtaaagctaaactcttaacggtgatgagcagtcgaacagatcagggaaaaaaaaccctgcaaattctgagctcgcggtaaaaaaaaattcaacccggactgacctagaaaatttacagcagtactcccagttactctggctgcttctgctgctaatgtttgatccgatttgatttggatcgggtttaatgttagattacgcggttcgatggcttaattaagcattaattagcttaatgctgggaccagtgcgtgctgcagtattttttcacggctctcgaagattttgcaaaacaccacgtacttcgagatcaccgtaaaaaaataaattatgagtaattagcaggaccagtaaatattctagttctgcccactgacatgggccaggattaattaaaagataagaatggttatgcttatcatctgatggaatactatattagaggggttaggacttaagaagtggtatattttattttatgcggagaaaaaccttcttaatttacagcagtttatatttaagatgtaaaattcattttcttaagtaagagggaaatgcaaagtgcaaagtagataaatgtgaaaagttttaatgagacttgtttttaaatatttaaaatcagtttccttaattataaatgggaaatttgcagctaacaaaaagtgttggatctttgtctagaagttatatttaagatgtcaaatctttttagtttttattgcattgttccctttatagttgcccttaaaaccattgttttcctttgcattttagaaaaaaatattgttaaaagtgtaacatagaactttttatcctaacaagtgtgcattgaaaaaaattatcactgagtacattttaaaattgacaagtacgttgggctcagagtaaatagtctaaaaaaaatcctaaaacacgatactaacccatataccgatataatctccgtaatacaatctcaatgcaagtttcctcttacattagtcaaaatatctttagatgctaactaaggtatatatatattttttaaaaaaatgatgttaaccgagattaacatttgcatccctctctctttttaccgtgaaaagttgttcgtagcagcgagagagattggtttgcaacagtaaaaaggcggcgagaataaaaacttctcgagattgggatttgagagagaatgaacgagcgagcaagcaatcaggtcaaaaaaggagaaagtaaaattcttttggttaatttgtattttaaaattttatttttgggggaggaggcaggccgttctgtgactggggcagtaaaaaggtagagaggcccatgcgcccatcacatgctgccgtggttgcccccactctgtggtgggaccaccccccaaaataaaccaggatcttctctaaacaatgggctccaatggtctctcatgtaccatgggctactatgcataaatgttggaatttataatgacatttatataatgtaattaccacttatgatggaaagaagtcatgctagttgttatcttcatgtgtgatgtgatgagctagttaaagatcatataaatggtgatgaggatccacctataatacaaaaatgatatagacatgtacgataattggaaattctatccaaagatgggaaatcaggaaaatataagcaagaatattttaagaaataaaataagaaaaatacgaattgactacaatggatcaaaacaaatcgagaaccaagagtatgtcaattagtcgaataatctttctcaaacccaaattagtttcatctcgagaggatgatgtgtttcctataccactaaatataattaattctaattctcttttttcttatgaaataatatcacctcaattgctttcatttagatcaatttatctatggtgcaaattgtccatatatctcatgagccatgcatatgcatatcatcttcattttgtctagcttttttttagcacaatcacctcaactcatttttagcattcttttctcttatgaagcgacatcgcgatatcatttatatttcaacagttggatgttctatttagatgttattgtgtaaagcatgtgaaatcaaattgtcaatgtacaaatcaattctatattgtacataatgtttacatattattatataattttccgcataaatgcgtggggtttcatttagtatgtacgatgttcaagtgaaattgtttggtttgtaacaagaaagcatgattataaatatttttggtgtcaaacaaccggacatgtgaaaatattgacaataattggatgaagataaatgttcatagagaattaacacatagatgcacttgaataaaaaagaaacttgcatgacttggtatgaaaatataggttaagaaaaggggcaccgatattgtttatggccaatacaccatatcatgattacctttattgttttttgtggataagaagtgaaaaccaacattcttttggtaagtcaaaataaagttatctatatttagctatgctacacctcgctacttttctcgtattatgccccaaatacaataatagtataacacatatgataacattagattgagaaaaacaacaatggcataaccaatttctctaaacaaataaatgacattattacaatccataatcccatataacactaagaattgagtagcaatgatcaaatatcggcatacttgctcatcaccataaacctaacctaaacacacagctcactccacaaacaatcccatcacaattggtccaagctaagaacaaagaggcacaccccttcctacccccactcctatcactattcatcccaacattttcacctcatcatgctcactccccaaaaacttacccactgaaaaaagcctttcagcacaagtaaataacactaaaaataaaaataaaaatagaataagtattgaggcaggcagagagtgatcacctccatgagatgagcaagaaaaaccaaatataaaaataaaacaaaatttttattcacaaaacaagtgagagaaagagaaagagaagaagaagaagagaagtactactagtagtagagaagtgagagcaagagagaagagaggagaagaggaggcttcaccttcccaaccaaacccaacctcgagcacaagcggagcagatgccgccgccgccgccgccgcgcgcgccgcgccgcgccgccgggtagctcagcgcaaaaaagccacagccgcccgcccgcccgatccgttgcagcatggggcgcggcggctcgcgcgcggcgtgcgccgccgcggcgccgccgtggcactcgctcccggacgaggtctgggagcacgccttctccttcctccccgccgccgcggacaggggcgccgcggcgggggcgtgcagctcgtggctccgcgccgagcgccggtcgcgccgccgcctcgccgtcgccaactgctacgccgccgcgccgcgggacgccgtcgagcggttcccgtccgtgcgcgccgccgaggtcaagggcaagccccacttcgccgacttcggcctcgtcccccccgcctggggcgccgccgcggcgccgtggatcgccgccgccgccgacgggtggccgctgctcgaggagctcagcttcaagcgcatggtcgtcaccgacgagtgcctcgagatgatcgccgcgtccttcaggaacttccaggtgctccgcctcgtctcctgcgacggcttcagcaccgcgggcctcgccgccattgctgccggttgcaggtgaggtggagagtgttgtttgggtcaaatctttttagctaaataagcatgggatctttgggttgttcttggatttgagaggaatctttcacggcccaagctttgattcgtcttctttttagctaaaacatgacagatttcttggtgccatttctttcttcacagtgttctttagtgagttcatggtctagctgaagtgatttgttcttccatgattcctatattaactttgttttgaacttcattgagtagtatgtggaagtagatgtggctttctgctaagatttgatctattcttggtgtttaatttgcaaagggacagtttttttttctgtttacttgtgtatgatctggatttacttttggtgtttcctaagttgaagaccaagaagtcttcttgtgacagtattttagatgcttataacgtgttaatgtcaaaggaatgattcccatgaaaattctgctgtgatttgtacattttattaggagttaagtaacagagtgaattgagtgatgctcacgtcttctttaaatcttagctatgatttgttcctaggaagctttgacttgtatttgagtgcctggtttgcgaagatgtgattctcttgcacggatctgtgtgattgacagaagaaatatttctacctgtttaagcaatgatggatccatctctttgtttctttttgtgctttttacccaaaagaatgggatatttcaagtttacaaacaactggtgatgcgcctttataattttgggcttttttaaaagaatgtattcttcccatcatgagttactagatctgagttgaactgttttcctttatattttcctgatatttaagtgaatttgttgagttcctatcctgatttgaacttccagattctaaagaaccaggtcttttaagcatgtttttgtcatgtagattcccagtttatcccctccccctccttttgtgctcaagaatctactaccttttatcttgcttttggtgagggaaagtgatttttgctccaatatttgtgatgtcctcatgtaatggacagttaaaacaaacagatttgttcttgcgagtatcttctggactccccccagaaaagaattaggaatgtgtgggattcctatcattggggaatttatatcctaaaccagatagaaggatctaatagtgggagtttcgatcctgattcatccattagtagtagtttaatatgccaaagcagtatcatttgcatcattttgaggaactcgaaacagttgaactgtgaagtttaactactgtacacttcaaacaggcagattagaataggttgtgagataactaaatttggttcggtgatcgtataaggccatattcttggatattaggacgaaatgagcctgagcaccacatgtgtacttgctgatggttgagaacttagcatagatactagtttttatgctagactagagggctactggtacattcacttgtttgataaatccagatgtatttaagttttgattcaaaatattttgactctagattggagactacattttagagcattcaaaatttacaatggaagcaggattttagcaaaactattttcatacatttactctgttattgagccagaatcattttttagttcttgctacttttttgttaacactgttatgcatgtaaactcagcgttacatttatttcaattacaaggatctacacttgtagctctgggtgcagatggtagttaacattgatgaatcttagctatatcgaaatactatcttctaagtacaaacttttcttgtgtgattcttatccttgttgttactgttgctacttatatccattgattgagcatgctttgaattaccttaagaatttctctctccagtcaaatttatttgactttgagagaactgtgtttatttctcccaacgtcaaatgttttgaattttgaatggacagagtatgtagtagtgggcagcacattggtgccctagctgcaaataaaaccttttttttttgttaaaacaatgattatgaggatgtcggtttacactgtccactcagaaatttgacttgattatggatagggtacaccttgttgttttagatggttccttcttaacaagatgctagattttgatgatttgattctttacaaggagtagtctaaaatactggaagtgtcaacttaaaaagttcaaacttgccctagccatacgtgatacattagacaactgatgtgctgtgttatctgcaactgacaattattgttgttgctatctcctttttttgctttagagtaggcaggtattttgtgtcaactaaaagtgtgtttcacgtgttgcctttcttaataccttttgaataatagggtataagaaaattttcatgaatggtttgctttccaattgttgatgttgctttccttcaccttattttttaaaccaccatgattaatctatttatctaggtaatattgctcatgctgattcatgatacgtggtaaaaaaataggtcttttcaactttcagaggctgctggactccatttatttagttgattttgatccctacaccgattttatccattggtttatattcactgctaacatatgatactcgctatcatttacttcactgttgatcatcaatgttttaattttgaccattattaacttttatatgattaatttagtattaatgaaagttgtgcggttgtatttatggcatgacacacatttctaacatggcatacttttaagcatacataactttttttgtaaaaaggacaagcgatcaaaggtaaaaaggtgaatagcatacagtgagaagtatttgagaccaaagggagtataatcattatctactaaacaaatacaataccattcattataagctgagttcgcatagtgtaattgaaagtggggaatgctagtatagctcacacatgaaatcaagtccctgtgaaatgatagtaaaccctacgtgttcattgttttagtcttatgatatgttccagttatgtttgccatggttgttgaatgcagtagtcaaagtttgcttctgtttgtttgagtggattctcatttaccttgccttttccaccatatactcatatgggctttgtttcacaagtgataacattggttaatggctatatgctatccttacagtttcattcttcttttaagatatgagtcaccatgcacatttcttcaacttctgattttgtctaatattgcagacacctaagagaacttgacctgcaagagaacgagattgaggattgttctattcattggctcagcctcttcccggaatcgttcacttctctagtaactctaaacttttcatgcttagagggggaggtcaatatcactgtacttgaacggttagtgaccagatgtcacaacctgaagactcttaagctcaacaatgctatcccccttgacaagcttgctagcctccttcataaggctcctcagctagttgaactcggaactggcaaattctctgctgattaccattccgatctgtttgcaaagctggaggcggcgtttggaggttgtaaaagcttgagaaggctttctggggcttgggatgctgttccagattatctgccagcattctattgtgtatgtgaaggcctcacatcacttaatctgagttatgctactgtgcgaggtcctgagctcatcaaattcattagtagatgcagaaatttgcaacaattatgggtatgcaactcttgtcaattcttttttactactatgtattcatcccattcgaatctgttaacttttgaaaaactgttgcatatctctttgcaatacaagcacttgattccctacaagtggattttgcaaattttttcttttcttctggacctccagtaaaaaagttcctgatgttttcttacttatcatggtcactagtaaaagtccgactacatgtattcttttttcacaatgtagttttatcaattatattggtatagggctgcaatagcattttatgatgaaactgactgcacttttcccatgacaacaagaatttgtggcttggaataatctattgagtgttaaatcatgcatatgtttttcatgtttgtcaatacagttttgtaggatgcatgttacattcaatggcatgctgttgggtgcctccaatgaatagattgaaattaccactcttatcttttggggaagtaggatatttatatggaaaaaacatagatgacaatggtatcctatccttattagaatcattgtgaaaagactgccagatgaatccatttgctctagggcagcattctttgcctttcttggcaaactgagttattgtctgaaccctcatagtttccatcctttaactgttaactgctagatgagttgcttgctctacggcagatattttaaactgaattatgatctgaaccccaatggctattaacctggtcatgttagctctttatgcaatcttttttctctatatttttcttctaaaagttaagctgcaatttttcaggtgatggacctcattgaggatcatggtttagctgttgtggcatcatcttgcaataaacttcaagagttgcgggtcttcccttctgacccttttggtgcaggattcttgactgaaagaggtcttgttgatgtctctgcaagttgtccaatgttggagtcagtgctctacttctgcagacggatgacaaatgaggcacttattaccattgcaaagaaccgtcccaacttcacttgcttccgcctatgcatccttgagccacacactccagactacatcacacgggagcctcttgatgcaggtttcagcgccattgtggagtcatgcaggggccttaggcgtctctctatctcaggccttctcacagatcttgtgtttaaatccattggggcacatgctgatcgtcttgagatgctttcaatcgccttcgctgggaacagcgacttgggcctgcattacatcctctcaggctgcaagagcctgaagaaactggagatcagggactgcccatttggtgataagccattgctggcgaacgcagcaaagctggagacaatgcgatccctttggatgtcgtcgtgcttgttgaccctgggcgcatgccgacagcttgcacgcaagatgccccgccttagtgtggagatcatgaacgatcctggaaggtcatgccccttggattcgcttccggatgaaacacctgttgagaaactgtacgtctaccggacgatcgcaggtccaaggtccgacacaccagcctgcgtccagattgtgtagggggcagtatgtgcggtatcggtatgcgggtgttatggaggtatttattttcaatctcgattagtaccttcaaacaccttcctcgcataacatagaattgtttccttccaagtagaaaggctgatggttggatagacttgtcatgatctctactcggctacaaaactgttgcaggtgtagaatgaaaattcacagcctttttcaggtgttaataactgtaggaggagactggatgaattacagaaaactactagatagcatcatgagaaaacttcggtttgttttcttagcgtgtttagcactttgtatgtataaaaatatggcatccatttgtactgtactagtggaaaatttgtatctggagctgagctttgtcacttctacttttttgacctaaattatgaattgttgttgcttcagcatgttgtgaatgtttaataattattggcctgtgctgttcatcatccatttgatattactttatttgctgcaaactgtttaacatactggcttggtgataacacttggaagctgtgcccaactatattcaggctcaagttcacagcttgaagccttaaacctcatcaggacagtatgaatttgctccttaattactgtacttgtttactctttgttttaaaatacaggacatggaaatgcatggactctagataatactcctattttaaaatatagcgatctaggacagattaggggaccgtccagatttatatcacaggttgtatctaatctgatctagattattatatatcctagattattatatttgggttggagggattatatgatatgcataagcaagcaatgaacctggtaaaaaataattgattacctggctctacccagcttaagaattgattacctggctctacccagcttaagataagcagaaaggggaaatgatgaggggatcttcatacagctggagcaagtgtcatttgactacttgtaagtacatgtaagttcatccactttgttagggtgtgtttagttgaggaaatgaaaatttttggatgtcacatcggacgtttgaccgaatgtcggaaagagttttcggacacaaatgaaaaaactaatttcataactcggctggaaaccgcgagacgaatcttttgagcctaattaacccgtcattagtatatgtgggttactgtagcacttatagctaatcatggactaattagactcaaaagattcgtctcgcgatttcctccctaactgtgtaattagtttttttatttatctacatctaatgcttcatgcatgtgtccaaagatttgatgtgatgtttttgggaaaaaaatttgaggaactaaacagggccttagtagaagaaaacctgcgatcttcaatgataactgataaacaattccaaaagggtggtcagtgctgcctagcttagcttgatactaggaacctagcacaatatattttggtcatgtttgggggaaacaaagatgtaattatcagaatctctcctaaacctaaacagggcttttgcttctctactacaccttccatctcaaaatataagtttatttatgtattctgtatttaacgggtgatcgtccgttttatttaaaaaaaatataaaaaattaaaagaaataactcacacacaaaatattatacatgtttttatcatctaataacaacaaaaatactgatcataacaaaattttaaataaaacggatggtcaagtattgaagacaaacccataaataaacttattttggaaaggagtggaaaggagggggtgtagtaaaacaatcgcagtaatgtactttgtggtagcatcttgcttgatctgtctctagctgtgactgagtcatcatgctcaaagctacctacttgcatctgctgccttgcatggacagcttgcttgatcttccttcatttcgcaaatctcgacacatggataatcccaaatgtatctacttcataaattgaaaagaaagtaaaagttatattcataggcaagcaaatctcgacacatgaatctcgggaaaatgggccgtatggaatagcacaacctaaaacgaagggtcaaacttaagtactactactagcatgagatgaacacaatcattttggccacaattaattatagtgggcactttgcttctgactaaggcatcgttcgtttaggggtgataggggagattggctctcgtttgccgcgcgtacgcttttcaaactactaaacggtgcgttttttacaaaaaatttcaataggaaagttgctttaaaaaatcatattaatctatttttggaatttaaaatagttaatacttaattaatcatgagctaatggctcacctcgttttgcgtatcttcccaatctcctcaatccccttctcctcaaacactccctaaagcttcctttggccacaattcggtcaagatgcaactttgacctttaattccgattgcaaattatctcaaaaccccaatgaactataacaccgtgaagtactttagatataaaagttggatatagttaaaagtatttgatgtttgaagttattaaagtttgacatggaattcaaaaagcaacttgttttttgacaggagagacctatagtaatattgattaaggcttcatcctaaatggatattcggttcggctaacttcacaatttgtagaagtttcttttaaaaaaataaaatatatctttttaagtttgtaataattaatacccaactaatcatgcgttaatagcttgtcttgtttcacgcgttgccgataacttaaggtaaaaactggtttgagtttaagcctaaggtctgatttaggagagtttatagcagctgcaggttctttcaaaatccctaattcccaaaacaatctgaattcttatatagttatagaatttagtaaataaattagaatccagaaactaaaaaaatccagttgttttctagattcttagaaacttattaccaaccaatcattactcagaattttaagctctttaaacataaccataaactcgacggtttcttagcttctcattaattagatactaacatatgcttatctgaatctccagctctaaatcattctaatgttcttatttgtttcattattagataatagtactagtaatatgatgagaaatgaaagcggacaaaaaggttagcaaagccgacacaccccttccctcccttccatagttccattcccccgccctgacctcttaattactccctctctctcacactcacactcccctactgctctatgaccattcctaacctaataactaggataatattaaataaactgacatctaggataaaaaataatatggcaagtgaataaacgagaaaaaagaagaaaaccatgtcttggatgagacttagtttctacacaatatctaagatatcatgtgagataagtagcattaaatttaagtatggaatagtggtgtttgcattggaagagtaatgtttagtactagtttctcgatgatgtggagtttatagaaactatgtctagtgtcttgggttgagaataaccttaattctatcactattcactcctactcctctagtagcagtggttagcacttagctctcgcctaatgctgctctccgagcttaagcttaagctcaagcttaacccatcctcctctcctctcctcccactcgctctctctcccgcagcgtcagccgctttgccgcactagcagcagtagctactactaccaagcaagcgtagacgacagcagcagcagcagcagcctgcgccgcgatcccacccacccggacgaggaggaggaggattttttccccctctctccccttcgctttcctggagcttgaaggatagggatcgaggaggaagaagacgaatcaagaagcaagcaaggttggttttgctaacctctcgctgtgcttggggtttgttttcttgattggcttcttcgatctgggtgacggggggtttcgtcgatcttgttggtggtggtggtgagggtttcttggtctcttctccggcggcggcggcggccatggcgatggctgggctggcttcgtggagggtccggctgctgcctccgccgtcgcgggattttgggtgttaccccagcgcctgaatttgattagtgtgtgggtttaacttcaattaatcatacgcgaatttggtttctggattttgctcttcgtccgggctgtgttcttgattttattttatttttactgcggcgttgcattgattgggtggagctgaatcagccgttcttgctgtcctccggttgttccattgactccgctgctccggtaccgatgagctaagctgtgagccacaattgttctggataattgcattgatctcgttcccgtacgattgttaccgcgaacgctagcattcggtttattgcgtctcttaaatccgagaattatgtcatcatctgcagcattgcgagtacaaacagatgacacttttcctctttatttatgtagtactgtgttgcagcaagaagaggatagcaatggcaaaagagaacttagagagagagagagacagagacagaggagatagtatgagcaaaagcagttctcaactctgaacattgatagcttcatcttcatagcttgatagaattatatccgaggtatgtgcctcttcgcgtcatcggtatatgctgtttttgtatcattgagggaacaagatatgatcattctccaccttttcgggttgcaattaccgacctgtaattgtgacgtagtttctgagtgcatttttttgctttcttggtgtgcagcttgcaggcatgtacaagaaccagcttcaggagcttgctcagaggagctgcttcaatctgccatcctatgcgtgcatccgcgagggtccagatcacgcgccacggtttaaggccacggttaatttcaatggagaaacgttcgaaagccccgccttctgttctactctgcggctggcagagcatgcggcggcagaggttgcgctcaatgagctgtcgaagagagggccatcatcgtcacttgctgcaaaagttctggtaggttctgttgatccctccagaaattgattctcaagcattatgatatggaaatcagttgcatgtcttgtgtgaaaaacttttgcatttgtcatcttgagaaatctctggtatgttttgactgacatcctggaagagcgctaaccttagatctcattgtagttctatgtagaatcagagatttagtaacttgtcatggatgtttttttgttgataaacagataaagtgcttgaaccaggggacagttaaattgtatcctttcagctttgccaaataagattcatgtcacatgtgtactagctagcagatcacctcagattgcatagttgccaatcatctattgagaaccacaaaaggatatcactgtcacatcatcatgcttgttagtaccgaaaaaatcagattggcataggaagttgaaagtaacagtcatcatcagttctctatttaacttgttgtagcttagtttgatatggtaagagtgaggaattgtccatagctcaagtccataactcacaagtcacagttagactttttgcttaacatgctagacttactgacatattacgcatcatctcattgctttatctgtaaaaatacttagttcagtccttgtgctttatttgacaagttgtacttgctgatgctattatggcggcttgtacatgctgcttctactatattgtagtacatattatagtagtttctcagtggatggacattgtgaaatgtcctggatcactggatgtaattggtggtaaaccaacctttcctttggtcaaaggacaataaatctcatctacgctgtggatgtatctaagatacttccagtggcaggtgtattaaaagttcagtgttcttgacaattcccccaagcaataagtcaaagggatgtggtattatttatgatggatcggttgggatggtttaactcatttatgatatctgatgttgatttgccagttgtcccatctagttgcatcattcctgattttgcagtaaaaacaaatcagtatacaacgttggcagccatgtgattttcttcttccagtgtgcatctctacaatgctcactgatgtcagcatatgaaatggatattaaataaataaacattgagcttacttgtgtttattgtgcatatccttatattgtgcattctgtaacctcttgaggaatggtttttcaagctgagggcctaaagctgtttcactccacaggatgaaactgggatctacaagaacttgcttcaagaaacagctcatcgagcaggtttaaaactgccagtgtacactacaattcgatctgggccaggtcatacacctgtgttcacatgcacagtggagttggcagggatgacctttactggcaatcccggcaagaccaagaaacaagcacagaaaaatgctgctatggcagcctggtctgaattgaagcaatgtgagtatcttctcaccttcttaccacctttggtctcttaatgcatggttcactggatgtacaacaatggaccgcctatgtgctaagtactttattggaaaaataaagaggaaagacaatcatatatgttaatggatcttcccttattaacctatgcataatgcactgcggcatttcctagtcattccattgtatcaacttcagaactttttcactgactatttggttttgttgtgcctaacagtgccccgagtaggtgagccatcatcctcatcttgtccaccagatcatgacgatgatgatcaggaacagattatagtggctcgtactcttgcaagcttgaatcagacaaatggaggaaagacaccacagcaaaaggaaaaacagcaaagcagtaaccgcccgtcatctcggagaccctcttatccgaaatcaaatgcatcattttatggccggttgcatttacaaaagcatgcatacccaagtgttccaccagagcaagcaatgtaccatatgtggcatcaggtgcaagcaacacagcagaagccgcattttccaatggtacccactatgggcagtacaggctttccaccgcctccaactgtgctccacatgtaccctccacctagagggcaattcaccatgccatccagccaagatggtttaggtcttattccatgttatcctgaagcttcccccgtccttccacggtacttctcgccttatcctgcctcctttgtaccaagacgtccattgccagttaatgttcacaaaattcatgagaaaaggttagtgggtgctgatatggttgagcttcctgatgctgcggtcttctcccgatacactgctccagatttctctggtacatcagaaaatgctgttcaagataacaagaaagaagaatataccgagagcagtcctgcctccgagcaagaaagcaaatctcatactgcctcaagctccgccacgcgttcaccatcacaacagctagaatcaaatcaagatatagaaatcatgggcggtttgcggttggaatcaaagaagcccgcagaacagccaccggagtcatcaccatccagggtcaatcctgttcttctgtgtgaaactggccaacggcaccattacagttctgttcgccatggtgatcctgtccacagaaatagtcctcaaataagtgtggctacatcacctagtcctattcgtcgtggtgatcctgcccacataaacattcctcaaataagtgtggccacaccacctgagtgccggtctccccgtgcacaagctccaccaagatttggaacaagaatgccggtaaatttgccgagttcgttataccagcaacggcctccttggttagctgcctcagttacaatcagaacaactatccctgtatgctcagcgaggccaaatgtggtgaactctagtgctggagcagctcaacctgctgttcagatcctctcggcctcgcctagaaaagaagaacctgaagctcgcacgaacaccagtgacacaagcaatgctgcaacggcgagttctgagctcaataagcttccatatttgaaagtcacagttttggttcatctgagctttagtcagggctgagaacttaactctcagctgcatctcagttttgattgtttcttttcctttcattttttttatctccttgggtatttagctagatagacataactatatgaagagttggagagcgggcatctctcgcgatatctgaacctgttggattttttatgtaccacatcttatcaagaagagtgaatgggaacagtatatataccgaatgcaatttttgtttgtgagatttcagaccgcactgagcatccataaaatgtagtgcagtggagtacatcttcactccagctctctgcatctttatggagcctgttgtaatgttcgtcacatgaatgcttttatctcttttgattctcagtacttggaagttggaagctatttgattctctcaatacttggaagttggaagtagtagttgcaggattgcctgtgtatgatattctcacaccgctattgcaagatatagtttgcctgcagtcgactgggtaattactaattaggcagcagaaggcataaaatgatacatgcgatgccatatcccctttccaggaaaaggagagtatcattacctgtgcaatgatgcagacgcctgacgagcggtggtacattggtgtggagacgacatgcatacaggtaaaagcaactttgttttatttgattgatgtctccaaaagagagatcaactacttgttatagttatgatcacctaaaatttgtaatgttgcccgtccaatttaaaactttaaaacacaaccactttaaccggtatacaagctaaccatctcactagagttatgtctgctagtttttttttttttttttgagctaaagctactgctagacaattgggatgtatctggggtttccccttgggtttcatgtcaacctccaaatgagctccctaaatgcatatggggggaggaacgaacaataatcagatcaccctcgccttctccttccctgtgagaaaaacaagtgggtgaggtcctactttactgtaataaccaaaacagtgtgtggttctagtaaagatgaacagaatgcgatgtaaataacacttaccgagcctgcattggcttcagtgtaggactggcgcctcctcttcgaagagctttgtggaggggtatcgagcgaccttgatgaagaacgctttgctggcgacatattctgcaagtgcaagaaagtaaaaaactgaagattagaaagattgcattgtgatgactactagggcaatatgtttgtacttcactatgaagtgaactagaagccaaacgggaattgaaaaaggtctactatgaccaaccttcttatctttcctggccaatctctcacgctcatcatattcttggttctccttctccactagacgaatgagggtctcgcacctcctagctagctcttgggttgttctagacttcacaaaccaatcaaatcggaacaagggcgacatgcgaaaggctgctttcagttcatcccagtttccgtatccgagtttgtgcaccatgcataactgtaatagacacaagctgttaaaatgcaaaaaagaaaggggcttaaattgttcaggaacaattgtggtgtagcataccataaaacgatcacattcttcgttgtataacttccctttattctggccatactgaattttcaactctaaccaagggttcttatagcggtctagctttttcccaatagctttcataatctcatccttccggtatatccttgcttctcctttctcaatgttcttaataactcggtcataatctgataggatgaggacatcatatttagtcaaaacagattttgtatctgaccattactcagctcagcatgtaagcaatccattacttggttacaagttaataacaaagtcagctacacattaaataggtcatcagtagggaatacaaacagtaagagaaaaggttacaaaatataccatttaattccttgtatctttcctggaaaactttagcgtaccgctgcacctcctcttctgttttcccctccatttcagaggatatgttctttatgtcattacgaccgtacttctcacaagcacggatgaatgtattgaagtccctccttgtccatgtcgaaaagccctggatattatacaatgcaaaaccaaacaaactcagagaaggaaccagatataaagcaggcagatatattgaacgacaaaaacagcatgtcctttttcccccctagaataaacaacagtaacactaaatccaaaaaggattttcattgtttgtaaccacctcttccaatagctgctctttctcttcttgctcctccacagtcaacggttccagttgatctaaatattaaaacagaacttgtcagaacaaaaaaaaaacatctatctgctttagtgccactataaatgcatagttggtaataccttcgtcatcaccctcaccaaccgtatcctttttctgatttgcttgctggttaagatttgtaaacaggtaaaaattaagatcaagaatcacgaaaacaattctcagtctcatttagtagcatgtacacatagacaatatgttggacattgggaaaaccaatttatctggaaattctacatgactagggaataatatatcacaaacaaaggcaacctaatgacctatcatatagtaatataatgtctcatgcttctgacataagtaaaaaaactgatatcgcaaatagttctagtggagagattaccacaaggtatttgacttccttctcatataattcattgagtctctgagtgttgaagaactggaaatcatgcctaacaaaaacaaaaccaaaatgagtacaccactgcaattaaatgaaaaaaatattaaaaattttgaaaaatgaaaaaaaaaagactatgtgaacaagcttacaagtgtggcattcgaggaattctcggttccctaggttttgctggtgcaccttggcgaagtgcttgcttgaaataatcagactcagagtagctaatagaaacatattaacaaaaaaatagtctgatcagaaggagactattattctcgttattaaaaatggacataacatagttatataaagcatactttcgcttcctttctcttctgctggttggctctatccagttgtcagtgaccaacttcttaaaatcaagtttgttttcatccttcagaaaaaataacgtgcattcaattatcacaaaatcggaccaaatatgacagcacatcttaatataaaaaacaatgatgataattaaactgaacttagagcatgcagcaaacaacagaacatagcactgtttcattaccttatcatcatcaaaatcatacagttcagcagctgcagaaaaaacatgaatgaataagcttggtaagaatacattccatatgtacactagagccatgtggtgatttttttgggaaacattaatttgtgcagacatatttaaccataacctttagtctagaaaactatagaagtagttagaatgcattatacaatttgacaatatttcaaaatgagtccgaagtatgcggacaagtacttgaacctccatttccagatattttcttagagttattaagaaccaaagagaccaaactttatgagtttgtactgaatatatgcagacatagagaaggaagtgtgtgagagatattgagagagagagagagagagagagagggtcatactgtcatccattttgaacttaatagcatcttctgtgaacttcttcatttttgcatcaagttgtgctgttgcttcttctcccttagnnnnnnnnnnnnnnnnnnnnnnnnctgttattgtgctatccttggagctgaataccatttcagcaccaaatctgaccatctgcaatagctcatccttattgacagctgaaacaccacgacagaagaacattaattgatgtttgaattttcatttgtcaagcaacattttatgaagcaaaaaactaacctttctgctctgccaatcgaccctgttgtatgaccaaagcatccagggcaagcttcttataagctctctcaatcaccttttcctcaattgtatactgcatagaatatgaagcatattctgttatataaataaatagaagatattgcttagtgctaaaccagtgtttttaaatcttaaaataaattaaataaaacctcagtgcagaaacgaaaaacttgaacttctttcttttgaccaattctatgtgcacgatcttgcgcttgcagatccacttgaggattcctgtgaaaccaaataaccataacctttaacttcacaaattgtagaatgagaaaaaattacgatttgaaaaggacataccagtcactgtcataaagaataacaacatcagcagtagcaagatttatcccaagaccacctgccctagtcgaaagcaagaaaacaaatttttcactccctggcttgttgaaagcttcaatcgaagcatcacgatcttcaccaccagtattcccatcaattcggcaatattgataccccttgtacatcagataatcttccaagatgtccaagagcctagtcatctgcaggatacacagttgtgtatacacaaatgttatgaaaacataaaacataggcagaaaagcattatatataaaaaaaacacaagataaaaatgtggacatttgcatcaaaccagctcacaagtagaacacacacaaatcatgaaataagattgctatcatatccttgatgctgtctgaactctgacacaatgcaaattcaacttgagtgtaacagaaagaaaatagtgacctgtgagaaaataagtactctggaatcacgttcctttagcttgggaagtaatttatctaacagaaccatttttcctgtaaaataagagtgcatgatcatatgtgcagtattgcagaaatagtaccaaattatgacaaatactagagtggatgaatagtacctgcattctcaattagatggtctccagtggtatagggtggaccaggctcagcaccttggaataaatatggatggttgcagcacttccgcaattgcatggctatgttaagaaggcgtttgcgttcaccaccggcattgacaacctccagatctttctgaagcagagcacgataatattgtttttgcatctcagacattccaactttaagtatagtttccttttttggtggtaaacctttctcaacatcagatttaagcctccgaagcagaaatggacgaagaaccttcaagtgtaacatgttacacaaatcatacaaggaaaaccaacatgatctatcaattgagaatatggatatcaaatctgttaccttatgaagctgctgaacaacttcatgttgatcattttcccctgagatttggaaccaatcatcaaaagtctcagcagagctaaatatttcaggcaacaagaagttgagaagagaccaaagttcatgaagattattctgcagcataatcaagtcagtggtgataaaattggacataacttgaacttgaagaaatgtatactgaagcaaattaccataattagattagaaagagtacaaaatttgcataggtagcaatgtagaattaatgtgacaaggtggtgctaacatacctgtagtggagtgcccgtaatgaggagacgataattagtattgtaaatcctcatagtcttagagagaagggaattttcattttttatccggtgggcttcatcaataataatataacgccagctgaaacgcttcaatgcagttttttctttaattgccatttcaaaactagtaacacagacgtcaaacttccctgggactaacaaattttcccggatatggttctgaccaagtatgacaaatatgttagcaatataccacaagaagttcacatgaatgacagagataacatggggattaccctttcttcggggtttcctaagaacttgatagcacgcagaacaggacaaaaccgttgtatttccttcatccagttcccaagagtggactttggtgcaacaaccatgtggggaccggttattcctctaaactcatgcaaatatccaagcagtgatatagtttgaagggtttttccaagaccctgaacgagaaggatttcatgccaaatatgagctcatgaagttgaattaagcataaccatataagagtcaataagtataatcttaatgttaattgatatgtgtaacaacaatgaagagcaatagagtaccatctcatcagccaatattccattgatgccattctcatacaagcgtatgagccaattaagtccagctagttggtaatctctcatctttccttttatgcctgtcaagtaaaccaacaagaatataatgatcatttagtagttaacataaactgatgagattgcacgagtctgtgacggactcattttaatcacaaagaaagctaccagggcatttgtacataaacactaccattcagttataacaaggatgtgaagataacaacatctggacataaacacgggttaaatgctgtgaaggatgcagacttatccccaaaaaatataatcaaatgaatgaactaggagtctaggacaacaactagcgtaattgcaccttgctatcacacacacctacgaactaagagagagccagctgagcagcagcagatcgggtatgtccagatctaccgggtagaaactaccgggtacctgttgtatgtatttttcttctacaattaagtgcaatccatgaaagccacaattaatccctctaattcctcctctttaatagataaaaaactaacaacttttgttctacagactgctttgatgtttttttctttaaaaaacagactattttgacaaaaagctgatgttgcacagcatacggtcgctgacttggaccttggttcacacaagaacaaaagcatgtcgactaaacaagcagcatgcaaaagaacaattttagaaagacagaagtcagtttcttcttcctttctaaatttaccgcgtcctttttgtctgttttcagtggagcaaatattcgaaccgtttacgcttaattatatcagggtgccgtgaaaagctccctaatcggagtcctcatagatatcatttcaagggctttttcgggggaatatcatcaatcgtctgatcaatgacaaaataaatttgaattgacctaaagatgaaacattttaggagaattaaaactagcaaacttggacaaacaattttatagctttgtttggatggaacggaatccttgcccaacacgtgtaagccaatgaaaattagtataattctcacgtggacatggaaacgtgtgccggaatccgactcgactagtgtgtctgattcggcacaaaagaatttgacacacaaaatccttcctggaatccaacacgagcgtcaaaacccgattcggactcgggatgtccgattcagcaaaataaattcaaagcaacacatatgttctagtcaaagtgttcgaggttgcatttcatcgaaacaatggctttattctcaggtgacactgaacaaaatgtgtgagtggtgtttatgggaggttctctctattggtatgtcttctcgacggtgtgcctttggcacaaaagaattgggcacacaaaatacttcttggaatccagcatggatgtcggaagccgacttggattctggggtccgattcggcaaaaaaaattggacacgagtgtctaggtaatattgtaaattcaaagcaacgcctatgttctagtcaaagtgtttgaggttgcatttcatcgaaacaatggctttatacttgggtgaggccgaacaaaatgtgtgagtggtctttatgagaggttctctctattggtacgtcttcttgacttgggttggtgttggtattttattgcacctttcccagtcttaaattaacggctgagttcctacatccgtttcagaaaaaaaaaaaaagggggaggagcacatcctattcctatccagtacaaaaaaaacacggagaatacaaatctagttatggccatcaggctctacatcctcatcactaacacagacaaacaacattaacactttcacccagtcttgctcaaataatggctatagatattatctcctttcctgccagtaggagcaagagtagttgagaaatcagaaccagggtttcctttccataacaggccgtgagatgaagcaacataatttactgcattccctcacaacagctttcgttttaaacaccatccgaacagaaaaaaaaatcacaaaatgttgattaattcagcacaagtaatcgcaaattcgcaatgaaattgcgaaccgttctatactgtttcgccatcaaacaaatcgaaccttccatgcaaaataaacattttcgttacacaaactgcatttaagactggcttgtaaaacaaaaggtttgacagaatcatcaagcaaatgctcacatgatggttgtgaaaccagacgggtccctcctgcaccatcaagggcatcttcctcctccttgagatactcctcatcttcttcctcctctgtcatctttgatgcatgacgtcccctaagatccttaccacattagctaaacaaagaagacctatgaagaacaaagaaatatgtaccacaacaagaagagatagatgccctggataaatagatctgaatgttgtggtaagtagtaccattccccaaaaattattgaaatatgtttaacaaataccacttgatactagaatactagatagctagggcacaaaaagatgttgaaagctctatgcactcatcaaaatttactgaaaatgataaatgagccaaagatgactggttaggtgcatgttttaacagcttgaccatttttaactactttaaatctgaaatctgaatatgttgaagttccaatagagaaaagcttttcttaataatcctgacaatgttcagctaaaggaatgcactacatgatatcttggagttcatcaaggctatgaagatgggaatgggacggcaagtcatcactaccaggtctcaaaaacagaaagtatttcgcatattacagaaaaatattggcactgtactgttgtaacaaatgacaaatggttagcagtaacttcccttaatggaaagtatggggttagcatatttatccaaggaagaatataccttccacgtgatttcttctctgtcgattggtttcctttcgcaaaatgagcaaatatttcagtttgctgcaggagatacttcagacgtcccttccccttgttgttctgtccatgaatttaatattctaagctaccacagaactcaaagccatgaagtgaacgcaaaaaagcacagaagatttagatcacatgtcaataaggtattcctatttggaggttaatcgctaggagatatgggaacttatcaaaccatgtcagcatcaatggccttattttgggcatccagtatttcctggattttgtgcttcttcagcttttgcatctccctgagctttgctcgctcccgcttcccgatctctgcgtttccagtagcatcttccaactgcaattgaagacaagcaactcagtgatgttgagtgacactcagagtagtcactccccttcaaaatattttgaaactcttttttagaactaacaatcactcctttgataactgtaaaccatgctgattggctaattgcgataaaaaactacttcagtagcacaaatataccacgaagctttaaacattttgctacagcacacttacgcataaagaaaacccaaacggatacaggaatcctcaccagatggaccaaacaagaacaactttactaaaatttacaacctattgcacgggagaggactgcctctctttctaaaaaaaaacaatctacaattttaaatgaacactaatatcatccctcaaatgtctacaggagtatagacgcataacagattactttacagctaaacagagggaaacaggaaaaaaatctgtataatcaacggaaatctgctgatttcgtttcagaaaaagagaaatcatagcataatcgctaccacctatcaacagattcaaacataaaccacccaacccctaccagcacctagatcaccaaaccgtgccacacccaccttgtcgccatcttcaccgccgccatccttcccggcggcgacctcgtcgtcctccgtggactgcgactcctcctccgcgcccccgtcatcgcccacttcttcgtcgtcgtcgtcccctccggcgccggtggtgaccgcctcgatctcctcctcatcaacctcctcctcttcctcttccccagccccctgctcctcctccacctcctcttcctcctcctcaccctccgcctctgcttcctcctccccgacactagactcctcctcttcctcctcctccacttgctccccatccgcctcaccctccacctcctgctcctcctcgtccccgctaaacccctcctcctcctccccctgctcctcctgctgctcctccccctcttcctcttctacctcctcctcctcctcctcgccggcggaagacgaaggggagagctgctcctcctccgagtcgtcgtcgtcgccgtcgccatacttccccggcttccccatcacgcctcgctcgaggcggcggcggcggcggtggcggctagggtttcgggagatttgcgagaggcggatcgggggtggggaattgaattggattggagttgccgaattgggggattggggtgatcttatattgaagcggtttcgccttgtcgccgctcgcgcgggggcggcgtgaaatgaactagtgaagaaacggaagaggaaagaaattggagcggagtggaggtagggggcttttttacgatttggtccctccagaattgagtatttcttcccgcccagcgtgtggggagggagggccgggctgtggatgttggggggccttcttgggctggaatacaaaatgtagttttagccaatgggcttaattgatagtgggccttttttatgttttgcttccttcgtcggcttttcagcgaaaatgaccttccgtatctaacgttgatcggccgaatgttgtgatgaattgacaccggcgacttcactgtgcaaatttgatatagttctatcatctactgataccattcaatacttcttaaaagtgatggagtctcttctgccacaccatctataccaccgatattagggttctacaatctatattattacatcacccttcaacgatttctctcccgtttcatagctaactctctataaatttggaatcacctacttgttcaataagaaaaataatgaaagtactatttggattaaatatgtgcttaattaacttaataagccgaaactcaaatttgttttccgttgcaacgcaaaggctcttagcatcactaaatctttatgtttaccttgcgtatttttttagttaggtatagatctatcctttttcacgtcgcgcagtggatagcttttctagtttggttaggtcaagacatctcatccttatgccgccacatgcaatctcttgccgattcctcgcgtcgctgaagctagggtttccctccatttttcccttcatctgcaccactgtggagtccaccataaggcatgtctctacacctccactgcactttattggcattagccatcacacagttctcatccgcttttcacaatgttgcaaatggattccccgtgctgggaagacgttgtgacacctcaaatccgccgatatctccaccgtagcttgacatcgaccttcctcctttctccaataactgagcttcaattcatggcacgttccattatccccatattccctaagctggccaccataatcgatagatgcactgagccataggacgcattcctcctccgttttttgttgtcgtcacatcttcggatcccctccatcattgccacttcctctgctcgg

SEQ ID NO: 8584 - DNA, 2737 bp, Oryza sativa
cgtcgagtttcgtcaccggaattcgcatcccctcgcgctccggtgagttcaaccgctgccgccgccttcggccatgaatgccggtcgccgtggttcatcttcccccctctaatctctctcttctccttccttagggcaccccgaagctcgtccgccggttgccgtcgtcctcccgtggcttgccgtcgccgttcgccatcgtcttcctccgcgccggccaccctcggtgaggcatccctcccctcttttccctttcctctcctcctagtgccgcgccgccgcttcaagtcgcgcgccgtcgccttcggccgccgccaccgcctcccatgccgccggtcgccgccgtcgtcggccgcgtgccgtcaccgctagccctggccggccggtcggctttgatgccgagccgagcccggcggccgcctccatcgccgcccgtccgatcggccccgagggcgatctgggccgtcggttccgtggaccggcggtggaccacccgcgtggtcctggtccacggtgaaccgccctcccccttgagtcgctgaccggtgggccccgcgtgccggcgccccttcctccctctcccgagccgctgaccggtgggccccgcatgtcggcgccgctttcccccgtgctgacgtcagccctggaaaatattgcgcaataaattatttaaggattttgttatagtaataaacacagtgaatcttctaaaattcataactaattcatccgagctccgtttcagcccattcaagtctcagtaaatcaagaaaaatgtgtagaatccattaaaaatggttttgttccctgtttcagtagtcttatagcctgtttgcaatgtttgctttgtatgtcgctagattccggttcctccgacgctccggtgtacttcgaaatagtcgccgaggttcctccagcagcagagcaaggcaagtcatgcttgtcacttgaacatgttgatcctatattgcaaatgctctattgttttctttcaaatactgcattgttttataatgtttctaggggatgtttacctattgtcatagccatgctattgttgtaccttgtccctttgtcagcttggggttataacatgattagagtttggactagggattgcttagccatgcttagttcaactagttcaatggggaagatcttattaatgtttagactgttggttctaatggttttgttggattagtgccaccgctttggtgctggttaattaaaataaatcacatggtgggctgtgggtgcatggttttgctggtcgcacccatggcagttaaggaccggttcgcgggatgccctggaagaacttatcgtacttaccacaagccagcgtgggcaacggctgggcttgtagtgtagctttcctctagccgacgcatccaggcaagggtgggcgtgatggagtttggatgggccctgcgacggcctatgcggcttccggattcacctaggcacgagaggggactgcccgctgccttgcgaggagtgggggtgaaacctgaggtgtggtgtgcttggttagagggggttatgcgaaaggtcctgtcatggcctctttccggtatgtcgtggtggcatgtcggcgcacggaaacgtgtcgtggggctgtgtcttgtgggtacagttgtacacctctgatcagagtaaaactattcgaatagtcgtgcccgcggttatgggcggtcaaccagattcaccgtgattagtctcaccctagtgtaatcttttgaatttggatagtttgggtggatggttgggcctgttgcaacgtgggatggcgttggacagtggatagtcaatactaattaattattacaactgtttaaatctttcaacttctgtttataaatgctcgttttatgcaaatgaaccactctagctcttctttgataattccctgcatcatacccctattccggtatgacttgctgagtacagtgggtagtactcagtcttgctctatttttcccaaccccagagcacgagtatgtgtcagatgaaggtttctccgaggagtaggcttcgtccgtgccgtcgaggatgcctgtggagtggtgttcccgctacagttctagtcaaggcttagctcctgttgtctttcgtttttccgctgcatttatgtaagacttttatgatgtttgtaagacgtggatctgaatgtcaacattgtcgtttgtgtaccccggccggtcctggacggggattttaatgcacattctgcttgaattctattcaggaatttctgggcgtgacaggtaccgaacgaattgaggtcgacattgcccatcgaacagcagtacacgacgcaagtttaagtagacatctgtcgacccaatttgtcattacgacttcagaaaatgtgactcttcttttgaccatccaacaagatattacttccaaacaaaaacatgctcatgacaaatacagttatttttgcacaagtcggaacaattgcttcaggtacaaccttttcaagaagaaccaaaacttgtaatcacatcattttttgcattcaacaagtcaaataattttgaggttccaagaacagtggtcaaaacagtaaagaatcaaaatacttacaactcacaactcaaactgcgccattatgctacaaatatatactactagtaggcttcctctaaaactgctgcactttctaaattcagaccaactacttacaacaaaaacaccacggccatctaactaccaacgtgagtgggct

SEQ ID NO: 8585 - DNA, 3916 bp, Oryza sativa
gtccggtcgtccgacccggacgccaccatcgtcgccgcgccgccgccgcgggcgtagtcgagcgcccacacccgccgccctcgtgctcgtcgcgctcccagaccggcacgccgcgctccacgtcgtactccgtcacgacgccgtcgtagtcgccgcaccccacgtgcgacgccgccaccgcctcgccgccgccagggcgccaccgcacgctgctcagcttggccgggacgcagatgcaggcggcggggctagacggctcggcgaccctgtaaatccggatcttccgggcgatgccgccggtggcgaggtggcggccggtggggtcgaagtcgaggctgccgatggagtcggacgcgcccgcgagcgccggcgacggcacggtggccgccaggcgaaactcccattcgcacctcggcggcgacagcttgtcctcgtcgtcgggaataatgccggcggcggcgtgttcttgctgcagcgccgcctcgtcccggtgatcctgatcgtgcagctgctgctccccggcggcggtggacgtggccggcgaggaggggttgctcatggaacgctagcttgctcgcctcctcatagggctaagctagctaccaagctaagcttagctcaagctcaagctcacaaccctattcttttcttgattcgagatcgatttttttttggtttgtttttgttgaatttgatttggtggttcttgtttgtcctggggcaagaactagagagagagaaagaaaaagattgtagagagagagagagagagagagagaatggtttggttgaggtggattattaatggagagccacaggagaggagaggagccaatgagaggaaaggtttaggttgcagtgcagggtttgtgtggctgagtgaggctcatgtcgtggctgcatttgcaattgcagattagtacgtgctcctggtaagtggcatggtgaccaatcacaattcaaattcaatgcgaatccaattcaagctggctaatggctatggcttgctgagctgagctggtaggggttagttaattagtttggttaggtttggccacatatacacaggcagataatggtccaagatcgaggcagttacttgtactgtactgtgtcctggttggaatatttctcaccatttattttggttagcagtacatctcaactagtactactctcctgcctcttcttttcctttatttggaaaaaagtcaatcctccttacatgtaatcaactaatttaatcatgcatgaggccgggttaattctcatcatgtcaactattattggtacatgcatgcaaagtataattcattcgatcagtacaaaactacaaactgaaaataaattactccatccgtttcacaatgcaagtcattctagcatttctcacattcatattaatattaatgaatctagacatatatatatctatctagattcattgacaccaatatgaatatagaaaatactaaaataacttacattgtaaaacggaggaagtacttacaatgtcatacccacgagtctcctaacacacacctgaaaagacagatagacgaattctcggtctcactaaatttgtactcctaaagctcacttgcgcgtgtgtaaattcctattgaaactaaagctcactcgcgcgtgtgtaatatatatatgatttgtttattattgacgtgcattgcacattacttgttcaagaaattaatattttttttcagaccaaacaaaatttaatttatacgcagtcaaatgttggataagagaaagctagctgcctgcaaattaattaattaatttaaattttaaaaatagattaatatgtgtcgacgagggatgcccgtagaccggatatagagggtattggggtacgctggtacgaggatctacgtagtacgacatcaagcaaacagaaaacagagattatactggttcaggcccctcggaaggtaataaccctaatccagttgatatgagattatatgattgaaatcacatattacaaagggtataatagaactcgatgataccgtcgagaccgtagtcgagttggttcgactagatcacctggcgacttggctcctgtaggctccggcttcgtaggctgtggtggatgtgttggcggtaagatttgatgccttaggtcctcccggggggttccttttataccgtggtcagttggtctttaagtagaactcggagacatcagaccccacacgatacagtaacgacccggttctgtccgagtaggactccttccatccgtggactccatttctattacacgatgaatttccttaacgtgtacaggaaacatccgtatacacgcaggtataccatatcagtatacgtcgtatatccaagggtagagggtataccttatccgtaattctgacaatatgatttttaaagaatcttttatataacgatttctctttttttttgcaaaaactacatagtttagcaatttgggaaacatacaagcgggaaacgggttcttttgtttcttttgtggttgtaacaaacgcaacctagtatgtactcgaaattgtcaaagtttttgtttgtttagtactaattaaaagaggagaaattaggctttgggggacaaatgaaataaaataaaagatcgatccccattggaattattatatgtatagtttgtatatataggatcgagaaaacagtggagatatgagatggacgtccttactagctggagtagctcttttgttgtatagatagatagatgagattggtggtcacaccgttgacaggtacgcaggcagtgaacgcgtgtggaccagatcgtttccagttcgtacgtactagctttattagttggcgtaattactgtgtcctagttagctaccacttgcaatataaattattgttttggagcatatatatgcaattaactggcatcatatttagattagtagtatatatgaatgcatgtgtgtgataccgcaaccttttttcaggaaaatgtgtagttttcatatttagattagtactccctccgtccataatataagctccgttccataatataagggattttaagtttttgcttgcaacatttgaccactcgtcttattcaaaattttttgaaattattatttattttatgtgacttacttcattattcacagtaatttaagcacaaatttttgttttttatatttgtaaaaaaaatttgaataagacaagtagtggtcaaacattgcaagccaaaactcaaaatcccttatattgtaggacggagggagtagtatatatgaatatatgcatactggtggagaaactatctttggtcggtccggcaaaatccacaatagtcccggatccaaaaagaaccgggactaaagattgtttttagtcccggtaataaaaattttgatctttagtcccggttggtaacaccaaccgagacaaaagatgatctttagtcctggttcatcctctgtcagatgtatgtcagggggccgagaatctttagtcccggttgatgtcaataacaggaactaaagatcaccactttagtcacggttggtagtaccaaccgggactaaaattaaacacgtacggttggtactaccaaccgagactaaagatcaagaatctttactctcggttggtagtactaaccgggactaaaattaaacacgtagtatataatccctatccattattctctcctccacagttacaacttagacagatcgaatctcacccctctcctcagatctatcctctctaactctcctctccaactcctccccttctctccccttcctccttccttcccagccggcttccccttcccatccggcgggccggccggcggcggggccgcgcccggcggggtcgcgcctggcggagggcggcagcgccgcgcgcggcggcgggc

SEQ ID NO: 8586 - DNA, 3202 bp, Oryza sativa
atgtaacgccccgattttcgttcgggattaaaaatcatttaataatgcatttcctagaaattaaataaaaagttaagcaatttatccaagtgaattattgggagaattaaaattttccctttaaaaattattggccgggaatattttgtaatattctttgtgccctaaaatactctccggaattttccgtgaattttcggagctcgagaaatagttttaatagcacaaagatcattgcatcaattaaaataaaacgaaaacaaataaaatcctccttttcctcttcttgggccatcggcccagtccaccccgccgcgcgcgccctcctccttgtgggccggcccaagccgcccctccctctctccccgggacgccgacaggtgggccccacctgtcggacccgtccccttcctccagccggcgccgccgcgcccgcaaccgccgccgcgtccacgcctccaccttctccgggccacgtcagccacgtccgtgtgtgcgccgcgtcccccatgcccactcccctctctctcccgcccgcgccccgcgcccgagatggccgggattcgattttcgaatcccgcctctctctcctcccccacttccccacgttggccgacgattcccgcctctcccggccacgtccggccctcccctcccctatttaagcttccccgtcgctccctctcgctttttccccttctcgccgaactccctcgtgctccccatcgcccccgcgccgtgcaaccactcgccgccgccgttttcgctactccggccgccgctagccgccgctagggtcgccgccgcaccgcgccgtcgccgccgtcgggttcgcgaggctaagctccaccccggccgccccttccccgtcgagtttcgtcgccggaattcgcatcccctcgcgctccggtgagttcaactgctaccgccgctttcggccatgaataccggtcgccgtggttcatctccctccctctaatctctctcttctccttccttagggcaccccgaatcccgtccgccggtggccgtcgtcctcccgtggctcgccgtcgccgttcgccatcgtcttcctccgcgccggccaccctcggtgaggcatcctctcccttctattcccctccctctccctcctagccgccgctttagcgccgccgcccgttagccgtcgctttagcaccaccgcccgtcggcgccgcctttgcgccgccgtctccgtcgccggttgccgtcgccggcaacgcgtgtgcgcgcgccgtcgccgtcgccgtggccgcttggccggtcttgagccgagccgggtcgccaccgcccgtccgatcgaccccgagggcgatctgggccgtcggtcccgtggaccggcggtggaccacccgcgtggtcccggtccacggtgaaccgcccccccttgtgtcgctgaccggtggggcccgcttgccggcgccgcctctcccccttgctgacgtcagcgaggtccatttcctttgtaaaaataaataataattacgcaataaatcgagtttaattctagaaattcatttaaatggctcaaaacttctaaaattcatatctaattcattcgaactccgaattaagccattcaacttgcaaaattcatctaaaattgagctctgcatgtttgtttagtttttatgtactgtttccttggtttttattagagtttttcctcattttgtgtgccagcgtgtagaatccgtcgtttcggaagtccgcggtcgcgaggaaaagagttcggaagatcaaagtgaagaagcaaggcaagtcacacattccccttgagcatgttgatcccaatttacaaatgttttactgtttgcaaataaatatgcatgttttgctaattacatgggatccgggtattacctatctgctcgcttgtgccatgtttacttgatatctgttctttgtcaaccttgggtaatgaatcgactagctcatgttacttatgtgtcctagctagaactatatgcttagccatgcttaattaccactagctcagttgatgggataattacagtattagacctttttagtatcagagtgagctgcgtgctcgagacatctggccatgcttcatggtcgtaattatccaactaaaatgcgactgaatggtgggctgtgggtgcatggttttgctagtcgcacccatggcaattaaggaccggttcgcgggatgccctggaagaacttatcgtacttaccacaagccagcgtgggcaacggctgggcttgtagtgtagctttcctctagccgacgcatccaggcaagggtgggcgtgatggagtttggatgggccctacgacggcctatgcggcttccggattcacctaggcacgagaggggactgcccgctgccttgcgaggagtgggggtgaaacctgaggtgtggtgtgcttggttagagggggttatgcgaagggtcctgtcacggcctctttccggtatgtcgtggtggcatgtcggtgcacgggaacgtgtcgtggggctgtgtcttgtgggtacagttgtacacctctgatcagagtaaaactattcgaatagccgtgcccgcggttatgggcggtcgactagattcaccgtgattagtcccaccttaataaatcgactcaatacactgtagttcaggtgggttggttgggcctgttcaacgtggtgtagcgttgatcagtggagattcaatattactttaattactcaacagttttactgttttgctcaataaaatgttttacaaccgcctttatgcaaatagccacaaaccatccttgtatccccttgcacatctgcatcgttggtgtggcttgctgagtacggtggttgtactcagttttgctattattccccctttttcagaagtgtagtgcttctgagcggaagatggagttagaggaccaaggctcagaccccagttgagttttgcctgtggagtggagctgaagccccgctaggatcgcctttttccgctgctgtcgttctgtttcggtgtgaggactaagtgcctcttccgttttacgctttatttacgtttggaactgtatattacttgtcgttttgtgtaccctggctggtcctggacagggatttaatacgcaaaatagtctggaaatttgggttaaatttctgggcgtgacaacgcgttagtacagcactgcacgggtcgagtcacacagcacctagtat

SEQ ID NO: 8587 - DNA, 9795 bp, Oryza sativa
attttctcatcattagcatgccttaagtgtttttgaattattccctcagatacttctcaagaaagcagacccagatgcttcatcgctcgatgtagagaatctaattgccaacaaaaaggccaagttggatgatattttgagggagtttatggatgctaacagacaggaacagacttctgaatcaccagaggaaacaagcaagccaatggtagacaaaaattctccaagcatgtcaagacctgttcagaccaatgcaaagcaagatgagcctgctttgactctgctgcgaccagcaggaagcaaattgaagcaagatgatcctcctttgactttgcagcgaccagcagggagcaaacccaagcaagatggtccttctttggctccattacgaccggtagggagcaagccaaaggaaaataacacttctttaaccttggtgcggccaatgggaagcagaccaattgtccggggtaaaccggtgcaagatagttggcctagcaaggggagcttagctgccagaagagagtcgagcgatgttggcagcacctcaagaaagaacaatgtggatgtttccttgcggaaacccaccatacatcagagtgatgatgatgaattgaagtcgaagctgaatctgaaaccaaatattgacttgaaaatgaggaaagatatggacgaggatttggccaacatctctcttcttcaaaagccagagctttcagtagataatatgaattcaaatcaagagaagtctgatgctggacctgcctctgttgcttctggagaggataatggtgcagttgacccagaaacaaatggtaaggtacaacatcccaaatgcaacaggccatgatgagctggttcttttggatctgatggattgcaaatttttcaatcttcaggtcttgatgaaagagtagtgattgacagtattaatgatcgtgagtcatctgtgcttcctgatgatcttagtgcaggtaaggaaggcataatagatcagtgactagtctctattcatccatcatactaatgttatgttaaaattttcaagaattacagccatctgagcaaaattttaaccgagaaggcgacccttctgtggtggatgatcaatcagccgtcagcagtaatttctctatgcaagctttcttgcaaggaaaacctaagatgtactttctgatgaaactatgcacttctatttttagcataacattttcatcgcttgtaaaatatatatttgacatttctgcttaactaattgtacttcatgttgttacattgatccaaattgggtgtatcccttcttcttttgagtaactcacgtcattacagtttctcgcatgttggccgagctaccactaatatggcaattactacattgtaggaaagacttagctgttgaaacatttccatctcaagttgatgctgagaagatgaatgccagtgagaataacatgaattatgttgatgatggaggcaatgtgttatcatcgaaattagaggtaatgtgaatttcataatgtttgagcttcagcatcttataggcttattatcaaactcaacaactgtagttcttagagtgggtgttgccttctgtggaatgagatgtttccctattcaagggtcattgagtcatatttcatccttttaattcttctagatattgattataactcttgtttatggaatcactaatgcaggacatcacagagagtgactggacaaggctggagaattatgcaagtaccggagaaaaagttgaggtggagctgataaactgcagctcgaaaggatttgttgtaagtttttgtccagttttagaattagcacctttttaatcaagttataatgaactgatggtacctgacctctatcatcatttctttgccaggtatcactcgattcattgataggtttcttaccgtatcgcaatcttgctacaaaatggaaattcttagcttttgagacttggttaagacaaaagggtggcgatccttcactcttcaagcagagtgtgggcatagaagaaagttttgaggtcaatgacaggaacatagaatcagtatctagctcagattcagaacttgctgtgcaggatcaaggttctatgccatctaaggaaaaatttgaagatcttcttcgaacatataacactgagaaatctaaattcttatcatcatttatcggtcaagtatgaatcttttgttagtctccaaacattcttcagttgaacccttttagctaacatgccattgcttgttttgcagagactccgtgtttcagttgtcctggctgacagaaaatccaagaaaatatttttctctatgaagccaaaagaaagtgaagaattgattcagaaaaagaaaagtctcatggtacttactatgttgaaatgtctattagcttagttcttttgctatgcttagcatggtccaacattttcccttttattacttatttatttgttcggctgcacacactgtttttcttaacatgcaggctaagctcaatgtgggagatattgttgaatgcactatcaagcgatttgtttactttgggatatttgttgaggtaggtctaaccatattttctacgctttttcattcagtatcagcagctaactgtttctttcaaaggttgaaggagttcccgcattaattcagcagtgggaagtgtcttgggatgaaaccttggacccatcagtttcttacaaaattggtcaggtaacacttgttttttgcatggaccttatttttgttgcaatctggctttgttaacagtgtgtgtgcacccatgtgtggataaaggaggagttgcaagttctcatgttcattttgaaactgacatacctctctatatcgtctagaaacttagatacatcacgtgacaatgatcataatgccaaactttctgggatttacagaaatttattttgatttccaggttgtggatgctaaagttattcaactggactataataataaccgcatatttttgtcacttaaagatgtaaaggtacctgggggcctttccccttttccctcatggtggttcagcttattgaattgctgatttcaggctttcatttattatttttgtcatttcccccttctatgcagccaaatccttcagtaggcgcattggaagctgtcattggtgaggaactatcactgggtggagctcttgaacctgcagaagcagattttgaggtttgtgtgacttatggcattatttatcatcatcttgaaatttttcattgtttgtgatttgaaggttatgcatatttagagggcctgaaatctaaatctaatgccctctctctattcaactgggaaaaaccacgtcatcagattgttttctaacttctggctaaatgatgaaaacatgtatagctgctacatggcagttgcatcccattttctgagttatgtataatatcttagcctgtgccaaagagatcgaaactttttgtaggtttgctggtagggcctcctgcatggtctgtgattgaatatgggcatacctgagttttttcccttctattgcaagcatgttttgtcatacagaagttgatagagctctgtatttgaatgcggggagtctgtgctacccaagcctggatccttcctatcttcttagtttgtttaattagttattgttcttcattcaaacttcttttctggatattttgtggacatttctgagagctgtagacatagcagtgaacttgggtcatgcaatgtttgtttcatacgtctgccttgtggcattgattttctttcttttccttatccatccactttgttgcatccttgttttaacactccattatttgatcataattattttagtggcctgaagtggatgctctcatggaagagatgaaaaatattgaggaagttagggatgtttataaaggacgattcttgcgaagcccaggactagctccaacctttcaggtaaaatctaaaatgtagatacgtttcatgttcagcattcacacaattctgcaccttagttgttggaattgacacctgaccttatttcctttttaaatctattgcttgctaggtgtatatggcacctttggttggtcagaaatataaactccttgcacgctatggaaataatgtccaagaggtatggacaattaatgttaaatgcttgatcgagtcacaagctgaaaattgtgtgttgtcattcttacatagcatggactgaactcttgtgcaggtgatggtggagacatcattagacaaagaacagttgaaagaggcagttttagcgtgcacaaacagggtgagctgatgatcagcgtctccgtgctgtagtatttttccttcttttagcttgcgaagcagatggttgtacagaattgttgtggcagtccaattttgcatccttgtagcatgcttttgagtcgtttacacctgattttcttccttttcaagttgaaaataccaggtgatatgtagtcctagctcaactttgtagaggatgacaggtgtaaatcgccttgatacgttactacggaattgcaacagaattcgatttgcatctttcacggtgctagaattaatctaccatatttttgtttgaacaacgtagtaaatgataggtgatagcaccggtaacatggtttattggttaatctgaaatttggaatgaagataaaaaaaattaatgattcatccaactagatattaattatcattaccataaacaggtttgtttttatttcgttttcatatcgacacgaacaactcagcgccaatgaatatactcgctgtgtgggtcacagttgtttcattgccgctccaaaaggttatgtaaggctgggatcatgatataactcagcttaaaaattgattttaagaaattagaaagaactcaaagtcagacggcatattaccattctcaatatcacagcaatcacattccctaattaaagtcattgtaagtatagcggagaaacaaaatgttgaggtagagtttctgtatgaagttggcggtgtcaaacatgataattaaaccactgatgtcgtagatatggttcgtatatagacctatggtttgggaaaaaaaaaagagaccattgaagtgataatttaaatacttaatagtaatagactctttgatggagtattacaacatgcagcagtggcattaatacgccagtacattaattaagttacacatatgcaggctccattttggtttcttttaatttatcgtattacagaatttctgtagccttgctgatgatcacttggatatcatgtactagtaattaacaataggatgcatacaaaagatggcccaacgacaacagaagatgcgtgcatctgacattgtctggccttatttggttggtagtactccaattaattaacaagagatgatgcattcttgtgccttagtttcttcacatgcttggcttcacgttgagcctattcgcaatcttcacccccaacgactcatcacactgcatgaagtaaatgagttaattacatagttagtgcaaattaatagctttttttgccggaattagtgcaaattaatagcgattaagtcatattaatttcaaattctctacagtggtttaaaattatatatttcatataaaataggattaaataatttatctatggattcataaaactgttgtgctaaacatggtgttaatcatgtggattaactaagagaaaacaattaatcattactaataactactccctccgttttttttatatgacgttgattagttcaaactttaactagtagtgtcataaaaacaaaaatggaggtaatactaaattgctggtatgaattacctgggagaggtagttgacccagatggcgcggagctcaggggagaccttggggtgcgcgagctcgccggcgaagcggcggatgaacctctcctgtctatccggcgcccacgacctgtacctctccccgggctgcttgaagtcgttctgcttgtgtatcgtcgccttctgcctcctccccaccacggggcgcggcgtgatgggcgtcggcggcgcgtggcggagcggcgcgtggcgcgatgggtagtagtccacctcctcgtcccggtgcatgaagttcatggcgccgtcgtagtggttgttgtggtgggcgcacttgggcgcgttcaccggcagcatcaggtagtttggccccagcctgtagcgctgcgtgtcggcgtacgcgaacaccctgcactgcagcatcttgtcgtcggagtagtagatccccggcaccaccagccccggcccgaacgccagctgctcgttctcgttgaagaagttgtcgacgttgcggttgagaacgaggcgccccacgggccggagcggcacctcgtcctccggccatgtcttggtgtcatccagcgggtcgaagtcgaacctctcctcctcctccgggtcgatcacctaacagtattaaataattaattagaaggagtactgcggcttcgaactcagatcgtataggcgttaatttctggatgatcacctacctggacgaacagcttccactcggggaagttgccggcggcgatggagtcgtagaggtcctgggtggcgtggctgtggttcttgccgccgacgagcgtggcctcgtcgtccatcaagcagctgacgccgcaggtgggcttccagtggaacttgacgtacctggccttggcgtcgcgggtgacgaaggtgtaggtgttgacgccgaagccgtccatgtggcggtaatcggtggggatgccgacgtcgtcgaagaggaagaagaaggtgtggaggctctcggggtggtgggacaagaagtcgaagaccctccagtactcctggacatgggagcgcgggttgggcttgaaggcgtggatgacgtcggggaacttgatgccgtcgcggatgaagaagacggggaagttgttgccgaggaggtcccagttgccctcgcgggtgtagaacttgacggcgaacccgcgcgggtcgcggatcgtctccgggctgccgcgctcgtggatgacggtggagaagcggacgatgacgggggtctgggcgcccggggaccggaggaagtcggcgcaggtgatgtcggtgacgtcgtgggtgcactcgaagaagcccttggcggaggcgccgcgggcgtggaccacgcgctccgggatgcgctcccgggcgaagtgcgccaccttctcgatcaggtggtagtcctcgaggaggatcggccccctgggccccactgtcagcgcctcgttgtcgttccacaccggagctcccgcgttcgtcgtcgtcgtcttcgtgtcgaacgagctcgacggccggaactgcatgggtagcacgtattactattaattaattaattaattatatacttaatgatcgactagctgaatcaaccagccatgcatgtttgaagagcttgagactaaaaaagaaatattcgtagaatctagtcgataatctaggttatttcaggaagtttctgataatcgaccaaatattctataagaagttaagctctctcttgaatctacacaactagctaaatgaaacctcaattattaactacaagattaagtagatttagtctcactagtcactgagtgactgaccttgcaaggatccatggtagtgggctagtggcagcagcaggtatctgggagtgagaggggtttgtttctgctagctctccagcttgctcggtgagacagcctgcctaaaggttatatagcgggaggtggtgaggagcactgacctccccggtgagcttaccggagaccggtgccacacactgactggtgggcccgggtggccatactgcatggttgggtcccacaggaactggacgaggataaggtgaggtggatgtgggcccccctcgtgtggaaaggaaatacatgcattgcctggattggatgcatggagtgtcatcacttcatcagtgctcactagctgcgtgccatcactgcatgtccatcgtcagatcagatcagatcatcggatcatatctcttcgattgatttcaacggcgccgaattgctgccatcgatagcttagctcatcccctttctcttgatcggtcggccaaagtttgacatgcttgcagttgcagctaacgtctctgcattttctttcttgtttctcagattaatttcaggctgcttaattattctgtaagaacgaggtgctctttgtgctagctagctatggctcagctacaccctcgtttatcataaacatacacgtttctcaaactgtaagctataaacagtgtgtttcgtacaaaatctttttatactatataaaagaatttaatggtgatggtgaatctaccatcatttagagttggtgagatcttctaatgctacataaatacatctttgtgtgtggtttggttttctattggatgtttgattgcaattatgtttgacaaatacaatttctaaatcaagaaattcacataaatcttttaaaatccgtccgttgcagagcacgttactttgctagtctttaaaattttaaataaatttagttttcaagtttataataggtaatactgagtttatcatgtactattcacctgttccggttttcatgccactaactagctcagtcaaactcctttatcgaacacagcccagccagaatgcacccttgtctttttacctagtgctataagaggaaccaattcaagatgatgatgattgatttaccttgtagcattactacgcagttcaaattactaacctttcagattaggtacggtctgaatatgtgatggaagatcgaagcagctgtatctcataaaataaattacagattccgtctggaaactgcaagacgaatttattaagcctaattaatctattattagcaaatatttattgtagcaccaaattgtcaaatcatggcgcaattaggcttaaaagatttgtctcgtaatttcaaggcgaaatgtttaattgttttttttctacatttagtactctatgcatgtgtccaaacatcctatgtaacagcgtgaaaaattttgtttgggaactaaacagaccctgattgtgatgcaacccataagtaattgcaaaactagctagctatctacagcatcatcagcatatatcttggtggtctaaacttctcaggaaacaaaagatgagaaattgttctgttcttagtccacgctgatgataacgataggtgtgctgtggtgggcacaagcttttttctttctttttttttttgaggggaaagttgcttaagatgaagtgacataaacaagattaattcgaggaaaatgtgcgcatctcagatgtgtactccatttatacaaaacccagcaaattaagaaggtacaattatctgacagactagcgaacaaactgaaaattatagtcgtagtactacaaatttgcagtttgtggctgaggggaatctatcccatctggtatatgctgtcactttgtgctagtactgtactatgtactagcctgtagcctctacttttgtaattgaatgagaatatttgaatgttttacaccacataatggaacagctcaaatctcataagatcttggagagatattcttgattactctgattaatgggtcatgtgttgatgcatatatatatatatatatatatatgttaatgaatcaaaacgcatgcatatgtctagattgaatgtgggcaatgctaaaaagtattatattgtgaaacggaggaagtagtagtcaaatggtgctaagatctgggttttcatgaaacaacactagacaccaataatgcaatcggtgggtat

SEQ ID NO: 8588 - DNA, 12997 bp, Oryza sativa
catgaaagtaacattttccttattctgatgttctctttttttccttctgtttttgttagaaatttctggtcacactgtttatctcctgtatcaacagagcatatatttaattaagtctatcgccactttctcatctgttctcattctctttaggacaattgatgacttctgaaataaagcacggtggaaagctatcctgtagcggcatggattctgatggcccccatacttcacttatacatggtcttcctgatgagattgctattctttgcttagcgagagttccacggcgatatcataatgctctcaggtgtgtctcaaagagatggagggcactgctttccagtgaagagtggcactcttgccgcaagaggaacaatttggatgagccttgggtatatgtgatttgtaggagtacgggcatcaaatgctatgtacttgctcctgatcctacaacccgctccttgaaaattatgcaagtcatcgaacccccatgctcgtctagggaaggcatttccattgagaccttagacaagagattatttcttttgggtggttgtagctggctaaaagatgctaatgatgaagtattttgttatgatgcctcatcaaattgctggagcagtgtagctccaatgcctactgctaggtaaatatgatgacaaagtttacttactggccattaacattttttttcacgtgaagctgttttatgacatctgcacgcattttgacttgcctcaattgttttcaggtgctattttgtttctgcagctctggacaagaaactatacattactggtggactaggtttgacagacaagtcgccaaattcatgggacatctatgatccagtcacaaactcttggtgtgtgcacaagaatccaatgctcacccctgacattgtaaaattcgtggcattggatggggagttggtaactgttcacaaggctgcctggaacagaatgtactttgcaggtatatatgatccattgtgccgcacttggaggggcactgagaatgaaattgccctatgttggtctggatcaacagtcgtcatggacggaacgctctacatgctggagcagtcgctcggcacaaagctgatgatgtggcagaaggagacgaaggagtggatcatgcttggtaggctgtctgacaagcttacaaggcctccttgtgagctcgtaggcattgggagaaagatttacattattggaagagggctgagtatagtgacaattgacctggatactgtcagggcagatggattcttggtgtcctcttccacaggcccattggtggagcatgacttcccacctgagagatgccgggttatcagcatctgaaggcatcagcttaactgtatattgtccggagaaaatgtcacacatgtgaaggtgacatgggttgattgatgcacatatgaaataaggcaatcctccaggcattgtttactcgagagagtgcccgttgctaattggtgtttaattgtttgtagtatttttgctgtatctccgacttgtgcccgtttgctgtaacaaacgaagtctgaggttcagttgtttatttcacacctatacatattgagataataacttgttcataattcacgagtgtgatgcgtcctgtgattgttatgtgtgattgttcatttttcttgcatgctgatggtgtatctaggcattctattgctgatatgttctgaatttttcctgaatgagttaggctgtgtttagttctatttaaacttctaactttttcatcacatcaaatgtttagacatacgtggagcattaaatatggacgaaaaaaaaacaattgcataatttgcatgtaaattgcgagatgaatcttttaagcctaattacgttatgatttgataatatggtgttatagtaaatatttgctaatgatggattaattaggcttcaaatgtgtgttcatacgctcaaaattattttgctaaaacaactaaacacggccctttagtttacagataaaattgaagtagctaagttctgacttatctttgagccatataagatttgtgattgaaattttataaattagcctgtgacgaaacattgattttttaaaaaaataagaaaatgatagtgggatgaaaattttaaaacttagccatttaagtgatgaaattgaataagaaaatgatagcgggattgaaattttaaaaattagccatttaagtgatgaaattgatgttttttaaaataaaataaaaaataattatcagagccaggtttcgatcctgggacctgtgggttatgggcccaccacgcttccgctgcgccactctgatgttgttgttttggttaaaaactgtcaactaaaatacaatacgaatgctgtctttttccaggtccacgcagaagaaatatagaggtaggaatatggtgccactgccaatctgccgtggaccaacaaaagactgggttgggtaattatggttgcctacccatttgcattgacagtgacatagggaggaaatatatacttcctccatcccaaaatgtacgacgccgttaactttttttaaaatgtttgactgcttgtcttattaaaaaaaattaagtaactattaattttttttccaatcatttgatttattgttatgtatacatatagttttacacatttcacaaaagtttttgaataagacaaacggtcaaacatatttaaaaaagtcaacagcgttaaacatttaaagaatgagggagtaattcacatgctcacagcagcattggtaaaaggtaatggtttggccatccgcatcaaccacccgtgctagtaatcttcacgctaattaactgcacagcaacttctgtttcttctcttattttttttttgtttaaattttctttcagttcttctgtccaacgtccaaaagtccaaacatgccaaactcttcaacgcacatacgtacattcctgcctaagtagctgttaaactgtagccgtatgcctccatgtgtgtcgatgtagggtttaccttaccgccggtaaccgtgtggttaccgtggttaccggccttaccgcgaggtacggtaatacaataccacggtaacctccttaaatttaaataaatttaaaaaataatttaaatttttaataaattttgtacggttttttactgttaccgcgcggcgccggtttaggaaacccttgtcatccacatagatgcacacattagtagtactactagtcttctcgtcgtggatgcttgttccatttgatcactcgttcactcacgtctcacgtttatatcggggacggatagctacacacatcaaactaattcatttgcttctctctcaaacaaaaagaactagtaattcatttcatttgctctcactaattgccccgacactccgaaaacgttgcgacgaacgcccgtacgtcttgaccaaatccaaacgaacaacgatccagcaccaaaacctcatgaataatccaatccaccatttatcttcatgcgtgccattcttgacccaaatttgattacaactcgatgcaattttttctcatgtttcgcgccgcctgtcacgcgttacctgcgttcccataccgccagtataaatacaacttctcgaatcttttcttggagaaaattagtacttccttttcctttttttacaatataagtcattctagcatttctcacattaatattaatgtgagaaatgctagaatgacttatatcgtgaaacggatggagtagtgatcaaatgtaacagtggctgaaagtttttaaccaattaaatcggagtcttgtgaggtctgaaatgtgcgtgattaatcagtcttgtggcggcaactttagtttaacccaagtccaattcggatcgcgtaattgacaagctcgtaatccgagtcggattcgatggctttttttgcagaaggggtataaacagaggagaagctcgacgtcgccatcgatggccgcggtggtgcagacgaagcagctcaacaaacagaccaacccttctccatcgccctactagaagcgtgaagagctcggcctcgccggcgactgcgagcgacatggcggcggcggcggcggcggggaggaggaggttctttccgccggtgacggcgtacgacgcggcggcgggcgcgaggcggacggtggcggcggacctcgacgggacgctgctggtgtcgtcgtcggcgttcccgtactacttccttgtggctctcgaggccggcagctacctccgcgcgctggcgctgctgctcgccgcgccgtggctcctcgcgctctacgtcggcgtctccgaggccgccgccatcgccctgctcgtgttcatcacgttcgccgggctgcgcgtccgcgacgtcgaggccgtggcgcgcgccgtgctgccgcgccactacgccgccggggtgcgcgccgacacgtgggcggtgttccacggctgcgccgagcgccgcgtcgtggtcaccgcgtcgccggccgtcatggtgggggagttcgtgcgcgagttcctcggcgccgaggtggccggcaccgagctcgagacgttcgcctccggcaagcggttcaccggccgcatcaaggccgtcctcgtcggcgagaagaagcgcgaggtcgtcgagaggctcttcgccggcggcgacatgcccgacgtcggcctcggcgaccgcgagagcgaccacgacttcatggccatctgcaaggtacacttcatggcctacgatccaaagctcgaaattttcatcatttcttgaattgaatcaatcacacatgaacaaaattgaagttttgcatcatgtggccactaataatttaacaattcatttagaacgccaaaaataaaaaaagaaaatattgtgaaattaattgtggtaggaattgcacgctcgattgttcttcgagtgttcatggcttcgatccgattggctcatttgtggtagcacgagtagcaagaatatgtacgcttcttagctttttgccttttttttttgttgaattgcctttttttcccctcttttcataggaaagatcaagaaggctctagaatttacattatggttatgcaaaacttgtggccaaaactcaatactgttggtaccatcacctcctttagtaggcagttagcagttgcttcctatttatttcgtcctttttaaaaccaaaaccccaaattagtatgtactcctatattcaaatattgtttgctcatgctgacttgttatagtaatatcattatcattgatcactttactcatatagtattgttttctttgcatcaattaatgtggatttagtactctctccatttgcatttactctgaatattgactctactgtttcaactttgaccactagcaatttttaattggttagactatcataaactaaaatttcatgcttacattcagaatgcaacctagcccatcatcaatatttgtttttatttaacgaaaaaaaaagaagacaagtgttcaaaatgtacatatgaatatactccaaagccagatatttgtaaaaattaggccttgtttagatttaacttttttctttaaacttttaacttttctgtcacatcgaatttttctacatacacaaacttccaacttttctgttacaccgttccaatttctccgaactttcaattttgatgtgaaactaaacacagccttagtgtgctaactctgttttggcgccaaattgccaatgcgcaggaagcctacatggtgcccaagaacaagcgcgcgccgcgcgccgccgccgacgagctgctgtcgcgcgccatcttccacgacggccgcctcgtccgccgcccggagccagcgagcgcgctgttcgcgctggcctacctccccgtgggcttcgccgtggcgctcctccgcgtgttcctcaacctccccgtcccggcgcgcctcgtccgccacacctaccgcctcaccggcatccgcctcgccgtgcgcggggcgccgccgccgccgccgcgcccggggacgccgggctccctcctggtgtgcaaccaccgcaccgcgctggaccccatcatcgtgtccatcgcgctgggccgccccgtgacgtgcgtgacgtacagcgttagccggctgtcgacggcgatctcgccgatccgcgcggcggcgctgacgcgggaccgcgcggcggacgcggcgcgcatcgcggcgctgctggaggagggggacgtggtggtgtgcccggaggggacgacgtgccgggagccgtacctgctgcggttctcggcgctgttcgcggagctgacggcgaggatcgtgccggtggcggtggaggcgaggcaggggacgtactatgggtcgacggcgagggggtggaagttcctggacccttacttcttctacatgaacccgcggccggggtacgaggtgacgttcctgccggcgctgaggccggaggagacgtgcgtcgccggcgggaggagcgcggtggaggtggcgaaccacgtgcagagggtgatcgccaaggagctagggttccaatgcaccacgctcaccaggaaggacaagtacatgaagctcgccggcaacgacggccgggtcgccgccgccgccgacaagcccaaggccaattgattagtccatccatctttctaaagatggcaggccacctaccagctgattaggccacttggcgcccctaagttggtatataaatctaatgtcatttgagaaaaagaaaagagaaaaaaaagcggctgtcatacaacggaatcccgttttcgaatgggatgataccggttagttatcaggttttgatacttaacctgtattatgcgtttctaccacgtatcaggtaatacttgcgaggtattagatgatatctatcaggtatcatacgattcttatcacgtagagggtgatacttgtgagatatcaggttctgatacctaaccagtatcaggagatacctatcaggtatcatgcgattctaccacgtatcaggtgatacttgtgaagtatcagatggtatctataaggtatgatgcgattcttaccacttagaggatgatacttttaaggtatcaggtcctgatacctaaccggtatcgggtgatacctatcaggtatcatgcgattcttaccacgtaaaaggtgatacttgtgaggtatcagacgttacctactagatatcaggagccgagcatcaaagcgtcgtcgccggtggtcccaccgtccacgtcccacgccggagctcgtcgccggcggccacatccttcatcgtccgcgccacgtcggaactcatcgccggcggccgcgtcctccatctccacgccccacgccggagcttgtcgctgacgaccgcatcctccaccgtccacgccacattggagctcgtcgccggcggccgcgtccttcgtcatccacgtcccacgacggagctcgtcggcgatggctgtatcctccatcgtccatgccacgtcggagcttgtcgctggtggccgcgtcctctgcctagccaagtatgtgctcgtcgtgctccgcaccgacggcggcagcgagggcagcaccttcgcgatctacttcctcatccaccggcgaggagctcgcggtcgcggggcagtgtgtcgacagggcgggcgtgggcgccgcaacactactgcccatgtcaaccatgcgtgcgcactggagcggctcctgtagaggctgctgctgctcaggacgtgcatggtcaggtatcgctcctctttgaataagcaaggagacaaaaaggatcccgtccggacggaattccggtatctagcattccaaaaaaaaggggccatgacaacagtaacatctggaggattccaagtaacaaacactctcatttctttgcactgcttcaacaacaacatattctaattaagttctcagctgaagcagataatcgatatatgagaaaaaaaaaactggcagcccaaaggccaccaaaactcagcatgcaagggaaaagggaaaacaaaatatttagcttgtgcaatggatctcccattagaggacaagcaaatcagaaaaataattaaaaaaaggtcaatttgatggtttttgaaaaatgatattttgctattacaattttcataatagtttgatacatgccactagtttatatttttacccgtaccccaaaaaatgtattttatgcagacctattgaaaactctcatattactatgagaactgatatggatcccattatattttctttttgtgactgtaattacaagtaagtgccacgccaaacgaaaactaggtcaacgtgccatgtagatgccacataggatgaaatcaccgttcaaacagccgagaaacttgatttgtactggttttgatagttgagggattttacctggttttatggttgagcggtgtaaatgtaactcaccataattgagagacctaaagtagactttttccttggaaaatatggcctggaaaaggattgcggcgtctgtgcgtccatattagatgggcctgattggtcgctgcggatgatatttggacagacagaattcttcagtactcacaagctaacgccggtattgcaaccccacaaataaacatccaaaaatttcataacacaatatcctctcaaagaaaatgaaatctttaacacaattggtgattacgtgacgcaagtacgcaacgagcaatcacgaactggcgttgacgagtcgtaggctggaatgctgctgatctcaaattaagcaggcagaggcagcttgctgatctacattttttcggcgatacctaacaccttaatcttcaggccatatctccagctaactgtctattaatttgttcgttaattagtactcctgctgtagtatgctagtagcaaaagcgaagcaacgacgagctgcaaagcaacctgcaacttgcaagcctctctgcaattcttgcgacccaaaccaatactgacactactactaatactgatcgatgatgcgtcaaggctcgtgaggctgctgcgtgcaaggaactcgtcgtcgatataattattgctgcaatgatccctgagcaatgtgctcccaaaatcttaggactgattctgacagattcagtcgtaatcagcaatgcgtgttgcaatcttactcctgtgtagtaacaattagtgcagatactgcatgcgtgttactgtcgattacattagcagataaacagcctctccatcatgtcaactgcatgccttctgaaacaattgatgtgatgtactttttacatgaacgaattcctgaattcctgatactgtcaactgtcaagcattgtggcctgatgctaatgctgcgaaaagttttatgatactactagggttgtgtttagatccaaactttcaactttttccatcacatcaacctgtcatacacacataacttttcagtcacatcgtactaatttcaacccaaatttctaactttagaaggaactaaacacagcctagcttctctagcacagcagcatgttcacttcttaattagtggcatctgaaccatgtgatttttgaaagtgaaactattattaactgatcgagttgccgagataaggacagctccatgttaaggtggggcatcacattctccagcctttcaagcaaccccaaaccatgccgaaaacacacatcttctacaatttgtgagattaaatgtcagggaaccgaaattcagtcatgcagatgtggattcagccacattttacggatctgaaactactgcgactgatatgtcagcactctttgttttcgtactagcctgcacaaacctctttttaagttaattcagtcggtaccagatgtcagaaaagttcctttgaattaaatctcaagatgtcaccagccaacagaccaaactgatcttctttgtatttttcgacttgggcaaatgtttgcccatgcaatgccatcaaaactgagccgcaaattcagttggtcaagctgaattctgttactaattctgttccgatttccactcgagcagagaaatagaaccgtaagtagtagtacaatacgaatttaagcggaatcagctcagattccacacgaggacaaattcgtattcgagctcgaaaaggcaaaaagaaaccaaaaacagaaaaaaaaaagaaaaggaatccggctgtgcttggattgcattggaagcaaagttcgtttaaaaaaaaaaactaaaactaataaaccagtccgtttcaaacaccaaaaccgcgaacgctataaattcggagggaaaacctctccgaatctccaaactcctccaatggcgaccgcgcgcgtctccctcatcctcctcgtcgtcgtcctcgccgcctccgcctgcgcggaggggctccggctgccccgcgacgccaagttccccgcggcgcaggccgagcggctcatccgctcgctcaacctgctgcccaaggaggccgggccaaccggcgccggggatgtccccagcgtggcgcccggcgagctgcttgagcggcgggtcacgctgcccgggctcccccagggggtcggcgacctcggccaccacgccggctactaccgcctccccaacacgcacgacgcgaggtagatttcgaatttcgaaccccaaattagttgtaaagtagtacaaagttcttgctctctcttttttttttcttttggaaattttgggttgagtgtttgtttgttggatggattggggcgttgcttgcaggatgttctacttcttgttcgaatcgagggggaagaaggaggatcccgtcgtgatctggctcaccggaggccccggatgcagcagcgagctggccgtcttctacgagaatggcccgttcaccatctcgaacaacatgtcgcttgcttggaacaaattcggctgggacacggtaacgatccatcgattcgataatacgttattgattgcatcatatgtttagtttccttagtatggtaacgactcagacttggtcataatattaacttgttaatgttgcatcatcgcttgcaagcaatcttgtggtgagagcaacatgaaaaaactattttgaccattgttgactgaatgactagcttggttaagcaagcaatagtgaaaataatgtccgtttcagagtttctcccggttgaagtcagtaactgttgaagggggaaaaaattattgtctagaatatcatccttgctatcctccgttaccaaatttggataactgttaccaacttactatattgtgttcctcactttgccttttagtgtcttattagttgaagaaaaccatctggggctagaacttcattgttgctatctgttaggttgttaccaacttaccatatgtgttccatttgactatcatctcttatgccaccacaatagtctttgttaagttttattgctttttacatgaactgatgcacgacagcagaagtttacgagtttattgaggacaatgtttccctacatagtattgttcgttattggtgaacattaattcctactatgattttttagacctttccaactagtttcatgatgagtttaacaatggcagtggtcattgctgcagtcagttcacatcttacaatgatcaagcctacacaccttttggttcctttgtatccaccccttctgataaaactttcttcatgcagatttcaaatataatttttgttgatcaacccactggaactggatttagctatagctctgatgatcgtgatactcgtcatgatgagacaggcgtcagcaatgacctatatagctttcttcaggtactactctcaacccttgtaactgacgtgcttgcctttttctctttgtttcatcaattccatgtgatatctgattacactatataggcttgttcaatccattcctttacaatactaaatactaataaagaaacataaatgatctccaatgtaaagtaatcatagcaatatgtttgttttaaaactgcaggctctgctcttaataatagttccatttcacaaaataattatttgcatactctacttgactaagtaactaacagtcaacagtctggtgtgcctaattattgctttcatcctcaatttgtggagtggttctcttacctgatatgatgctcctgtaaaattaattgctacaataccataggaaatttccaggttggaatttggcattgcttacatgaaaggatgtacctaacatatttgactggatagcttcattaaattagcggtagtagataacttccgaagatttagcaccaaaccagataatatgcacggatctctctaaagagttgtgtattgatctgagagttgattattttgtgttgttgacttcagcaaaaatgtagagtaatatgtagtatttgcttgattcccatgtcaggtgttctttaagaagcatccagagtttgcaaagaatgacttctttataaccggagaatcttatgctgggcactacattccagcattcgcaagccgggttcaccaaggaaacaaagcaaacgagggcattcacataaacttgaaggtatgatccttacccaagtttgccatatcttttaacttaattgcttctttgctattttacacagttttacctatttttcttgtagggttttgcgatcggtaatggcctcacggatccagcaatccagtacaaagcttacaccgattatgcattggacatgaaccttattaaaaaatcagattacgacaggatcaacaagttcatcccaccatgtgaatttgcaataaagctttgtggtcagtaccatattctacctttgagcaaaccacatatatctaactgcattgaacttcctgaatgattaatgctggcagaaaaggttgaaaaaccatttagggtataaatggggttcattacagttctctatatttcagctatgagatagtgcatttgtaataacaccctaaggtttcttcaaataatgagaactgttactcacacctactgatttttcaggtaccaatgggaaagcatcttgcatggcagcatacatggtctgcaattctattttcagctccatcatg

SEQ ID NO: 8589 - DNA, 20167 bp, Oryza sativa
gtgagagagaacattagaacaaaggagaagataacctcccaaattcactgcatggatccatttcacaagatttgcaatatcaaaaaaatgtaaaatagccagcaactagtcaataattaagcagtaatcagttttcaccatttatgcatgctgtaaaaaaacactatttatgtatatgtatgctgtaaaaaaccttgttactaataaaaattaaagatatcatgtatagcataccacaaggcaaattgataaacaatgaattccagcacatgtgcatacaacaaaggagacattagtacttaattggaaacaaggagatgcaggctatcccatgaagttgaataataatcaaaatagtaaaaaagaaaagaactaatacaagcaaggacaaacctcctgaaagagcgtgaggaggcaatcctgttggagcttcacaggtggtcatcccaacctgttactagtccagacaagattaaatatgcctcatcgcattttggagttctttgggatccaatgcttcacacagttaagaatctatatcctgcaaaacacttgtttttagcaaattgaagtagataagaacaatttctttgacaaccagatcagcggacggagaaaaaccatacaagaatgttatgtttaaatgtttccaaaaaaactaatcccagcaccattccaacaaaaaagcaatatcatgttgtatgcacatatgagaaatgccaacctcatcagagtgactttgcatatgctgcttcagatgagctggcttctggaaagaagcaccacactcttggcaggtgtggtcaccttcatgaacaaccttttccccatttgacttgtagatttccgatttgtccagttcttcctatagataaatttgaagtgagggcatcagatattcatataatgattcaaatggataagagcagaaggaattgacaaaagcacaaatatattgattgatggacctaaactccaatcagagaaccataacggtcaaataactcaatttaattaatacagtccacattgtctttaaaacataaggcataatatggcccatattcctaaaatatctaagtagttttataccttatgatgagcaaccatgtgagctcggatgagacattttttggacctaacaaccgtgcaaaattcacacttgtagcgccttatatccctgtgttgtgttgcttcaaccctcatgtctccatcaatatcatctccagagcacatctaatagtaggcaaatcagatagttagaaattcggcacacataaataagtcatttatatataaaaaaaagtaaacaagtaaaacattcagaggtagcgatgtagtcagcaagatagctgtaaaatgaggagaagtccataacatgaactgggacgcattgcagtctttactctttttttgacagagtgaccaaacaaaatacaggtatagcatatctgcaggtcgacatctaaaataaatctctacaattctgcattttcaatgaaataacatcagtgtgttacaactggctatcactaattggttaatcaaacaaatcaaaacaaaactatggtgccttgtcactaacaaaaagaaaaaaatatcagcatatcatcctcagttcggttagaggtcatcaaaggaaagaaaaaaaaaggacaatatgtgtttctagagcatgtgttctccatcagttaacactaatggagatggtatgggatccatcttgagatgcctagccatgatttccaaggtgacataaatttcccttctagcatcatgtgtcttgtcctctaccaaaaattcatggacgacaccatcaacttcaatccaactgcaacccggttttttgtatattttcctactcaacatctgcttcctcatatccaaagcttctttccatctgtttgataaggcatacatgttccaaagaagcacataaaccccatcatccccaggttctctctttataatttccattccagcaatctcagctaatctatcattgccatgagctaggcatgcactaagaagtgacctccaaataacaatatcaggctcgacatccatatgatctatcagagcttctgcttcttctagaagtccaccccgtcctaacagatcaaccatgcatccatagtgctcaagccggggatcaatatggtagacttcacgcattttatcaaataactctctgccttcttgtattaacccagcatggctgcatgctgacaaaactgagacgaatgtcacactgtttggaagtatcccagaccttagcatatcccaaaagagctcaacagctttcctcccattaccctggacagtgaaacttgaaatcatagttgtccatgtgaatgcgtccttcatctgaacttcttcaaatacagaaaatgcactagcaatgcttccactctttgcatacatatccatcagagcatttgtaacaattatattggtggtggcattagatttgcttccatatccatgaatggcacgtccaagatccaaagcaccaatatcagcacaagctgatagcacccctacaattgtaatatggttaggacggtggccctccaaaagcatcttaccaaatagctcaagagcttggataggctgcttgtcttgaacatgaccagtgatcagtgctgtccaagaaacagtgctcttcataggcatctgataaaagaatgacaaagctgaatccacaccaacacacttcatgtaaccatacagcatgctaccccaagtgacctcatcttttacaagcattctatcaaatacagtccgtgcaggctcaaacttgccacatcgacaatacatatcaaccaaagcattacaaacgaccaactcagagtccaatccacaccgaaaaatcaggccatgcaccacgctaccaatacgctgatcccctaatccaccagaggccgagagggcaccgacagcagcaaagccatcagggcggtggccagaagcaatggcgtgagagaacacggatatagctttccagtggtgatctaacttgagatgaagggacatgaggctggtgaaggagataatgtcagggtgggggatttcatcaaacaacctgcctgcgtcagccggtcggccaaactcggcataggaccggaagattttgcaggagatggactgctggttggggtggaggccgtgtgtgagggcctgggcgtggattctttggagctctcttatggttttgcactgggtgagaaggtggtggcaaacgcttctattcatcccccctctcctcaacgcaagaagctctcccgaacagcacaacctggaattagagctaaaattactaggaaaaaaagctacaattaactcatacgacatccacactgcttagactattaacaatttcgtgctgtttcaacgaacactgaccacaagcccagaatctaaacgcacagatcaggatcgatttggttaatactatctcatgcttttaactgctcaaatcgaaagcgaagaattaccaacgcgataaccaaatcgaagaaacatattcctaactcctaagtaggcatcggttttgggcatggtggttgtgtttgcaagcgaggattggatgcccaccttggaatctttgatgcgtttggactggaggagatcttggctgcgacgaggtgtgatttcccgcgcttctccgtgaggaggatggagcggcggcggcggcggcggggagtgaggactggggctcttggttcctcctcgccttcataagcggtcgcgccgaaaccctagagcctgggtgggtgggctttttcgcaggccgaaaatgggccgagcaatttttaagttgggcctgtactgatgggctgacattgctggcccactcgtgacgctcttctcctctggctcgatgacaggtggcccccacacgcggacacgcctcctccttgttgctttccgccggcgatgccattctcgccggagttcgcacgacggcgaggcggcggcgtgcgcacaggcagcggtgaggaaacctctatctccctatctatctatcgccgccgtgcgtttcggctcctgtttgttactgccattgttgatgtttacagtagcttggtggatctagctctagtagttagggatggaaagcaacaagggacactcaaaatgcagccttaaaatttcctctccggcgttgggtagtgttgggatccagcagtggcatggctatggtgcagtagaccttggtgatttgtgttgtacttgtcatagcttcctgtaggactagggttatcatggttgaatctgtagagaacccagaaatttacagggttgatagatgcaacctaccacctggggtgtgatgtggattgtagaaacttccaattacctcgccatttccaccagttatatcaagaacccaagtatcacggtgcctgtcaagttagacaatcttggtatattagaacatagtggttcagatatgtgatgccagcaccattggcattgtaaaaggctatgaagagggccaacacatcagcgatgatgatttacttattctttacctggttatgcatagtgactgctgttatttccttatgtgcggaaccatgattctgagccaccggggttctataatactgttgtctttgttggttcttctttttttttaagctatgtattttaagctccaaaagtttggagttagggccatgagttcttgtttcagtgagctctcttcatttgaactaaaataaatgtttaactcacttttatttcagacgataaactctatattttgcactaattcaagagttggggggcttggagctatgtaacaaaacttaattctttcaaccacacaagcaagttttcaaattgtcaaagttatttgcgaacttaaaaaaagcttgacatctagtagttgattagaataacggtagcctaatgcatacatagacccactacatagctatataattagctaattggttaactgaccaaatatatatgttaagctgtggtattggtggtggactgactacgccaaagcccctagcaactactgggaaacgggcttactatttctgataccaattgaattatgtaattaattttcaaataaatgaactatgctcgtaagttgctgcagttcaacacgctggggctagtaagctttggctgctagggtcactgcatatagaatactggtgaacacactaggtcggctggagggcatcgaggtcatctgaccccggtgatactactgtagatctgcccctcttgtactcgtagtgaaacaagctatttgtgttcatctattcaccacttgatgcttgcataggcaactatacatgtttggaactttgatgatggtgctctgctagcagatgaaaggcctcttgaacacattgaattgttgtagcctcggtgttcatatcttgaggaagaagaggctcagcatggcttgctgggatgttcaacgatgccgccatctcagacatgaatacgggattcatattaatgatgactggtagcgccttgccaccaccaactgcacggtgatcttctccgtctatgatggaattggttccccttcaaatgcatgctctgtcaatgaactctctatcagatcactcgctgactccaagctttttcccctttgcagttgtgcccttatcatctctcttgtagatcaccctggtaacgtgttcaagaaattgatctttagtctgaaattggacaagaatgatgaggtttgtagggatgaagaagctacatgtttggtgtgtgcgctattggtcaagaatcagaaccagtcacttttgtaacaggtaatttatggacattgcaaggtggatggtagagttttttcagtttcactctatttcttctttactactatttttagttccacaacactcatttccttttctttgcgtgagctcattgctctttatttggttcatggtactattaataaacatctgcatgtgcatgttatagattaaacactgaaaaaataaaacattgacaaaattaagaccagacaaataaactatatttggaaagaattggctggtaactgactgcctagctctctataaaaggcctccccaagtcccttcttccattgctgccagcattttgattctgtgtgtgtgtcttggttgcaaaaaccaagacatacacacagaatcaaataataacaaaggtttcctagcctcaaaggatacatatatatagtttccctacaatacaatggagcctgtcaatgatttccaggaaggcatttcaacagagcatgcctttgaggcagagcctgtgccatcattgtcggaaacaataacgccacgatcaatggtggtgagcttcatccttagtgtaactctcagcatcgtcgccatgaaggtcaccttgagctctggcttcattccgtcgttcagcatcccagccggcctcctcggtttttgtgtatcccgtgcgtcgatccgcattcttgactacttcgcagtggcacaactaccattcacacgccaagagaacaccatcatccagacctgtgtcgtcgcatgcacctcgatcacattcaccggtatatagacaatctgaaaatagtagttgatagaattgtgtgcactattttatgtttatctttactataaccgtacttccttacataggtggctttgggacatatattcttgcaatgggaaagaaagcagctgtaggggatgtcaatgcccaaaataacgttgaggagccaagctttgccaggatgatcaccttcctcttccttatcagctttgctggcatgttcatcatcatgcccttcaggaaggtcatgatcattaggcaccggttgacattccccagcggcacagcaacggcgcacctcatcaatagcttccatacacctcaaggtgtcaagcaagcaaggtatcatcaattaaactttacatggaaatgtttctgttggatcaagtactattcgaagccttagattacacaatcaaattgactatttgtgtttgcaggaagcaagtgacattattgtttaaatcgtttggaggaaccatcgcatggtcgctcttccagtggttcttcgcctctgggccgggctgtggcttcaaattcttccccacatttggcctcgaggcatataaacacgggtacgcaatcagacatgcatggatggaattcatcagctagcgtagtggttgattgggaaactaattttgttcccttttatcagattcttcttcgatttcaccatggccaatgtcggcattggcatgatgtgcccgtacatgatcgtgttctccgttttcattggcaccatcatctcgtgcggtgtaatttggccgtacatcgagtcaaaggagggcatctggtacccaagcaaccttgggcccaacagccttaacggcatcagaggttacaaggtgttcatcggcttgtccatgataatggctgactgcctcttcgtcttcctctgcatcatggtccggacaacatgtgccatgatcaagcggcgtcggcaggcaatgcaaggtggtggcggtaatgcgcagccattccagggtatcgacatcgccgatcagccggtgaagagcttcgatgatcgccgcagggcgcaggtgttcctccgggacgagataccggactcggtcaccattggctgctatgtcctcctgtcgatcatctccatcgccgccatccctcacctctacccacagatgaggtacagccatgttgcgctcatctacctcgccgcgcccgtcttcgccttctgcaacgcctacggcttcggcgtcaccgacatgaacctggctagcacctattgcaagatcgccatgttcgcgttcggctcgtgggtcggcatcaagagcggcggcgtggtcgccgccctggtcgccggcgggatcaccatgtcgatcctgggcaacgcggccgacgtcgcgcaggacctcaagacgggctacctgacgctgacgtcgccgcgcgccgtgttcatcagcgaggcgatcggcacggcgctgggatgcgtcgtcaaccccaccgtgttctgggtgttctacagggtgtacaagatgggcagcggcgacatgggcgacatgccctacgccaagctctaccgcggcttcgccatgctcagcgtcggcgacggcgagcaaggcctgcccaggcacagcatgctcctcttcaaggtcttcttcgtgctcgccctggcgctcagcgtgttccgggaggtggcgagccggaaggagtggcgcatccggcgctacatcccgagcaccatcggcatggccatcaccttcttcatgccgccgcgcgtgcccgtcggcatgtgcatcggcagcctggtggcgtacctgtgggagaagatggacgccggccgcgggcggatgctctcgccggcgctggcgtcggggctcatctgcggcgacggcgtcggctcgatcttgctgtccatgctgacactcatgggtgccagggcgcccatctgcatcaagttcttgtctcgaggtgacaatgtcaagttggacgccttcttggcaacactccatgacatgagatagctactagctagctatccatgtagggaaactagatcattttctcaggtgtcaaaacttttgtacatatgtatccacgtcataggggcttgagttaggagtcgtggcaaactgtataatcaagtttcagttcagtctataaacacagtttgatctcctctatcaacagttgcctcactgagtccatggttcaatatgagaatgcgtgcactgattttggcagaacccagaagtttgctttgataaactggagtccacatagattactagtactgtaactgttaaataaacctgataaaatgttaatttctagctacagtacaggaacattgcagagagtttcacaactgaccagtcagtcagacagacaacgaatatgcaagcacgcatgctacccatcttttttacatggacagacatcaaacgccttatttatacatttaattgtatcaagaaacaaatgaatgaatttaagggcatgtttagatcaatttgctgtggcagaattttttggcaaaagtttttgtggcaaaaattttggtattgaagttttgctagttggtgtttagatgcatgtgtcattttactagtaaagagagagagcacggctcccaacgcactatttagcaaaatttgctactctagactcccaaatgacaaatgccaaattaccaacttttgctaccagtatttagatccattttgaccaaaagtgcttctaaaacagaaaacttttgctattttggaggatctaaacagggcctaagaatcaaaggagggaaaacacttttaatcacttgagtggttgttcactcattcattgcatgtcaattcattagttataaaaaacttcaaaaatattgaaaaaatagattattagtatgattttttttctaatcaaactttattaagtttgaccaagtttatagaaaaaattagtagacatctaaaatattaaattagttttattaaatctaacattgaatatattttaacaatatatttgttttgtgttgaaaatagtactatattttttatatataacttgatcaaactcaaagaagtttgactagaaaaaaaatgacttataatgtaaaacggagagagtatgtaacatatcactccacaaattcaaattcgactatttatattgtaaaaaaaattaaaattgactttgaatatgctatttacatattaatctatcttgtcattcttttaaaaagattataacaatttatttgacatgcaataaacgagtgaagtcagtgtcccacttccatttgccattgcagttggtctcacaattgatcatgaatatgcaaagcacgcatgctatcaatcttttacatggacatatatccatccaaggccttaatttgtacatgtgaagtataacaaatgaatttaagaaccaatcagtaaagagagagagagagagtacatatgtatgctacaccagctgcttctcttctacacttacattacaaggctaatatatataaaccaatcgacaattaattaattaagtataatcactaaagaactaattaatcaacctacacgtacgcgtggcaagatcgatggaaggctagcttgagcttgaagtggatggatggatcatggcggcgtgggcagcgtcctgaggaagagctggaccttgtcgttggtggcggtggagaagacgcgcatgcacatgggcgggttgacgttggcgagcgagaggatggaggagggcagcgaccagatgccgtcgccgcagatgaggccggaggcgacggcgggggcgaaggtgtgggcgcggacggggtcgctgcgggaccagaggaagaggacgaggctgccgacgcacatgtcgatggtgaagaaggagccgaggaagaaagggacggccatgccgagggcgctggggatgaagtcctggatccaccacccgcgctgcttggccacctccttgagggcgcagatggcgatggcgaggaggaagaaggcgaggcagaagcggaggcagtagcgggggagctggtcccacccgttcacgcccaggagggcgatcccccggtagatcttggcgtacggcgccgggaacccttcctccatcccgatgttgttcgccttgtagaacatccagaacaccatcgggcttattatgcatcccatccccgtccccagcacctaatcatcatcacacaccttaaacttaaaacaagtattggttggtgcatgcaacttaatgtacaggatacgataaaattcgttcgttgcaacgcatgatagtacttacataaaacttattatgatacaacttaaaattgattagtacatgcagcacaatatattgtacatgatacaataaagttcgtatttgacaatgcatgatacacacttacatgaaaattatttgctacagctaggtgcaattacacctaaatgtgtacacatgcggtttaaatgtttatataaaaaggtcatagaatttgacaagatatattatgatagtataagacaccacaaaaacatacatgtcttgattcggtctacacataaaaaacaaaaataacaaaatttacctgcattgtataagtactattcattatctgatttcgttagttgtaaattaaatttagtcttgcatgtttatttatacacttacattattgcacttgatattactattcttttaagaaaatctatagtaattttaagtcgcaaacaaataacgggtgccatataggagtagaattaaaattttgtccggtagtacttacctggctgacgaacatggagcggggtgaggtgagcgtgaggtatccggtcttgaagtcctggacgaggtcggaggcggtggagacgatgcccatcatgaggccgcaggcggcgaggcccgcgacgacgccgccgtccttggcgccgatgttcgcgccgaagatgaagatggcgagcttgccgtagctgctggagagggaccaatcggtgaggcccgtgccgtaggcgttgcagaaggcgaagagcggcgccaccacgtacgcccacaccacgtgcttgggccgcagctgccggaagatgtgcgggatggcgaccaccgagatggcggcgaggagcacgtacgccgccgcggcgatcgtcgtcgggatctggtccttgaggaacacctgcgtccgcctccggtcgtcgaagctgagcacctgccgctccgtccccgtggcgccggcgaacggcgtctcctgcggctgcttgctggcgccgccgcggcgcttcaggtagaggtcgtaggcggtgcggagcacgatggagaagaagttgaagagcccgtctccgacgatcatggcgatggagatgaacacctggtacccgttcagcccatggaggctgctcttgggtaaccccgcgtcgtaccagctccccttcttgctctcgatgtacggccacatgatcccccacgacaccacggagccgatgagcagcgagaagttgataatgtaggggcagatcatgccgacgccgacgtaggtcgccgagaaatcgaagtagaatcggcggctgtacgccaccatcccgaacgtcgggaacgagctgaacccgcacccggggccggcggcgtagaaccactggaacagcgaccagaggaagctcccgacgaacgacttgaagaggatggacacctggtgcttcgcctggatcgcgccctgcggcgtgtggaagctgttgatgaggtgcgcggtggcggagccgctgggataggtgagcttgtagctgataatcatgatcttgcggagcggcacgatggagaagaggccgacgaagctgacgaggaagaggaaggcgatgaggcggcccagcgacggctcctcgacgttgatgctggtcttggcctccgcctcgtcgaagccctcggcgatcttcttgctcatgccgaggatgtaggtgccgaatccgccggagaaggcgatgctggagcaggagatgacgcaggtctggacgacggtgttctcctgccgggtgaacggcttggggaacacgccgcaccgctcgagcgcgctggtccacgtcttcatgaggaagaaggcgaggagccccgcggagacgttgagggaggggacgatgcccgaggtgaggttgagcttcatgacgatgaagctgaggaacgtgcccagcaccgcgctcaccaccagcgacctcaccgtgatctgctccgaccacgccggcagcgccttcccctcgaacgccttctccgtcgacaccgatatcacctcccgcgtcacctccgcctccccttccccagccgccgccgccatcatcttgattgattgattggttggttggttgattgattgagtcctcgacgacgatggcggcggcggcggcggcgagggctagcttcttccctgggtcgatctctgtccggccccggagacccggagatgggggagatgacgcaaacttgtgtgattagtggctgtgagtaattaaagtgtctacttttttgaaaaaattgttaattactcaactatactagagtaatgccaaaaaatgattgattaaaatggccatcagtagtaatgatgttttgttattctgttgtttcttcttctttcattcattttttccttttttaaaaaaaataacttggaattttttcttgcggtcatgatgtggggtgagtagtggacggttgtcatgcaacatgcaatctcgtgccatttgcagacggctaatttgggccagctaattttggcagtgtgatactttggaattagagttactctgattttcaatcaagtactagagttaaaaaaatagaataaaatatttaatatcaattggtgtcgtggtatagtaggttattacgtcagtctaaggtctcttttcttcaacttcaaacttcaacttcttgttttccgttaacacgttttttaaaactgttaaattttttgtgctacggcgattgaaagaatgtcaaccaaagtagaggaaagatcaagatggacgtttctaaatcggtcgataaaattagtaataagaagtctttaaaaagtgcgcattcatcatagaaaacgaggatgtaatagggttgctgatgaacttactcaacttgctaaacggaccgcatattgcgcggtttggcgtgaccatgcttcgtcttgtgtgatgcaggctctgaagtaagattgtaatattattacataatcaataaagcactcatttccctcaaaaaaattgtttgtgttttggcaaaagaaatctatatataaattgtttaaaaaattcaagtaaatctatttttcaagtttataattattaatatttaattaattacgtgctaatgaactttctcattttacgtagctaaaaacctcactccaagttgagagaaagaacgcagcctaatgcacttaaggtctcctgttcgagtctgggtaacaccatttttactgatgttcttttattttgtttttctttgccaaatcttaaattagcaaagtccactaaatttagtttgcatttcttttcatttttttaacagccaaacattttttcctattttttcttgtagcgaagtccactaaatttaatctacatttttttcttttattttttaacagccaaatccactagattttaatatgcttcgtcatggaccacgaaattaaattagtaaagtccactaaatttaatttgtattttttttctttttttttaacagccaaatatgctccatcatggaccactaaatttaatgttcagtcctatgtacagtaccatccattgttttcgttttttaaggctctaatccattgctttctttcttgttcactctgaacgagactggccaaagaaatcaattgagcagtggctagtggtgtactggtggtcattgtcatttgtttttcaccttaacaaaagatgaactacaaaaagcttttctacaaatccacatgtatcactgctctctcgtcccataaaaaactaatttaaaataagaaatgacatttttcagttaataaatctagatacgaacatattcagatgaaatacttgtaaataaaaaggaaaaaaaaggaaggaatttgaaaggaatcatattgcggtgatagaggagagacaaaagtgcacagctaagctgttttagtttagtagtgcagcagttgcagatctcccctcatctccagcttctcctcgtcgccggagctcgagatggccggcggtgacctgcgccagcgccgggcggtggcggcggctgacggggagggggacggcaagatggggtcagggggagaggaggcggaggtgaaggggaaggggcaggggaggaaggaggcgctggggtggctggagtgggggcgggggtggatgggaatcgtgggggagttcctcttccagcgcatcgccgccagcaacctctccaacccgctcgagcttcccccgctcgacggcgtctccttcgtcgtcaccggcgccaccagcggcatcggcctcgagatcgccaggtccaatctcttatcccttctacttcttctacttctactgctgctcttgccttgcccttagagatgatgggtggttcaattcgggcatgcgaagattctctggatggatgccatcaactcaagatttatcgatagcctttttggtttctgaattccaaataattcgtagtgttctcgacaatatagtgtgtgtaatgtgggcacccactggtacgaggtttagctcttcttttcttctcctgactttaaatgtcatgtcagtttatccaagcctcgctggttggtttgtagtaggcagatacggtagagttagtgaagttcttatttttactatttgatgaatcgttttgggatggcaatactatggtgaaaatagatttatatgtgctaacctgaaatttttggggcttttaactatttgccacttttagatttggcaagtaactatttgccacccctatatcaatgacatgtgggtcctggcaaaaagttaattgccacatctaaatgtggcaaatggttaaatatctcgaaatttttcgaaacaaaataataggggtactctcatacatgttacagtaatgaattggtccttgactgcacttcatcttgttacttcacaagtaaaactgtcaaaaatattcatctggcttcatcaatttggggagcatctttgataggtttccaatcaagaaacatgaaatctatcaagctaatttgccagatatcactttttattcagcgatatttcttattgggaagctgagtcatattattggttcctatataattgtatatgtgaattttgtaaagacttttgtttggttcaatagatttggtgttacatcttctaatgtagaaaagtattacaaatttgaaaatgcctaatcttcttataaatttcacatctctggaactaatacaagtgtatatttgcccttgtgctctggaacaaaatactaggggtactcatacatgttactgaattggtccttgactgcagttcatcttgttacttcataagtaaaactgtcaaaagtcttcatttggcttcctctatttggagagtgccttgataggattccaatcaataaacatgaaatctatcaggctaatttgccagacctcactttttagtcaacggcatttcttatcggagctgagtcatatcgttggttcttatgtaattgtatctgtaaaatttgtaaagacttatgttcggttcaatagatttggtgttgcatcttctaatgtcgaaaagtattacaaatttgaaaacgtgtaaacttcttataaatctcacatctttccctataactaatataagtgtatatttgcccttgtggtcaattcagacaacttgcactggcaggaggtcatgttgtgatggctgttaggagaaccaaattggcgcaggagctcattcagaaatggcagaatgataattcagagataggaaagccccttaatgctgaggtaatcatgaagacactatctacaggctgtacacaattgttgtctcatggcattttactagtttgtcttgtttaacacacataaatttgaatttctggccttatatgctcaaatcgaattccaactttcaagtaaatactatagtgtgtccttcacatctagcttttctaatcaattggaagatatctgttgcgaatgcatatcttaattggtaaagacaaagacatgtttctccaacatttatgtggtttagctgcagatcatttgacaattttttaatatattactctttaaggtgatggagcttgacctactctctctagattcagttgtaaaatttgccgatgcctggaatgctcgtatggcacccctacacgtattgatcaacaacgctggcattttctctataggaggtctgtatgcttcgacgataatctgtttcttttgtttttggtctatcaaatcaatccaacttgcattttactcggtaaagaattcaaattgtaccagacataactaactctttcattttctgtagaaccccagcgtttctcaaaggatgggtatgaagaacacatgcaagtgaaccatcttgcaccggctttattggcagtgttgcttctaccttcccttcttcgtggttctcctagcagaattgtaaacgttaattcagttgtgagtctctactcttacctgtgctgtgactgcctacttaggaattgttggaaagtgaccacggtttccttatcatgtataaaattggttattaatcctaacctcaatattttgaaaaacttgtctgaattcattattttaatgacaattaagaatcatttctgtgtaaaatttacaaatacctccagatacacttctgccatctaacaagcttgtctgcaatttcagatgcacacagtaggttttgtagatgctgaagatatgaacttgacatctggaaaacggaaatttacaagtttgatgggatactcaaatagcaagttagcacaggtatcacagaggtgttagattgctaattagcagttgttccctttgcaacgttaatttccttattgtactttgtattgttttcattctgctttattgcaagggaacaatcagtatctaaactgtccatgcacttttttcatgctatgtaggtctgatttattcttgtttcacttgcagataaaatttagcagcatgcttcacaggaggattccggcagaggctgaaattaatgttatttgtgcctctcctgggattgttcatacaaatgttgtgagttccgtttccccctgtccaatgtttgccctgtgaaacatgctatttcataggaattaaagaaccagaagtttgtggtattagttttgcatatgcctctagccagaccaacccctttcgggtgttaccataaagagaaaagaaacacatgcactattggggaaaaaatggaagccaaagaattttgtagtaacttaatgcaaggacagttgaaaagaaataccacaacctaaggctacatattttccgagaggattagtcatgtctatttttagttcaactcagcaaagaatctctcttgagcatcctaatgaacctctattaatctgtgctctgaataaacctggccaaatggaccgtgccaagccgggccggcccgagcacggcagtactgtagccggcccaggcccggcacggcacgccagcctgtgggccgtgccggcacggcccgttatcccgtgccgtgtttgggccgatgcctcagcccgtgggctggcacggcacggcacgtttactgtagcgtaccggcacggcacggcccaggcatggcacggcccaccggcccatttattttcctacgattttctaatttttcccatatatttctcatattttttatttttttccacattttatcctatttgaccatatattttatgatatatttcctaaattttcctcacatttatcctatatttatcattttttcctttatattatgttttttctgccttttttctttttttcccctcaaatttcaatttttatgggccacatgtactagtgggccggctaccagcccacgtgccactacagtagccgtgccggcccggcacggcccagcaccttcttgggccgtgcttgggccgtggccttggcacgtgggccggcacggcacggcccgctataggagccgtgcctaacgggccgtgccctagtgggccgtgccgtcggcgtgccgtgtcgtgctgggccgggccgcccgtttggcctgctatagctctgaatatattggcaaacttattctcatttccttctgttagtttattatttgtatgttgatctaataatgcccataaatggtgcaggcaagggatctccccaagcttgttgtagctgcatatcatttgattccgtacttcatattcgatgctcaagaaggtgatgtacaggacctttcagacgttgctatctatcaattgacaactctccaccttctgacatgcacaatatcttgttactgatctaatgcaggttcaagaagtacactgttcgcagcttctgatccccaagttccagattactgcgagatgctcaagtctgaagactggcctgtttgtgcttgcatctcatatgactgtaatccaatgaatgcatctgaagaatcacataacctcgagacgtcgcagctagtatgggagaagacattagagatgattggcctcccaccagatgccgtggacaagttcatcgaaggggaatcggttcagtgtcgttatggacaacagaaggcagaataggctatttcgtagacagcaaatatgtgataatttcgaatgttcgatccatttcatcatgcgattagtttgccagtggttttgttccagtactttgtaatagtacatctgtcatacccttttttttgtttcatatggttggtaaatctaactgcgtcaaatagaagtatgacaaaacaaagttcgttacaatttatctttgccccttgttaaatggcaaaacgtttgtagagttttgagttgtaaaagcatagtcccttcattctttggggataatcaagatatttattattgtttgggggaattaaccgaaacattttcagtttgtagcctgttctgctgtgcctcaaaacgctgcacttacataggtgtggcaacgctgtcctgaataccaaaactgacgatacaagaaggatggataaattttcaacatcacaagcaaatactaccatatatcagctctgaatttgaggataatgtaatgaactaatttagaacatactatattgctatgcatgtgctcacatgcgaaactcttgctagaaacagaacaagtactgccaagccaatgctaaaataatagcacagtcacaacttccacacttgaacaaactcatgcgagggacatgagagtttgtggagcattcaccaggcaagagggttacgatccagattaattacaggcatcgcccctcaataggacgagttaaaaacagaactccaataaaagaacagtttaccacgtaatggacagcatcgcggactattttactctccaggaagaccgaacacattttgatctgccaatggatgaatagcagcatagctagtctgcacctaattaagcatttggtggcca

SEQ ID NO: 8590 - DNA, 13116 bp, Oryza sativa
gcggtgcacaacgtgcgcgcgctggggcgcggcgcggtggcgtccatgacggccgcgtccgcgccgtgacgtacgtccggtgggcggcgacggcgcggcgggtggtgacgtcggcggcggacggcacccaccgtctgtgggcgctgccggcgccggcggcggcggagacggcggcgagggaggtgcggtcgtacagcggccacgtcagcgggcgaagcttcgtggggatgggggtgtggcgtggcgcggggctgatcgccagcggctccgagtccggccacgtcttcgtctacgacctccgctggtccaagcccatctgggtccacccattctcccacgccgacgccttcgtcagcgcggtcgcatggcgccagctcgccggcgacgacagcgacggccagctcgtcgccggcggctccgacggcgtgctcaagctcttcaccacccaccgccgtctcacccccgacgtcgccggcgtcgggggcgacgacgacgacgacgtggctgcatgacagtgagcaacgcattgcaaacacatcatcatcatcctccattaattaatcatcgccaccgtgctcgaccgtgacgccgccattcttaattaatctcttctttgtgtttgtgtttctgtttaatcaccacatttttccttccattttcttcttttcctttctatactaaaaaaagggagaaagatatggatgtaatgctcaagttgtcagagaggaggagaagaggatgactgatggattaagattcttttcctttcctttttttttgtttgattcgatcggtgaatgtgatcgatgtgttcctgacagtgtacacgctgatttattctttaaacaagaataataatgcttcaataaatttccatttaccattgatccaacagcatgcattataccattgagtatacttacatgttttttttcactttatgagcgccatttgtgtatgtttcttcagttcgattttgcgcgataccacgcttttttgccctcattttctttcgtaaaagttttagatgctgtgggcctaatcaatgttacagtgtcggcccatactgcaacggagtcattcggcctagtgttagcccaaaggagttgggcctaacaggtaaggcccatttttggtatcggcccacataaactgggcttcatttggcccagtcaaggtgcgattactgaataactattccttttaaataagaaactgcacaattttgtaagtagatttataaagttcagtttgcattttttatttgaaagtaagtttaatttgcattaaagctgtctttaactagatagatatatctattatattgatcttgctatcacttatgtctgaaaagtttgtccaatgaactggtttcgcctatcttctttcctgcacacatagactccaaagctgtccaacgaactagatttatagaaaataaattttcattctcacttagactcaaaaggctgtcaaatgaaataaatttgtatatcttctttcaaactttagactcaaaaggctgtcaaatgaaataaatctgtatatctttcattgcctgaagtactcagcctactcaattcctcatggatcccctctttgcctccactttggtcactagcttctcctaatctccttgcatgaacattatcatcaatccatgataatgtacttaaaataatcggataagcttttctttgctaccaagtatgcataaacatggtactttcagaagcaaatcgttgctgctgcatgctgattaacaagcaagttaaacagcatccatccacttaatcaccatcttcagcattcctctcaaaatcctcaaggatgcctaataattattcgtgtacgtgcttatcaagatgacataatttttgcagccatccattatacttaattctggcaagatatactgacaatttgcagtgctagtcttcattattcagtgagtacccggatgagctgtacttgtgtatacaattgggccatcttgcctgtctctgtggattaattctgaagagagcattgacttgcatcccatcattgcaagtacaaagaagccctcttgcatgttcctgcttcatttttttaattttagaagcatattttgcaaatcaccatcattttcccaataattctttaatcattaactaaatcagtagtactacacatttacattacattctagatgtgacaagaagcaacaagcctcgcaagtcaggatgcagttcttaactaggactaggattttatgtgtgtgtggaactgacaaaagattcctttatccttcttctcttcagaacagtgctattagtttaaccactgggacataatgtatagggcaagatgcctgaatttgttcggggattaggtgtttgtccacatgcacttatgcacaagtcaatttgcagacaaatataatttggcacagggccgtatacttaattttgttaataaaatcatagtgttgtatacttgtattagtttatcattgtcggctaatgttgagagaagagagctctgatttttttctcatcagcaaatctcattttttgatgctgaggaagagaagaggagattaagacgcctctgaagctcacatggaaccgtccctttttgtaggacattatattgttgtgtattaaaagaggacagagatatcactagtcatgataggactcttagagctaattattattaaattttagttctttgttctttcttcgggtaaataacatctatgcgttggatcatgctttgtttgttttcggttctcgtgtctcgcgagcatgttgtatactgatttcagaggatgtaaaatcgttaaaattttataatgtagcttaagctcagcatacttgtggagttctacaagtattagtatacttagtaggctgtagattttgatgcttttcagctttctgcaaactgaagcactgaacccattcacatagagctactaccctgaagaacaacgagtcaacatctagctgaacttaacacttcatctttttctgaaattaaatcatgtcagcaccagcagtaaaagacaaacacatggcatccaaaatgcagagattttgatgtaattttagatcatcatgacgcaaacttggctttcgtttatttgacactttcggagaagtctttgtttttcctacgcgaggaactcgagaagaagtaaagagaactggtgtacctatactgggattctaagaacaactagttcgaggaaaggacaaaaatcttgatgaacagatgatgttagctgtcaaactgcacaaactagtaccgtacttctcttgcaatctatcatcatcatttcactatgaaaactaagacagacaactagccaagtgtcgctgaattaggacaatgccactatgtatcaccaagaggaaaaacaacaccgatttctgtattgtatatgatgagcacatgaagccgtgtaaaatgattgtgattctttcactctgaatttcttctgccagctatgttgttcttaaaatttcataagaaaggagcattgtggtttggcattcaagctcaacatcattgttaatttgtgcttctggggtccttgtttatgtatggcccttgtccatggtgcagttcatcttgttgatccttgcagatgcaaatccttctggatggatgctaactagcctgtcttttcttgtgtccttgggcaattcttcatcctccttggtgttttgtctaggcagatgctttcaatgattggcaattggcattaagagagggtgattaaatcatgtcttgtcattgctaatccaagagcctgtttgtttcatcgcaataacagctcatgtcaatgctctactcatcattggtggagacagtctgacctttatcacgctgattactggataatcatgttttatagtaaacaaattggatggccattatcactctactactaatgcatggccctaatagttttacagggtcatctgaaaatactgcctctgaaacgaattactttgtcagtaaaactctgataactaacaattttggtactaaaccgatggtctaagtaagtaggtaattaacatatatactatcagctgccaattacaataacaatatagtcaccgacttaaaaacaaaaataaaatgtggtcattagtgccagcaagcatccacatcattagaacaaggccaaaactgaaagaataactatcagaatctttttttgtgtaatgaagagaaagaggtgacaatgtgatatcctctgaccaacgcctccctcttgatgatcctcatgcatgtgcatgtattacctactcattcccaccaattaaactaattaacaccaaaatgtgagaaccccctttaaatgacaaggggtcacatggtgctgaaaggactggcacaactctgctactgcaacagctcatattgagacaagaccaacatacaggttgcaggaggaagaacaggaggagatattcagagaaggaaagaagagagcaatggggtgccggtcctgcgacaagccgaagatgaactacaggaaggggctgtggtctcctgaggaggaccagaggctgagggactacattgtcaagcatggccttggctgctggagtgctgtccctgcaaaggctggtgagctttttgcttctctctgtctctactgtgaatgcacattgctgcattcaccaatgcatccctcttcacaattgtgaattctagcctagtctagtcccctctctaattggtaattagcagttacagagagtacttagctttgggttagttcaagcttagcttgatcacaattcttaggccagttgaaattccagccaaggaagaattctcacccttttttttccaaaataataacaaaagcattacagtacatagagtctagctctctaaagttcatcagttgttcacttgttcttaaataaaaatgaaatctttgtctcattcactgctattatttctgacccttttttctctcctttttatttccaaaaggtttgcagagaaatggcaagagctgccggctgcgttggatcaactaccttcggccaggattgaagcgtggaatgttctctcaggaggaggaggacattgtcatcaatcttcaggccaagctgggcaacaagtaatcctcacacctgacaatctctatgaacaggatgatacaaaaccaagctagttctaacttgtagctgaactttaccttgaaattcagacaaaacaacgtcttttaagttaaaaaaaacaaagctcaagctgtcacagaataacaaaattgagcattttcaattgttccatttcatctacatgatgctgattgttttgagaaatttatgatcaggtggtcacagattgcgatgcatctgcctgggaggacggacaacgaggtgaagaactactggaattcctacctcaagaagagggtgatgcaggcacagggctccatccctaacaatctagcagcagcagcagctgaggtcacctccatgagcaccaccgagccaccatcattgcatcaccatcatcatcaccctcaccatcatcagatcaagaacagcagcggcagcacgaccacctcccatgaccaagacgccaacctgagcagcggcggcagccatggcggcatctctgctcctgcacctgtcgctgagccatttgatcagcagcccaagagcttcgtcttcaccggcgactggatgccgatgtctgcggcggcggcggggcaggagagctactccatctcggcgcagcactggccggcgtccacggcgagctccggcaacgtgacgccgtcgcacggcggcgcgttcggggaccagatgagcggcagctacggcgcattgcagcagcagcatcagagctcagctgctgctgctccaatggcaggaggcggcggctactttgacctgctaaacatgggagacatctatggcggatttgctgccactagtgacgatctgctcttctgatgacgattgtgtgtgatatgatcgatcgagttcgtgtgttttgtgtgcattgagcgtaaaagcatcgaaagaaattgcggtatactgcttcattaatttgattcttctcttttgtaagaaaaaatgtgatgtagtagaagttaagcacaccctaggctggacatattctttggttgtttctgcaataaaaaaagtgtaaccatttgtctgtgtaaatgtgagcctgtaattctcaagtagtagtagcacaatacccaactgaaagaaaaagttttattgttggatcgagtaagtttgatgaattctccagttgctcatttgaataattttgaggaatagagtgattacttgtcactaataattgatgttcgaaaaaacgttaaacctctggatgtattcgcaattcatgcactcaaaatactccagctgtaattgatatgaaaatggtactatggaactgagccttacatagatgttctgcaaaattgtatagcttacatgcttcatcagagttcagtctacaggatgacttttttctccacaatcaccatcaaggtgatacactctacttctctcgtcaaacaatgcagtacaaaaccatgatagtaaaagagcaacaaatggggaacagaaattcaatgcttcttgcgagaaaagtggttgtcattcggattccgtttcccactgaacattgcaagggccttcctcactggaggtttcagtggtactttcttttcaccgctgtgcgaaaatatgtcctcgacacccaagaaatcatcgtcctatagagaatattattaatggttaaataaatagttgcttaactattgcgatacaaaaacaggaaaaaaaagcatatgcacccacagaatggagaatatctgtttagcagagcacatagttggtgtaaaagaacgttttggagatgttgaatttaagtgccgaaaagcaggcatccttataaaaggaggcttttcagtaaatctaacaatagcaagggctagttacctgcttgtttgacttcttcgatttagggtgcagaaccttctggggaagctggtcttcacgcaaaatgggattcttagttatggcatctcttccaccttggggcattgggagggaaaactgaaagaaaataggcatacaattaaaaagaaaatcttttgtcatcacagtaggaatcaacttggaaaggccaggtgggcacatggaaaaatatccaaccaaaagcattcagactaagaaatgaatacgaaaactgatgtagaaggccatagtatggcaggatatgtattgcgattcaccaaagagagtctagaaggacttgattagtaaggaatgcatacgggactggccaaagctcatggattttctacaccactacactgaagactatgttcgacacttttgaacctctgaccatcatacatattacaagcatggaaataaactatctggacatttggcatgagtctaaaatgtgcttttctatttctcagataacagtaaagcaaggcagcaaacaaaccaatattgccacaataatcaggcaagtgacaaaacataaaagtatctaggccacatggaagaaaaacagcattaagtttgaaactacactcacttttgtgcctcgaagtgtcacacgcggacgtcgtgaggccatagtgatcccattttcaccaactgttaccgaaaccttccgtaaggtgccaccgttgccacattttgggcaaaatattttcccaatctcttgggtcaccttatagcaagcatgacacctcagaacccacctgccaaattagcatcccaaagcattagcgttacaaagaaactactataaatagaacaagaactagtgcgtgaaagagctctgaagatgctaaaagctcatacctgtgcaactgacgtatttgcatgccacctggtgccaagagacggagaccaatctgcaggatgacattttgcatggcatagtcactggttatgcatgctacagtagattcagataaggacctcaacgcccaactctgctcactgctcccatcatctgcaagagatgaatcgacaccttcctcagagtcgcttttgatatccaaattatccaactcttcaatgcatgcgtccgtaccgccggtctcctcaacatcaccaacattgcctaccccattgtccttattatcagattgcgaatgatctgcaacaatttcaggttcattcacttcttggtgctccataacatcagtatcagcggaagggccatccactggattcaaaccattttcagataaaattttatcgtcatcaattgatggggcagcagaacttgtctcaatactttgttcagattccttgagggcatcacgtctcgccttccttcgtagatatcttctgtgtgtactgcgactaacagcaggcaaccaaccttcattattctcatcatcttcccaagcaatacctacatctttctttgcaggctgatgctcttcatcaccttgcttgtcagaaatactgttggtctcactattcggtatttcgtggttctcaagatccttcagtggaagtatgcgtgacttgagatccccacctgcttcagacatctggtccaattcttcccattctgctaggttctgcacattagagccccaacctggcagtggagcctctttcaggtttctcacattcaccacacgcagaggaggtggctgctcccgcaaatggttagtcccatggatctcagcttccagcatgtaagctagagcaataatcttgatatcaacatctgaaagcgtctggaggtctcctgtttcccgggcaaatttgacaactgccagaaacaaagattgagaaattagcctttctcatcattacgtcattcaaagatgaggaaaatttccatagtagaagactagaaggctaattctattctatagaaaaccatactgttgtgacatctaattgcttttgcacatgcaagccttgccatttccctcatgcttacattaagttttaagacaacaacattaaacaaactaccagctcatgttacacaaaggcaatgttttaaccacaaaacttattaaaccatggtcttggctacacctacaccgttatccagttcttagtacactcgtaccataaaatctattttaaggaaaatgtgaaattcactgatctgtagatagttttattgctaatactcaacaaggttcagtcagaattgctgaaggtagtacctacctttcttgacgaattcaggggcagggtcgagggtctcgacaggggccatgaggagcgcgaggcggcggcgcgcggacgcgtcgcgcacctcctccagcacctcgggcaccgtgacgaggcgggcggcggacgaggagagcgcggctccgcccgatatgacggcgttggcgtccaccacggccaccgccacgccgctcgtgttggcgcagctcgccaccagccggctcaccgcatgcgccgacgactcctcggccacctccttccgctgcgccaccgccgccgcgccccatgctcctccacctcctcctcctccgggaggagccgcagcttccggggcgggggcgagaggcggccacgcttcttccatggcggcggcggcggcgctagggtttttgggttcactttgaggctgtttggttggttggcccgcaccagtccatgcaaatttgtttgcgaccaagggacgaaaatcagactgacctacaaatagagggacccaaaatgaacttattctttggttgcctgctcgggccgggcctcccagcctgtccacgaggatgcaaaaaatagcccctcagccaggcccaaggcccgacggaaacggacttcgctgctcggcctggctcgactcgagtgatgcacccgctcacggaggatatatggggtcaccgctacttctccctctcgcgaaaaaactagggtttaccctagcggctctggcggcggcgaggcccctcccctctcctccgactccggctctcctcggtcgtcctccctctcttttgccggtcgtgccccctgctccaccgtcactctccgtcgagctgagcacaatggatagttgtccgtcgcccattgcaaggttgggcatcctcttccctgtcccagttttttctcctctatttggttgatttgctgtgatttgagtggatgagattctcacatggggccttcataaatctgctacattttcctagttgattttggtagatttaaatgttgaaaccatctactgttgctatccttctccttttccctcttatagttgcggaaaaaacggcgcgtattttagaaaaaatagaggggtcttattgcataatggccatcatatcatctcgccgcgataaaatggcggcgtcaccatccgcatttccccttctccgcatctcgcctttttcctcctccgggctgcggcaatggccgaaaccctagtcccgccgccgccgccaccctctgatccccaccagatctaggatttgtttgttgtttcacggtgctccatgcccttctccttcctttccaccacaactccgcccaccgctctcaaatccaccgcgtccacccccgcccgcctctgctcctcgtcagatccgacgcttaagcacctttccgaggtgtgatttttccccccgatggtattgtatcgttctcattctcttatcatcttgttgttaaggttgctcttgtgtggtagtgtatgttcaggtggtaggatttgtttgagttgatatcgctgagctagctgagctagatgattagattaaattggaatgaggcgtgcaagttaatctgcctgctgaactgattgtatctcaaattaaattgctgtgatgacatctaataggacggtatctgagcgacggatctatcctcgcgtgattatacctaaactgagactaaaaatgtctgagcaaaactctgcatttcttttttaccatctggaagttggaatatttgcttctcgctgttcagaactaagcagcaaccagcatatgctattcgtgttctgtgtcgtctttgttactgccttgaaatgagaatgatgatttgcactggatttagaatgattgttttgcactggatttagaatgattgtttgccttgatgattcctacaaggacggtatctgagtaaggttcttgaaagagtactccttatgtgattacatccaaaactgatcagagattctgagcaaacatgtgtctgaacagaagaaattgtctatcctgttgtacatttgactgtttctcaacctgagaaacatgttaaggtactacgtattataaggtagtacattttgattgagttgatgtcgctgagttacatggttagattggaatgaggtggtttttaagtttgtgggcctgctcaacttaatgactgtatctcataattgctgtgatgacatctacaaggacggtatctgagcgatggatctatcctcacgtgattatacctaaactgagactaaaaatgtctgagcaaaactctgcatatttttcactctgtgaaagaaggaaatattttgctgttcctgttctatgtaggcttggttacagtcatgctacaccccctattttttttttatgatgattgtttgctgtgatgacatctacaaggacggtatctgagtaaggtggctcttgaaagagtactccttgcgtgattacatccaaaactgatcagagattctgagcaaacatgtgaatctgaatagaaccagagtatcaatcctgtcgtacatttgactgttatgcaaacctgtcaatgatacgcgcttaatgtatctgcttggtttctgctctttttacacttaaacataatttccctttgaagttaacagttaggcccattaacatttcttttcttgattgtttgccatgatgattcctacaaggacggtatctgagtgaggaacctcttgaaagagagctcctcacatgattatatccaaaactgatcagagattctgagcaaacatgcaattctgaattaaataataaataatgaagtcgctgtgcctgttgagcaaaatccttcctgtgattgaactgctttcccagctgaaaagaataacatgccttcattggcttcactgtgtaagctcattatgtagagtgtcacgcaggcatgacctctttggtaaggacgatctgagtaaggaaccacttaaaagtgttcctcacatgattatatccaatactgatcagagactcagagaaaacatgtgtaaatttgaactgttctcccaactggatggaaaaatatatgcttgatgctttcactaggttcaatattctgccctttatatagtgtcgccccttttaaagcatcactacttttgatataatagatcagcccattgagatgttcattttttcccttttcttgcttgtttgctgtgatgactgagttttcttgcttgtttgctgtgatgattcctacatggacggtatctgagtgaggaactacttgaaagagtgttcctcacatgattacatccaaaactgatcaaagattctgagcaaacgtgtgtagatctgaattgaatagcatgtaacatccttgttgtgctcctggtgcaaacagcaagatactgtcattttttttactgtttttcctaactcaaaagactgtttctgttccttatatggtgtcaccctatttaaacacgcctactcctaaagttaacagataaaagttttcagaaatttagtttttccatcatgtttttgttgctcatatagtttcaccctttttaaccatgacacatattgtggctaatataaaaaaaagggataataataaaccaattgagatttttgctttgccttttcttttcttgcttgtttgctgtgatgattcctacatggacggtatcttagtaaggaaccacttgaaaaggtggtcctcacgtgattacatccaaaactgatcagagattctgagcaaacatgtgaatagaatagcaagtagcatgctagtcatgctcctggtgcaaaatcatgtcaatgtttggactgtttttcccaacttgaaaaaataatatatgcttcgttgcattccctgtgttcctgttccttgtatagtttcaccctttatgaggggctgcaggaat

SEQ ID NO: 8591 - DNA, 22426 bp, Oryza sativa
gcatgaacctccagaagatccaacacctcgtccaggcggatcaacaactcttccagacgaacgaacacccccaaagaacggacaagagaaatgcaactgcagaaatttcatctcatttcttgatcacaaggagccaccaaagaagaagcggtccttgagtttgacgccgacaacgccattgagcaactttactgcccttgaaatagaaggacctgtgaggacagtcaggaatggtagtgtcgttgacatatagaactagtgtgtgtaaaaagctgagatgttatatattttggatctgagatatgccatctttcggtcaatctcctcaattttagttgagagaaaatataatcagaggctgcataagatgctatctgtagatttcaagcaaatccggtgatgggaaaaattcatttgaggccagtttggcaactgaaaaactgtatagaaagttattcttgtccttgatggtattttgaatggaggaaatatatacgtctgtttgattaattttttcatgaactttctcttgtcatgcttgatgtgtaccttgtccctgaatctatgtgagcagtcaagtcttcaacttttctgtctaaaccatatgaaatcgcaggtgtctcgattttgaaatgctaaaggaatctgttgtgcacttgtgattgcttgaggtgtactgcacataagagaactataaagcactggatgcagaagtcctttgctgctgggaaaagctcccatttttttgaactgaatttgcaggctatatgtttcaaaaaagaaaaaaaaaggaatttgcaggctcataatacataatccattctagttaaatgtatcagaataaaacaggtcactaacaagttttgtagttgcaacttagcacttattattagtttgagtaattagctgcaatacattatgacatataagaaaatcaagttaacaacgaaataataacaattggaaaaatataaaaaaaaggggggagatggcttttttatttttttttttgaatggaaatggaatattctgaatttctgaattattctcggtagacaggtagcatctttatggatatgatatgcgcgccatttcggctcttctcctccgtccccttcctccgctggattcctccatggcttcctcttccctcccttctagaaccttctaccgccactcgcttccctcctccgcacctccacctccttcgagaggggcctgcgccgccgcatgctgctgcctccgcgcggccgtctcccggcggcgggcagccgcgcagctgctctccgccgccggattcttgatcgccgtctcgccgccttcgctagccgcgcggaggggccgcatggtcgtgtcgctggaggactacgtcacttcacgtacgctcttggtttttttttggtttctgattttgccatcagatttgggataaagcgtgtatttcttgtcaagaacaaaagaaaaggaagaaaaaggcagtaaccacatctaacttgtgctgcaaaagaatcttggatatccaagaaatttcagcttttctagataatctggtggcatgattttatactgtaaatgcagcgtgcttttagatcaatagcattcctgaattctcactgtaaacatcaataacatctgaatttagtttttttccccgagtggtttggttgatttcaaaatgtttgggcacagctgatggcctgaagtactatgatcttgttgaagggaagggtccaactgctgaaaagggctcaactgtgcaggtaatttctcccacctgcacacaattccccattctttcattcctaactgaagtgaaactaatggctatattctcttctcaaggtccattttgattgcatataccgtggcatcaccgctgtgtcaagccgcgaagccaaactactggcagggaaccggagtattgcgcaggttatgaggcaaatcactcctgaagtttgaatgctagtacttttgctctaggacaataagaactaacatgtctgcatctcttcttctagtagccttatgagttcagtgtcggatcgctgcccgggaaagagcgaaagcgggaatttgtagacagtgccaatgggttatactcagcacaggcgtcaccgaaacctcctgccgcaatgtacacaataactgaagggatgaaagtggggggaaaggtatgtacaaggcaaatagccaaagggttgtactcagtggcaggctaagaatgtagcctttgtatctttactttattattgacttggtcatctgttgttctgtattctggtaatgcagaggagagtaattgtccctccagagctcggatatgggaaaaaggggatgaatgagataccggtaacatttcagaatattgaaacagtttctcatgtagtttgatttagtatttaagcacatccaggtactgaagtggtgtagtttgaatccatgcttgtttgcagcctgatgctccttttgaactcgatatagagcttttggaagttgtccctcctgcagagaaatgaccatttttgtttgcaatggatggggaactttcatgaggtattaataggaagtttcacaggttttagtgacaaacgttaatggaattataacattttgttttcttgctgattgttgaacagatatgtaaccaaatatgttcatatgatattttgccgggacatgacttgtttgcccactcacaaggagaaaatagaacaagaagcaaagtcaagtaggtaaaagacatgtactaattttgttattccttatgccgaagcaatattggatcaaaaatattctccacaatgtcgtggagcttgattgattatatggaatggtgatatgatctctctttgtgaactctgcatcctttcgctcaaaggtcctcggggccattgatatcctgaaatgagagaatacattttgtttgagatatatgtttatatttcaaataaaatagtgtttcagtggatgaatagaatgctaaaatttagctcctcatgtaagattgtattgctgtgaattatctacaaattatcctgactgataaatagttatatgtttttctatggccatcccagataaacagtcatatgtgccaaagttagatcatacgatatctgtttttaaactgcaaatttctacatcaatgatattgtgcttcttgggagaaaaagtaccttgttctcgatcactgctccatctgggatttccagtttgacaccaggttgggctgtgatggtcaccttgccctttaaaagataaagagaaaaatatgatttcattgtttaaacactgatcaatgagaagtgaagctgtactctgaattaagattgtgtaaacacagcatataaaaggttgcatacagatatgcagtatttcaaaaatacatgaaaaatagtccaaatattttctgtaagaactataactacaagaaagactataattttaagcaactttggcaaaagtaccttcaatgtgatgctagagccaaaccaaacatcaccggaaaccttcaaggtgtcaagctcaacaatgctggggattgacttgaagcgaccaaggaaacacccgacctgccattacgcgaagaaggatcagttaatttcatttgaactcatgaactaaattaaagcttttgcatgaggaaataatgttggaaggaactataccttcttgaactctggacccagttcaattgagggattcgatgggtttgttctggccgggttgcgtgtaacaaagccatcaaccaaggtatatagatcagactgcaagggtgaaacagttaagttagaatgagtgttaccctaaaaagtttactcagagtgtcatacagacctgtactagctgcaaatctgatgttgccttcactggtaggaaccgggaccttggaacattgataccaattgcgtgatcaaagaactggtacacaaaaatatgacttatcatctttgtatgttaggaaaaagaatgatgatggttatgtagtaatttgttagtaccctgattgctgcaccagctgctgtttccactttaagaactttaactccatccacttcctgaaattatatgttgcacatgtcagttgtttgtttaattcttctcaaatcattggacagtaatagtgcattgttaccttagggtttggaatgatctccatctttagtgcatcagcctcaacaaggcgcttgatagccttcaagttcacccatctaccaaaaccggcagcaacattagataacattgggacaatctcatctaaaatggaataaagactatatatgaatccacttacagattgttcgtgttgaagatcttgaatttctcgatggatttgaattcatgcacctatgtttcagaaaagtgtgaaagcaacctcagataagttctataatatatttagtctaatttgatgtcacaacttaattacattacttacatgtgcatcaggaacttgtgcaatctccaggagctggaaagcaaaaatattatcgtcaccaaaacagcagttacataatggttgaaaattatcctccaaagaaactcaagtctagcacagcaacttgtttatatgttcagtactccaagtaattaaattgcatcattgcggttggtaaaacaaggaagaaccaaagtttacctgaaccttgtcttcatatgagatcagtgtgccacctttaacatcagccagagttttcggggtaacctaaaaatggattttaaaactttactaaccaactatatgtgtagtatcttactcattcgataccacgcaatcacatacctccatgcaatattcattctgtttgtggatcaaatggttcagtatctctgttcaatagttaagtacattcccaaaaagctctcctttcttaaccagaaagtctgtaaagctaatatggtgaattaatggaataactaagaactatatatataaggatactcatgtccactatagcacccaagttatctgagtttgcaatgaacacatactcctttccctgcaaaggataaaaagggtgatattacatgcatgcatgaaaactttgtatgaaatgtgggagctgatagtattcctagatgacaatcacaaacctgtgaaagtaacaaatcaagcttgccactgttcatcagggatgggaagatatcaccatggccaggagggtacctgaaaaaatgtgtaatgcaaaggttgtaaaaaattcaaattattcgcctagttcatcttgctgatgtagcgatctatgaagaatggcttaccagccatccttgcaggtcttccccttggaaggccatggcaagaactcatcggctaccacacgaggatactggctctgcattggatcaaatttgttttggtgtcagtagcattttgtaaaacttggcgaaaacaaggaaattcagcagacatgcctgattgaaagtatggacttcaatgttcgaattggtgtatttctcaacaatctgcaggaaaagcgtgccggttagtactctgaaatttgttcagtcagaaaaggttttgtcaggtaagaagagattgccttcaaggtgtcttcatgggtgttgaatgagttcatcagaagcagtgggacattgctgccatacttcttgttgagggactgcaaaagaaagccatgtcaccgaatgccataatgcagtttgcagcaagatgaatcaacaatggatgaatcttgcgtgaagtttttaggaacccacctcgatctggatcacaatcaagtcgaggaatgtgaatccgttgcgcacttcgatgaccgatctgcgaggccatgagcaacattaattctatgttacattgacatgatgatgatgatgaacaatgtcttcctaataatgtccaaattgagaagagattgatgagaagaaaacacatactttggtccggtgcatcccatggtggtgccgaggccgccgttgagcttgagcacggcgagcttgttgagcagcttcttggtctcctccaagtcctccggcggcgccgccagggtgtcgtacggcaccaccacctcgtccgtcggcgtgtggatctttgcccattccacatgctcctcctcgccactttttttttcattaattttggatcatatcgattcagtaatcagttcatcgtcagatgcatacagttaagtagcagcttgatcagaaatggtcatccatggaggataggatgtgtttacctgaggtagcgggcgacgaggctgatgaacccggacttctcgttgtcactgcacgcatgcaatgatttgattcaaaacccaaaatcgatcagcagatcaaacttgagcgatcagatgaggaattaattcagaattaagagactaatataattacctgatctgcgagaggccggcgacggcttcacgcagcttggcgagcttctcgtccgccatttttgtgttcttgccgctgcttcacgctgatctgatgagacagatgaatcggatcggatcggagaaagctcgatcttgttggtttttataaataaacgagaggaaacgagaggagagctcgcatcgcatgaagaggaaacgaaagcaatggcggacaatgcgcgcgacgcggcgaaaacgcgggagcacccaacgtttttacactttcctcttttgtttgttaccttccatttccctcctttttttttttggacacaggtttcccgggcttttcttagagttatttatttattattactgctatttttaacgaggtatatgcttttgtggtgaagcagcacttctcttctgttcaagcatatcaacatttttcagaattttcttcatttcaaaacattgagcattcattcattcattcattcatcatctaattccaatccaatatcttacaccaattgatcagcacgtcaaaacgtattaagatttcagcatctgtacaaagaattaatattaatgtctaggagtcatccaagatgagaaccaagaccagatttttcctggaatgcgctctccctattgtgtttctaacatttcatctaccatccttaggctctcgttttcttgtaccgacatacacacaaatatggaggtaacattcagggttcttcaggttgttggcaacccaaaggaaaggtatgtccatgtcgacctcaatgccttgcacccttactagcttcactattttacccttgttggccacattcgcctcttgcgggctcgacgaagcagacgactctaacttctcacaacttcttggggtgacatcagaatcatcattaggggctgaatctggtgcctgaggagcagtttcggaatcgtcgggtatacgtgatgccttcgagctgaagaactcaggtagcaaagttttcaacgcatgttccagggtgatgtagcttctacctgcaccaaagaaatgtatcaggaaagcactgctgatactgcaccgtaaaacattctgaatcatagcaccacaatatcaagcataatggtgtaagcattattttttgggggataaccacaaccctttagtgaaaccaaatatttcatagcatctggatctctatccctacaccacacgtttcacaggaatgaggggaaatgaaatgtacaacaatagggcactactactgtctcgaaattataaaagagcgccactacttccaggttggtgaacgaaccctttgaagcatgcaaaaacggtatgcaaaccactcatgaaggacaagtaaacgcttgaccaaatttgttctactgtcatccaaaagatataaatgttaattacaatgctacataccttcctccctccgtacttcgaatggtcggttaatataggatatgctttcccaatcaccaacaggtagtgcatcttctaaatcataaaggtcttcttgaacactgcgcacatataatcgaacaggaaccctgcctaaccagagaataactgataagagccaggatggtagctgattcattgtaacatgttgaaatcacttattatgtgactacaagcacacagaaaatttaaaatgtgaaaactatgcaccaactagctactgtataaaaaacttgtgcatatggagtgtatgtgaatgctcaattaatagtaaaggtagacatattcaatgcagaaaagcatacatggtttgccagatccaggagattcaggctcatcagaaccttgttgaccctctactgaggaagttcgtactaagcaatcctcttcgaatggtccaagcttaagcctggtggagatattcatatacccatctaagttacctaatatcaaaataacacaattctggttaaatgatgaagatacagtattcagagaatgcaccacactcaaatagtaggcaatattagtcagagtgcttgatatgtactaatttacaaacaaccatttcataatgaacttattaagcatggctagtattcaagtgttctttctgaagagcacacctttcattactgattgccacaaagcaccttgatcagcctgagacatattcatcacattcttactgttgccagtgatgatgaaggcagcctgcacaagaaaaaagattactctcgtgatcacactccacttccttgctgcaggaacaaaggattgggtaatggcagatctcataaacaaacctctttcagggaattcatgtagctccactttacactatcttcgccatcacagagagttaaaatttcagaaggatatcccctaaaatgaacctacaattttatgatagaaaagcatcatacaagtcaagcaaggaaataaacaaataaataaatgggaaaatttaaacaactctagacttactgttagattccatggtctttctggatctgcacatagaaggtcgtaaagaactccaatgggtatatacctatagtgcaaaggtaaatcggggagttgggaatttgagagggtagttttgaagataatgttagagccaataaattcatattcataaatattcgacacacttcaacaatatgccactgactttgtcgatatccataatatgccgttgccttttccttaacctctacaatttaccatcgccgtctatagtctgttagtttgcattggagaaaaaacaagtgtgcccttagtgaagattggcagcactgagaccatgtcgtgcaaggtaccgagagttataataactgtttatttatgcaacatgattataaataattacgagcacatattttaagtattttaattatgagcaaatatctccaaggctacaggacaggagggggcagatctttgattgggtgccgatgactgttgaggagcggttgaggattgcactgacgacagaaccagcactccagcagggccagggccaccatgtccccttgcaagcgatggcggcgctgacgacggcggcggcaccagcaacagctctccggcaggggcgttgtgtccccttgtttgcgacggcagcgctaatgacgatggcagcaccaccagcagccctccaacagggacgccatctcccgttagatgtgacgacggctttgacgacaatggtcggaccgccgctgtggatggcggttgggccagcgctacggatggtgacgctggtgacggaggtcgtgccggcgctagggatggcggtgctggcgaggacatgtgagcggcggtaggcggagatgcggcgtggcgccgacgcgccgtggcggcactgggaagggtggcaatgcggcgttgggagatgcgatgctaggaagaaagggccctaggccatgcggattagatgattcaaaggatattttggtcattactaaaaaaattaacagtgcaaacagcgtgtagcttgacggcgatggtaaattgtagaggttaaggaaaaggcgatggcatattatggatatcgacaaagtcagtggcatattgttgaagtgtgtccaactcagtggtactgagtagattctctccataaatattggtaggagataacgtatgttaccattttaagggcagccctttgtattcaaaccaaacagtgtcaataccaggcgggagtgtgctgctaaaatgagcctttataattggtaccaacagtggaagatacccgattcttggccccaaagtctgttattgatgaaacagaactccataagtaaagccgataaggtaatgaagtatcataacataacgtaaattaattattaaaaaagatcactcacataaagggaaagatgagcaatgaacccaccttaacatatatggtgtgtacaaactcaaaagtataacttgcatttgttgcacttggtaaaaacaagggagaacaatgactatatatcatgcagcaactcttttctttacacataatatgtgaacaaaacaagcaagtcatcaattcaccaatcaagtccactgagtcaaaaaaggcaccccctaatattgtacatagacctacaaattcaggaatcctaattaaaactgcaatcaacaacctaagtgctagaacgattgtaatccaaacaggcagcctagtaatccagagaatctgagtactcgggatccaacaactcgtggcaaagatccaagatttggatgggagacctccaattgaagagcatagccacaggccgagaaggagaagacgatgatgggaaaagcatgaggctttaccaggaagggcggaggtggggggagggtggtgacgtcggcgtcgtggaggtggacctggagcggcacggcgccgccccagacccgccgcgccgcctccgccgaccacccggcctcgtcgtcgcgctgcgccgccattgccgccggaggagagatctgccgccgccgccgcctaatctttgatggtttttgcttgtcgcaggcagcaaacgactcggatttgatttccccttcttcctctcttcggcaccggtgctgtggctgcatccaccgtccgattctaccttgagattcgtgccaaatccgtgtgtagaaaatctgatttctgattgaactctgtatatatatatatatatatatatatatatatatataaagtgttgtaatttgtgtatggaaaggattacagaacacacacaagaaaaaatccatttaaagcatcagctcaatcaggattaaaacccaacaacgtttctttcatagctctaaactccaaagagaggagaggactggaaagtgtgaagcttcactctactgagcaattgcagtttcatcaacgtcaagtgtgcaagtacaaaatttcttcagtaagtatttaagtgtacttaacagttaactccaccatctcctatcttggttttccataagaagaaaagaattacaggcaacaagagtagctacctagctttttaatgctcctgttctaaatacagcatgccattcatcgtgtttgttcccacacaacatttacagtgcagttgccacaatggtccaagcttcagcatgtcatcaaccatttgcctgcttgaagtgatgcaagatccgtgcagccaagatgtcgacccaagtgtccggcacgccaggaaggcaccaatgcatgcagtcctgcccccatacagccaccgcgtccttctttccgagccagattgccggatgcgcatcggcacggaactcgctcatgtaggtcaggttgagcagctggatgtctgtgccaatcagggcctcctgaatcgccgaattcactagccttgcttctttgttcactcctccaaacctgggatcgaaccacaagtcgagctgcacaagattttgttacagccgcgtcatgattcagaactttaaaatgcatttctgaagcaaaaacagtctgaactcagagcgttacctcgtgttcttgtagaagccgatcagacacgcagctgccattgtgatcccattcacctccatagaagtgcctgggtgactgtgagcgccacagtttcagtgttttacttgggacctccctttcaatgtaagaggccatacttttgaggactactttcaatccatcgtagatgccaagtggcggctcaattggtttccctcctcggtagaaaacaaggggggtctcttttgggaatttatccaggccccacctgataagggacaagcatcaagcattataacaggaatggtgcacgcatggctcctaaccaacctaggaacaaattagaatttacaaagaattttatggagacgcacaagaattttatccaaagaaatttacaaagcaagatgcacaagcatgatctactatgcttagaattttatggagaagcacgcatccaggagatggcatccttggaggaaatttacaatataaaaccaaaagaacattttaaggctgtgcaagaaaggtatgacgagcccacctcccaagtgatgtccagaataaaaagtatgcaatgcttagagtcagagtatcataaggaactatgaacaatttccaaccctactttaagaaaaaggtagcgatgaaacttccactctactttgctagtagtaaacaagacgaatacaacagcaaagcatgcaataagaacttaatgctaaggaaacaattaactcaccaatgtccagtgttgaaaatgagcacatcatagaacctggtgacatttacccattcatcagcaggaatgtcaacatccactctgtaagttccctttattccatccttgtgaagctctttggaattctctacaggctgccaccttcgtatcattagttaccaccatgtgagctttatggttttatcatatgaagcaaagaaagcacaacctcatgcagtataaatgtcaaaatgccatagtcttaagttcaacaattgtagattttaagttcttgaaggaaacagccaaaacacaagaagaacggcatcagaaactgtcaatacatatctaccatatggttatatagttaacagcacaaagtaggataacatataacatatgtttgaacattatcagaacaaattttacacaacaaatagatcataatgcttgggtatttaaatacggtaaatcgtaatttcttcatcacattctatggatctccctgcttactcacccacagtcttatctctaaatcactattagtgcaatgtggataatctcatatttttcagtctggcctcctcacctcaaacctattaatctatgaaagaaagataaccaacgacataagtattgacagcattcagcagacaacatcagatacaatcacagtatgacagtaaccacaccactgcagagtgcagagcacagatactagccatgtcaatgataccaaaatcaagcacaggacatccaaacaaacaagatggaactgatccatattacaacaaaggaatatatgtgacatccatttttctcctgagaatacatccacttcctagttagcatagtggtgtgaaatcactgaattaccaagatcttcctgcaattgcctttttggtatggtataaaaaaaatcatctctatctcatgcatccaattcataagcatacaaagaaaacttaaatctctatagagtatagaccgcatcacattcaatggagaaaattgcatatctaccaatctaccatcacttacagtcttatctctaaaacatcagtactgatgcaatgtgggtaaatctcacctcacctagctacaattcatcccgataaacacatacaaagattgctcatatacacatcctgtagtctaatctaaagatgtaatggcagtctctaacaaacccggaaattaaagcagcacgatttcagcagatagcactcacgtgtacttggcgaggagaactgcgcggtggtacgcgacgatgacgtcatccctggggaagtagccgccgcgccacgcgccccgccgcttccacttgctcgcgccgccgtccgccgaccggagcgcgcacagcagcgccacgaccaggttctccgacagcgagtcccccacgagcccgatccgccgcccccgggccacggccaggaactccgcggcgtcgatcctcgggacggcgccgccgccgcagcgggcgggcgcccaggagagcgcggcgacgggtgggcggctgttgcgggggcagttccaggcgttgcggtggaaggggcaggaggaggtgtagagcggcggcggcaagggctcccgggtggggacccagcggccggcggtggcgtcggagggggcggcgccgcaggggagcggctgaggctgaggctgatgcggcggcggccgcgggggagggggagaggggaagaggaggaagagggtgagggtaatggggaggaggaggagtagagggaggcggcggcgcggcatttgggggagagaccctctccccggcgatcgatcgccggcggcgaggcaggagagcgagacggatactgagtgtgtttccacgcgaggccactgccctgcctgcctttagctttcagagtttttttttttttggcttttttcagattcagacttcttactgtactgtgcaaagtttagatcatggattcatggtatagatgttttcaacataagaaatttccaaaaatttgaagagaacaactcatggatctgaaaaacttgtagctctaccacatgaggacagtttcatgaatcaaaggactctgaatagagatttgttcgggtccaacaaaaagtatctcgaggtactggtacctcacggtaccaaatcattttcgatcgttggatctagctgggctggatatgcattgttagatccaacgatcggaaacgatttggtatcgtgaggtaccgatacctcgagatactttttgttggaccggagcaaatctcctctaaatatgtttgggaaaattcagacattcattcaggaattcagctactctgtacagaaactacagatacaatcacgaccatgaaccaaaaaatatgcatacccctcggtctaaaaaaaactcaattctaactacaaacttcgtagctagatttttttttggacagtgtaatagaggataacaagccaacaacaaaacaaatatattcataatgtaatgttctgttactacaggttaaaggcaattacgcagagcctaattttacagttcaatttctgtgcaatgtccatgctagtcagatgccaacagcaagatcagtttctttctttcagagctgagaatgctcaacccccatctcagacaagcgcgaaagcagcctcctctccagcttcacgccggccaactccgcctccctgatcagcctccggcacctgcccatcctcccctccgccgcgtagcctccgatcaggccgccgtacatgtcgccggtcgggacgaacccggcgtccttcatcctcgccaagtaccggacgcccctctcgtggtcgcgcaacgccacgcacagcttcaccagcacccggtacgccggcaggtcgaggaggccgccggcgtgccgctccatctcccacgccagggacagcgcctcccggtgccgcccgtcgcggcaccggctgtggatcaccgccgtgtacatcaccaccgtgggcctcccgccggtgtccctgaaccagccgaacaggctctccacggcggcgtaccgccggagcttcacgcacaccttcatcacggccgtgcagtcctgctgccgaacgtgcagctccggcctctcgccgagctcgtccagcagcgccgcggcgagcccgtagccctcaggcgtacggacggcctccagcatcagcttcacgtggacgctcgggctcagtgtcctcttgttgatcgtggcgaactcgaggagttttcgggcaaggcctactttacctgccctgatgaacccactgaccatggcttcaagaacagcacggctcgctgaagggacgcactgctctagcgcatcctccatcttcagctggtcgaagcgtgccaagacctcaattgtcgaagcgagaatccggtcgtcggggaagagtggcacgacagtctgcctctgagcccagcaaagtgtctgcaatgccctctctgggagccccatgtgcccaagctcccgaatggtcattgacaaggatcctttccggaggaaccgaacccaccgatcgagcacaatggacacgtcagactccggtggcagcgctgcaatctcccgggcaatcccaatgaggacctccgggttcttgcacacctggtcactgaatgaagagcgtgaagaaagtgcagcccttgctgccagcctgatatgctgctttggtgcaggagcattgggcagtcgtgtcttgtgaggcagtggcagcgggagaggtcgctgcctcaccgggtttggcggctttggtggcttctggcgcatcggccggtcaaagagtgccgagatggcatcaagctcatctttgctccactctacagcctcttcctcatcatcgtcctcatcctcagaagcagaagaattctcatggtatgtctgctcattgcggtccattacctccaactccatgacagaacccccattcgatggctctgtgcaagaaattcgacttgttgatgggagattgccatctctgcagagccaccaagctctggtcttcgccgaggccgtgcaaattccatacagtgcagggagcggccggttaaccagtgacatgcttcctgttttaagattaggcaaaatgttgttacttagaacaatattgattccagatagtagcatgataaagcaaaaggttgcaagtcagcatgtataataagcataaatatactactagtatgaattagaagttcataagagcctctcttatgttcccatcacagccacctgcacaaatatagaagtttgcctcaaaaactaacagacaacataaactactggatttagcacgaggggtgtttctaatatgcaaaccaacagttaggtcacaaagtagcgggaggattttgttgtccttactatttgtatttataattacaaaaaaacactaattggtaaattcccaagaacaacttccaactcaggttttcggcttaaaagtttcctgaaatcaggaattttctaaacatgtactggactttctttttgagcaatttccaaataaaatttcagtgcaaaaacaaattcagatttcagcttagcaaatcagtgattcctactcaggatcagaattgtttgacttcgaaacagagattttatactaaaaaaaattatagggctttcaaatcaagccagctttccaatgtgaaattttttacttttgccttgcaggtttcggaagctttgaaattgccatcatccccaccggattgcaaacatgtttataagagaggctctttgctttcgtttgaacagcgtgaagggaattgttcagaacgaatttgagatgactcgtttcaactgcagttgaaccccaaattccaaaatgaaacgcagagaacaaaacatgcaatcaagtttcatgaaatttcgccaaaaaatacgaatttttctatccgcacgttcccatatcaactcatgcagtgtgtaacttgacaggtcaagaattcctatgcatacaaattagaagcactttgggcattctattcgctcagcaatacgcttgagaacaaacagcacaaatgatgaattagaacagcactaatgatgggaaatacacacacaattagggaaccatggggggaattagagattgcttggcagagactggatttcacctgtgctttgtcgccagatggttctcttcccccgccccggcgaacggcgcgagcaagctcactggctggtataggttgctgacagctgcgctctccctggctggtctctactctgccacacgcagcggctgcagactccagcgcggcctttcttcgcgccgctctgagcagccgagtcgccggcgaggccgccacgcgtgtgcggcggcgccgacctgggctcctggatgagatgccgtcaaaaaatgcagaaatacagttcaaatcagggagcaaaatgcaaaaaatatccatattgggccctcgtggcaaaatgtcgtatcacggcccaaaaaatattgtcctagacttgggccatttgttcggcacacggcccacttaggcccaacaagtcaccctcgtcgtcttctccgatatttaattgtgcagctaattcagctgggagtagtagcctagtaggagtattaactgatcggcgatgacctgacgaaggctgtgtttagtttagcgcaaagtttgaattttggttgaaattggagatgatgtgactgaaaaatgaaaaattatgtgtgtatgataagttgatgtgataaaaaagactgaagtttggatccaaactttaaatctaaacacagccgaagaagaagacgacggaagctaagctagaatgtcacatcacgatgcgtgcttgctactcactgggcttgcctgccgtgcgccgccgtgtcaccagctgccgggcgatggtggaggaggagggccttggccttggaccaggacgcgaggaagcgaagcggagctcgacggcggcctctgggccggactcggcgaccaggaggaaggaagttggtgacgacgtggagtctgctcgccgctcactgcctgagtccgcctcggcgccatgctcggccgcgttgccctcagagccagctgccagccgtcgccgccttgaagcggatggagggatatgtattaggttagggtttttgttgttgttgatgtgtgtgtctatatatatatatatatatatatatatatatatatatatatatatatatatatatatatatatatatgtatatatacatatgtatatatatgtatatgtatgtatatatatatatgtatgtatgtatgtatgtagggatggcaattttacccatgtgtccggggtattcatgtggacacgtccgtccgaaaccgaaagcgcagtgggcaaaaattgggaatcaatttttaccaacgggtaacccatgcctggcccaatagttttgacacaagcaaacttcttgtcaccgacgataattactaggtcggttttttcttggacattaattaagataaggctcgcatagcccgttatcaacgtcgcaacatgtgcaatatatatactctaggtattttttttcttggaaattaattgagattaagctcacatagccagtcatcaacgtcgcgacatgtgcaatatatatactctagatattatatcattacacatatggttctaccgagcctaaccttactagaaattacgttgagtatttcggcttagtagcaatggtacattttttttatagagctcttactaaattctatatgcaggcaatactagttaatgttttcgattttgggtccaactaaaatatgatgaagataataagctcctacattttgcatttaaagacaacggttttataaatttttatcaacctatagatgaagatttagcagtaaaattattagttgccgaatatgtttttttccggcgtctatcttttcatcatacttttttttatcatttgcatttagtttatcaaagaattttgtaataagcggctataacttctattggggttgtttgacaagcggttttactgttgctgcagtcgattgctgccctgtcctggcacggcccaagatataatcctacagactggacccacttctcgccaaatcggcccacttaggcccactcatttctttcctcttcttcctcctcagtaccgacattattattgagcgtcactcgtacgctccctttgcttgtcgtccttctcgtcttcgtcttcttctccaatcgatttaattaattaattatcaagccattaactgatcgaggatgacctgacgatgaagaagaagacggaagctaattaaggctttgtttagatctaaacttcagtcttttttatcatattaaactgtcatgtacatataacttttcaatcacatcatctccaatttcaaaagtagccagccctcagcaagaaggtcacatcacgatgcatacctggtcaaagtcaaaccaaagatggataacacagtaccgctccctccatttcattttatatcggaagtcgtttgatttttttcttattaatcaagctttattaaatttgatcatgtttattgaaaaatttagcaacatctaaaatattaaattagttatattttgataatatatttgttttgtgttaaaaaatattactatattttctataaatttagtcaaacttaaataaatttggctgagagaaaagtcaaacgacttgtaatataaaatagatggaatagtaactaaaactaattaattccaaaaggttaattagcacggttaatcaccggattaatgaagaaggaagatacagaggcagtgacagttaatagcaattaatctccacttcaatgcgtatacataatgcacagacatgttgacgatttccatggttttgacctctggtataaatcctaactccttgtcgctgacgaggtaattgttcttggatattagttgataattaagattaagatcgcatagccagtcatcgacacagcatgtgcaacatctacaaaatactagtaattcagtacacacacaatcatgacaccaaaaacctaaccttacgagtattatacaattaagaactcattttctttctttaattaatcttgatcactttagctcgatcgatcccagcatcatcaatctgcatgcgtaagcagcgttgctgacgacatatataaattagcttagattagctaagttgaaacgcaaatgtacctaccagtccaccactcatccatcaggctgcacccaatgtctgaatcaaacagtactttttttttttcatttccaagttgctggttggttgattgactttgactgacacgtaagtgatcgcaatgggtttaagaaattcaagccactgatcacacggcaggacacgttttcaccacacaaattcactctctcaatctctgaattaatgagctgtataatcagatgtaacagtttttcttctaacagctggagctagtagtaattaactgctctgccgtttgtcttgagctagctggccttctcgtcagattctgattagttagttccaagtatggggtgtaaagtttcagtttgtcacatcaaatattaattatattatatagggtgtcgcataaggtgtttaggcactaaaaaaactaattacagacttcgttagtaaactgagagacaaatttattaagcctaattaatatgttattagcaaatatttactgtagcaccatattatcaaatcatggagcaattaggctcaaaagattcgtcacgcaaattagacgcaatctgtataattagttatttttagcctatatttcatactttatgcaggtgttcaaacgttcgatatgataggtgtaaaatttttgcgtgggatgtaaaagggcctaaatcgattcttgcagctaatttacaactaataaactgttacttcttgattgtttctgcaggagaaggaacaggagacacgtagctgcgcatgcagatacgacgactagttcttcttggatagtaatccaaagggggagtatgtaaaattagttttgttcctggaatcttggcgcatttcaaattgaatacagtttgaatattttaaaacacaaagtgattcggattgtgattgattccatgcgccaactgatgaacactagcagttcttaagcttgacggttttgtttaaatttgtgtacccctagccccaatagaattagacttcaagctgtattaattcaaactggaatgcgccaagatatataacatgaactctgtttggctgttgtgcttgcgctagtgtgcttttaacttttaattgtgttgatcaattgtctcaccaactatattgttgtacctttattattgcctccgttccttttcaattgatacagttgactggtatgaaatcctttaaattgtagtgttttaataaacatctttctaagtgtttgtaatttttctagaagtcaagcggtcaaaggtcatacataaatagtacttcactcatctcatatatatatatatatatacaaggcaccatcatttatttttcgatatttcataatataagacatatatgcatgtatgcaaggaagcacctaccacccatctttaattcactttttaaaaccctacattatcaaaatattttttttgtgggatacattatcaaaatatttaattccattagatgcatgcattttattcgttagtcatccaaacgaagaggtgataatagttatattttttgtctttatgtaagtgatgcatattatatttttttctaatataattattttttcttaattaataatttttttcggccggcaatgttcagccggcgctgcgaaaataatttaaaaatgggttacttcagtactcctacatgttgtccgtaggagcaggattcaagagccacgtagctgcacatgaatcataactcagatgtgcatgtgtgtgattataaatttttttaacaggagtacagctttattcctgatatg

SEQ ID NO: 8592 - DNA, 19349 bp, Oryza sativa
taatccattcaaaaagtttcagttttactgcataagaaacatctcagtaaaaggaccagttgcttctggtaataacatatcccaaatttctgtcaaattccacggttgcagtatgagcagactgtactgaactctgaagatctcaagaaatctcaaaccgatcatacgcttgattagcagaacgatatcttcttcatggacaaaaatgagtgagcagtcagaagtctttctttcagacgatagcagcctcctactgatactgttcatgcatcctgcttgtgcgtttggatctccttcctgcaatttcatcttcagtgacagagacgccacggctgcgaaggatcgatggtgacatattcttagctaaggtgatggactgatggtccattggaggaccgaaccaccagctatcaccttatctgcaatttggatctctttgtttgtaatatataccattattcatactctccttttctttgaaattctattcattacaactggcgtggtagagtcgcctgactgtatttcgtactatcaatagagacaccgtaaaagcgaaagggtatgtaatggttgcagtgaccgaaataccacgaaattctgagttcaaatctttatatgtatgtaaaaattgtcgcattataccgacagcctcatcttttagcttatgcttatgcttataagccaaaatttaaattttcaacattaaatttggagttgattttgggatttttttcaatcgtagtttatttttcagcatttgcttttagatcgttaagaacacgtatataaaaattttatttataaattatttttcgtttgcaaatataccgtttcgcttataccgtcgataagcgaaataatggagtcccgatcgagttagttgcacaagtggtttagtgtagtacttataatctgcggggaccttacatagaagttaaaacctttgcagagcaacttagcaacaagacaatcgtcatgcaatcgtgataaggttgtagattaatttccatgtttatgtatgcagtgtaaccatctggaatattttcctgcaagcatccggacaacgctgtcaaaattatctagattacccgactttctccatggacacacaaatcatgagatattgtacatgtagaaaaaaaacgaagttgaaaaatatgatgttttaagatggaagctttattaaactcaaatagttacattacggtgatacaatcatagtgaaaatactttttttagataagggtatttttactcggcctctacattcaaccggatatatgtaacatttttaaattaggaacttggccccctaaacagtccaatcttaaattcgctcttataaaaatttgaaccaaagaatttagggtgctactcatgttactgcaccattacatgccatttcgctagtgaaaatacctttggcctatgtctataactaagatgcatattaagaaaaaaaacctcaaatgcatatgttagttatctttaaaaaaaagaaatacggaaaatgttaagaaccgccaatcaatatacaagatcatagtccatgctcctaggtacaacactcgaatgttgtaactagtgagccgtccgatcctggaggagtggtctggattaattaggtgcgagttgattaattcctcgtttgatagggagagtgacaaccacatgccgtccaccactagcgagctagctctgccagtgtcacactgccagtgaagcaagttggcactgtcaccaagagagcggcattgcattgcatttgcgtgtggaaattacactaagctgatgctaatcctgcatcatgagctgctcatcaactaaatgaccctcacttttggtaattaatcccttccttcaggaaaaagttggagattcagacatcctcaaatcagaacacagtagactagccaaatttggttgcccagctcatcctgatactttgcactaacagaagggttcttgatgatcaagtacgctttgatcaggaaataattggggatggctagtgggaaatgaccaaatatctcaatcaacaaagccaatcaatctcacactgcaaaaactaaagcaagcttttctctctcccggctgggtgcgtaataacatgatccaaaaagacatcaggtagtactcttgattgcaatttgcaaactaaccacccaaaaattatattgatatggtagaaatataatagaaaaggtacttatctagtttatactatatatgcatattatgtactgagagatctgggtgtcatgtcgatctgatcatctccaattctttattaattagtcatgtataagttgttgagtcatccattactgcctttttctttttttttctttttttgataactcacagccttaaattgtttcatatacttccagttcactgtattggaacaatgtaacattatgagaattgatgggcaatcaagaaatgaacaggataaagaatcattctcgtgctttgcatagtgatagcactgtagtgtatactttctgttcgttacagttcatatggccttctctagggaggcccatctacagtgggagcccagaagcgcggtgccaagagcggggcccacgacagcaccaatgtattcacccatctaatctgcaccgtacaacttcgatcgaacgtctcacggagatcaaagcgagtcagagttttactctccgatcccccttggatccccaccgctataacgtactactccctccgtcctaaacaaacgaatctaaaatagaatataccacatcctattacagtgaatctggataaaaggtacgtctaaatttgtactactagaatatgtcacatccagtactaagttggtttttatgggatggagagagtagctccatcctataataagcgcagatgtgggttttagtgtctaactttgaccatccgtcttatttaaaatatttttatgattaatagtatttttattgttgctagaaaaaatgctcgtgcgttgcaacgggtgaatgctattttaattttattattgttatacggtttagttaagatgaaattcactttcggaattcgcttggatatttttttagaaaatcatgaactgcaattaggagtctgactttcatctcaagttagcatgcgagtttttttaaaagatatttcttatacgactccttttatatttctaaaagcaaaaaaatttaaaatccgactcaaatacagatctatattttgaaaagcgaacgaacttaaaaaccgactcaaatacggatgacataccaaaataccggcaaaaacatctttaatttttataatagtaaagattagatgataaaatataaatagtactttatgtatttatgacttaacttttaaaattttttataaatttttcaaataagacgaatggtcaaacgttaggtacggaaacttatggctgcacttataatgggacggggagtattactgtaacgaatatacgctaacacgtggatccacccgccgacggcgccactccggccaccggaaagccgtctccgcttttctctggatggcggccatgcatccgccattgacggggtgaggagctccatgaaagcaagcggtggctcaaaggttcagagttcagaatgggcaatagatgctacggcatatccttgtgctctcacagtagcttgaagtcctgcttcatagtctgtaaaaaaaaaagaaaaaatttgatccatagcacataaaaaacccggtaaaaaaaatagcacaacaaattttccacttcgactaaaagcacagggcaccaattttcttgcgattcatagcactcccgtcacatttgtcatccaaacatgtgagttgatatgaaaaaaaactcatctacccttcttccccgagctagtgctcttctccctcagcgatgttgccgcgcccgtgtcgccgatgctcggtgagctgacggagccgcgcttcccgcccgtccgctcgcgaatcatcccaacgtccgccagcgcgcgctgcaacctgcctgcataagcggcaggtcatcgtccccgtcattgtcgtccccgtcgctctcatcgtcgtcgtcgtcacgtagaagcagtggcaagccggcgcggcgctgcgccgtggcgagggagaggctgttttgcggtgccgagtatggccaccacgggccacatccatccacgtcgaagctacggccgcccacgtcatcgtcgtcaagcggccgccggcgtgggaggcttgccctcgatcagcagcgccgagtgccagacgggatccacctcatcgtcggtggcgacggcgagccacgcacccacatcattgaagagcgcacgcgcagctcgctcggcagtggcgggcgccgcgcgccactgtccatgagggagcggaagagaagacctggtgggtaacgtggggaacgaagggcaaatgtgtccgacgaaaattttgtccactccgatctaacgccgttacttcaaaatttgacggaagtgttacaaggcgaagaaaaatcggtggcctatgctatagatcgaaagcggaaactttttgtgctattttttggtaccgctttctttcctgtgctatggattgaattttctcaaaaaaaaaaaagggttgtggaagaatttccacggttttcccaggtggattattattcacccgattaagtgagacaagaatatacatagctagtcagattgatcataaatagcatcgcatatatcagaataataagtatcttgtatcgttctgtattgtttggggtttgctgaaatctgaaaaatatactacacatgttcagagttcacaacttcagactgacccatttcaatctgcgcatacagagatgatacatattcatacttgttttttctgcaaatgttgtctgcaatcggaagtgtgcatacatgtgggatgtgttctgattattgcaatcggcagcatgcatccatacggctcggtttgtaggtgaagaactgaagatacaaagatttccaagagggttcggagttttattctccgaacaccttgggtctccaattttttttatcagtaatttctcctctcagtagagtaagttcggcccgataaaattccaaatgcgtgacatgtatgtataataaaatgaaatccaaaatgcctatgtttatttcggtgaatatatttacctacctgacgattcactgacgagcatgtatgcaccgctatgaaggaggcttcaagttcagaatgaatcagatcaatagacggtacagatacatacttcagacttgctaccccatttttcactgaagtacaccacccctctctgaacttctcatgcaggagtaggaaccacacaattgatagagagattgaattagcatgcccaaggggggtctgaacccccccttccttttttaaaaaattatcttctaactgtccactacttttttttagaaaaaaaaaacgaagcccaaataaatatgcacaagatcgatgcatgtatgcatgcaacagcttccatatccatgcatactgatcgatatggcatatctccagagttcagaaattcagaccaacccattttcttacagttcaaatctgcgcctgatcaacggttcgtttttcaaactatctttttctgcattgataggcaatcgtgtaatgcagaaaaacggttgcaatcacagattacatatgatgcgtacgaacgtgttgctaaatggaactaattcaataatcatacgcttcgtaggcaacccaaaagaggggtcggagttttcttctccgaaccctcttgcatcccccaatttttcaatttgtgatcttcccactggctttttttctttcttttttgaaaggaaggtaaattaggcccgtttaaattcaggcacaaaagcagcaatatgaactagtggctcgatcaaagccggaaactttgagacacctttgtgcctaatagatattctgctgtgtcctaacacaatagcaagttgcaatgatctgcttcacactcgagaggcatggaatctccattttcctttagagcacacaaccagatatactctgcaactttaattgactttgctatgttcagtatacgatggtgtttggttggaggggctaaagtgggactaaactttagtccctctcacaaaaatataaatctctaccatagagacttatacttttgtgagagggactaaatttagtccctagttcccaaacacccctatgtacctcaagatcatgcatggatgcatgcttgctgctgactgatcgatcgattgactgcaagttccaactaaaacagtaacgtgaaattgcgtctacaccaatgtgttcatccatctaatcttgaccgtacaactttgatcggagatcaaagggggtcggagttttcttctccgaactcctatccatacacgacggtcatggatgcgtgcaggaagcttcaagtacagaatcgatcgagagatctacatgctgattaaatggaagtaatcagatatccaaaggagttcggagttttattctccaacctcctttgaatcccattattttttctttgatatcttcccactgactaatttttgttttgagagaaaactaagcctaaagtaaatttggcccggcccatctaaactggaaaaagttcacgtgcaagttcagtcttgacaacttcagaccggccaagttcaaataagcaccttaccgatggatgtttcagatgcaatgccgagaagagagggctgcaattgcaatggcaagctacatacgctcatatgtacgtgttgttaaatcctaaatgcaaccaactatatactgcgtaggcaactcaaagagggtcggagttttcttctccgaccccgcgttatcgccaatgaaaatcatctcgctgacttttattttttataaggaagctcggcctttaagtaatatttggtgagcctgaaaattaattgatacgatgatcacctaaacacaagtgcaagttgcaatgatctgcttcacactcgacaggcaaggaatccccatgtttgatcgggcaaaatagatgcagttgatgtggttcttggaagcctcctcggttcagtaactggaaagttgctgatgataaaaactaaaaagtaagacctaattatcgtcctctacactaatatatggattaggtccctatgacttttatggttatcgaagcagaagctagctactacaagattatggttgcaggcagtatttagaactacgagtaacagtaagcaggccacaggacaggagacatagtaattaaaatttacttatgtttcttcttcttcttcacagttcacatggaaatcagaaggaagtagcaaaaggaagagctgttctacactcgacagagtaacaaactaagagagcaacacaagtaacaagaggagagatttagtctcttttctggtgttctgcaaataaaactctcccctcttgctacccctaaaccccaacccaaggtagtagtaagtcaccccactaaaagtaaccggccatctcttacaaaaattggctgtctcctttgaatcaatcgaatcagatcatcatcatcatcatctacagctcgtcatgctcgtcgtcgacgccgccctcgccgtcggcgccgccacccggggcgccaccggtcctctggtagacggcggagatgatggggttgcagacggcctcgacctccttgagcttctcctcgtactcctccttctcggcggtctggttctcgtccagccactcgagggcctccttgagggcctcctccaccttctccttctcctcgctctccagcttgtccgccagcttgtccttgtcgccgacggtgttcttcatgttgtacacgtaggtctcgagctggttgcgggcgtcgatccgctccttcaccttcttgtcctcctccgcaaactcctccgcctcgcgcaccatccggtcgatctcctcctggctcaggcgccccttctcgttcgtgatcgtgatcttctccgacttgccggtgcccttgtcctcagccttcacgttcaggatgccgttggcgtccacctcgaaggtcacctcaatctggggggtgcccctgcaagtttaaccaacagatatcaggcgctggattcatttatccatttgagtaagctaacatttttttctggacatgagcaaaccttggtgctgctggaatgccagataggtcgaacttgccgagaagacggcagtccttggtcatgctgcgctcaccctcaaagacctacaccacaaggcgagattcagaggcgttaggtggtctgagctgaaattttctgaccaggatgtaatgtcaggactcaaagaagaaagtttgcttatgtctgttacctggatggagacggttgtctgctgatcctggtaggtggtgaacacctgggacttcttggtggggatgacggtgttcctggggatcaacttggtcatgactccaccgacagtctcgataccgagggtaaggggtgccacatccaggagaaggatatctgcgtaccaaaatcaaagcacgataagtatatgcaagacagatgatcgcagttgttaccaacccaaaggactatgtatgtgatcaaggtcgaacctttggtttcgtcaccgccctcgccgctgagaatgcttccctgaaccgcagcaccataggcaacagcctcatcagggttgacacccttgttgggctccttgccctcgaagtagtctctgaggagctgctgaaccttgggaatcctggtgctaccaccgacaagaacaatctcatgaatctggctcttctcaaggccagcatcgtccatagccttcttgacaggtcccatggtcttgcggaacagatcattgttcaactcctcaaatctggcacgggtcagcggctccgagaaatcggtcccgtcaaagagggactcaatctcaacacggacctggtgctggttgctgagggccctcttggcacgctcagcttccctcctcagctttccaagagcacggttgtccttgctgatgtccttgctgtacttcttcttgatcaacttgatgaagtactccatgattctctggtcaaagtcctcacctgaagagatgagacagttcagtcaaatatgaatcacagtgcactatccagataatcaagacgaccaactaactacaaaaggcatgtcattagtttaaaagcaaatgaatagtgccaatcttctaaaagacagcgtgcctttactgaaaagtctaatgagaatgtgcaggtataagataaccaatttaccatgatgtgttgcatgaaaatcattgaatcaaactacagtactctacaactgtgatgttgtacagaagcagatatttagtacctaagggcaaataaaagcagtcatacctccaagatgagtgtcaccattggtggccaacacctcaaacacaccgttgtcaatggtcaagatactgacatcgaatgtcccaccaccaaggtcaaagacaaggatgttcttctcaccacccttcttgtccaaaccgtacgcaatagcagcagcagttggctcattgatgatcctagcaacattcaggccagcaatgacaccggcatccttggttgcctgcctctgcgcgtcattgaagtacgctgaaaacatgaaagagcagaagtgagcaatggcttccacagaatcaccgcttgagttaactaagcacatgaatgtcttgtcattactaaccaggaacagtcacgacagcatcgttgatcttcttgccaaggtatgcctcagcagtctccttcatctttccaaggatcatagcactgacctcctcagggctgaagaccttgttctctccatccttgatcttgacctgaatgtagggcttaccgtccttgttcacaatcttgtaggggacaagtttcatgtccctctgaacttccttgtcttcaaacctgcaagaataattatacaggtcagatcaggcagcagtgatcaacaacaggaaataagagcgagcatagggtaaagtgccattactttcttccaatgagacgtttgacatcgaagatggtcctctctgggttcacagctgcctggttcttggcagcctcaccgatgagcctctcgctatcggtgaatgcaacccatgagggtgtgatacggttaccctggtcattggcgataatctcgacatgaccattcttgtacacaccgacacacgagtaggttgtaccaagatcaataccgatcacggtaccgagcttcttggtctcctccttcgcaacagaaaatgcaaacagggatcctgcaaacagaggagcagtggcagtatgtaagctacatgttctatcaattcaccatttatcgtgtattggcacacatatacacaggcatataattcatgtgattttaaaacagtaacatgaattatgagaccaagtaagtttctaaggtgaaaatctaggcagcccgtttcattcatgccattctagcacattttgcgcctctaaactattcagtgttgccctagaaatattttactactagcatattcagcataattgtgaaggtaaaaactctaccgctaccaatgcacaggacagatcatggcatcactgcaattaaaccagtatctaacaaacgaattccaacaaaatcactgagcactactaggataaatcataaataaaccccagatcacatatttcttggagtcgccagactcgccgccttcacctattggtggcatctaagtttaatcgcacctcaatttgtgaagtagtacaaaaaaaacaaatatcaaatatctcctaactaactaccacgatccatacgatccatcagtgtcactctaaaaccatttaccggaccatctcgttgagaaaaaaaaaaactactcccggatccgtgatccagtggaacgaacattcacagcccatcttagatcgaactccagcacaacatcaaatagacaaatctaagcgcgcgcaagcacagatccaaacgaggaacggggagatcgcacctgcgagcaggacgccgagcaggaacgcgcatccgcgaacccgatccatcgccgccaacaccaccaccaccacgcgctcgtctcctcctccacctctctctcgaagcttctcttctcttctcccttgtgcgagtttgggttgcgatccgaaaaccttcaagtgagtttgagttttatgggttcgtgggcgatttataaggggagatgacttgaacgggccgagatctagttgcgcccccgtcgcgttggccgggacgtcatgagtctgacctggaccagtccgagcacgacacgtggatgccccaaccaatcgcggtggtctctgtgctgggggagttgcggccgtccgtgggatcgatccgacggcggagatcgtcccacggcgtgaagtggtgggattggttgggtggcgtggctccccgctcgcggctggtcgggacccgtttactgggcgtggcctccccggcagctgacatgtggacctacttttttaatcggcccaattagatactcctagtttggcattagtttgaaccggtttcgtggatttgccatcacaaataaagggttgttcagattactgttaaaatcaagttagtaatattgtcaatttggtaaattaggattatgtgttgttgccaaaattttcaatgcaataatatatttgtcaattttaccgaacaatgttatgtcttaaaattgcaacaatctcaacaggcccaatgtgtaattgcatatctccatcaaaaacggttgaaacccattatacttgctattgaactgacagattagacgaataccattagaaaattggtttttattaagattagggcaaagatgcctttttgttgacgaaaaaatcgcacactgacctgggagatctgcttagctcctgtgcaggtacaaatcttgatgagatgtgggcgttccagtcaatttgatcctgcaactaacaagatatgcaaatagtagatcaaaacagccgatcggctaacaagccgatggagtagttatagctaatcgccaataatagccgatgctgataccagccgatagcgatagggtttagagcaatcggctatatgtccaatgtagattctaacactttagtaaataatgttatataggcaatcggctactgataataaaatataacaataatatagtccagtataaaccaatcggctagcattgatatgataaataagcatcgatccgaaggttaaagcatatatcggctggaggtccgatgtcatgaaatccacaagattatattaaacagtgaaacctctgttgtcatcggctaaatccaacttatatgtatatacaatcattatgagccgatgcaacgtccagataactcatcggctcaaaccccgatgaaacccttattggcagtcaaaaagcaggctagagattatggttctaaacacgacttagtagatcaaactcaactgatgcagcactaagtatgaaaagaaacataatatctagacaatcaagccgttgactaagttttcagagtggtagatgtctaagctaatctaatctagcaacacgatttagccgataccggcagaaaccctaaaacgagaagcaaccgatagagctaaattgatatgctaagactagattaacagagacatatgataaataggtaggcaaatatatcatcgaaaccagagcaatccaagaggtcgaatgtactgatgcagccttgaacgacgccgatatagatgagacaattgcttgggccgacggaacattggacttaccccttcgctggagatcgaacatcgatgcagccccgcgtcaggtgccaagtcccgccggacaataaaataaagtagaaaaggtaaaaggggtggcaatgcgacgaattgtattgatcgtgaggatagattacataggccccgggtgtacatatttatacccgtgggttgatacaagtccttgtcggacaagaaagaaactaacctaaagataaaaggaaaacataaagtccttattggacactaaacacactttcctaaagataaaaggaaactaacaaactatttctaattaatagataacttgccacgccgcatcctctttaaactcggtcacttagggataagcttcctttaatagattgatttccttaaccgaatatagcaggaatccgactattggcgacttgataactcccatcggctgattccgagatgctgcagccgataatgattctaagccgatgacgtctttgccgattaccaaatttcactgttaacacctttcccatgaaattgaaagattaacacaacttatccaaaatctagctattgacaaccttgactacacaatacaacattgatagaaggttacaaccatcttcctcctcctcctgcaggtgatgtagtatggctttgttgttgttgcctccttttttaatcctattaagcatatcactaatttattggtagtggattctaaattctcgatggatatcctcttgttgtttgcatgtcacctaaatggttacgagaaaaaaatataaaaaatcaacaagatagattaatatatgaaaaatcacttcacaaatatgtaagttaaaatttaacttctacaagttgcaacggaaaaaaaattaaattgtggctagttaatgtatattcgcagtcaaatttgtttttcgttgcaacctgtagaagttaattttgacattgcatgtttgtggagcgatttatcacatattaatcaatcttgttgattttttttaaaaaaatcataactatttaggtgacatgcaaataacgaggggatgtcccctcaagagtttaaaatagtttcccttttatcttatactaggagaaattttgaaatatcacacttataactttattactatcaaatgggtcaaattatactaaccttcgtataaaaatatgagctagaaatgtctgaaaaagttatattctggtacagatgtggtaacattttttaattggaagaaatttcacccaagaaactcattcgactgaataaattgaggttgacaatgtccatcggacagtagtacaagacgcaagtttaagcagacatgtgttgacggatacagtcccaatttgtcattacgccttcagaaaatgtgactcttcttttgaccatccaacaagatactacttccaaacaaaaacatgctcatgatagtggttgattctttttggacagagggagtagttatttttgcacaagtagggataatttaaacaaaacagttgcttcaggtacgaccttgtcaaaaagaaaaaagcacttgccatcacatcatttttgcatggattcaacaaatcttacactatggagagcagatttaaaagagagaatgtctagtggaaactgcaacctacgtggaaacatataaactacagttggatagaaaatgtacatcccatatatgtccacgtcgtccaagttaaaatattcagaaaaaacatcacctgattctgacatttagcatctcagtccccacatcaagcagtatcctgattcaaaagacatatccccaaatatgatgatgtggtagtgagggcaagggttgcggcgcgggggtggccactcatggaaaggagatggcagtggtcgctagcagcgccaccatttcacgcaagtcacagcaacacgaatcaatccccattatgctccggtgatgtcgaggcatctaccaacggggttgcctagtatttgtcgtttgctcctccaacattaggtcattatctcctcttaatccttgctatagtgaatgcatgttctttcatgggatatgcttcttgttgatttggacaccttcccaatttcaaatgagctagggtttcaatgccgccggcactcccaatttcatatgaactattgatgctgccaagacagctacaacttccatcgcatgtccttccctctatcttggaatattccctcattggtagaccagaaatttgctcccacacaaaaggtattaatggtgttcctctatattgttgatgttcgttgagtttgtgatgagctagtcttgacactcttctatgaatccatctctctcacaaacaagatgggatcagtttgtgttgatgtcttggttgctttgagccccccattttgttgtgactttcttgcttggggaaaaagcatattattttcattaagaaaacctgaaatgttttcttttcttcttttctttgctagtaaaatccaagtactttgttgggttgttatactttcctaataagtgaaattaattgcagtttattattgtttcggtgcatcaatagattccatatgtatggatgaccctctaacattcttcttggaatgggttgttagcattatatatggaaaagtaattatatatggaaaagtagggaaaaagaaggaaccattgtgttttggaaacactttgggcgttgggtaaatggtgtatatgaaaaatgtacacaacatgatgaggagagtattttgtaaaatgtatcgtggggatggcggggctgacaagtcttcatacaggctgcacattttggatccaatgatccacgatcgaatttacaattttccatgtaggttgcaatttccactaaatacatatttttcctagatcttacaggcactcttcaatctaacttctcatttatgttatagactatttttcctagatcttaccggcactcttcaatctagcttctcatttatgttatggactatttttctaccaagtacaacacacgggtagcaatgtctgggtgatttcaacaacaacattaaattcgctggtataatctacctccatgtatgcctttccttgatgctccaccaggtcacttatccgttctgcaactgatatttcacaaacaataacaacaaatcaaacaaagacgacaaaacaaggaaacaataacaacaaatcaacaaagatggcaaaacaacgaaacaataacaacaaatcaaacaaacaaagagggcaaaacaaggtatgacttactgaattttttcgtaagttgcgatgctgatcctgctaacgatagcctatatattagctttgttgctcaattcatactcaatttttttcagaacaacatcaataaatgtccttggatgggttgcaagataatcagcaattaagagttgctcacgcggtttatacagtgttttatcctataacctcataagtaatagtaggtcaccgaccccctttgttatgtctcattgtgtagtacccattaatagacccatgcacatttgaattgtctgtccacacaactaagttgtcaattcccatatcttcacatgttatgaaaccaaattcaactccataagctcatgagtatttttacatgaaatatctctaaagaacttggcaagttggaacttctcctcaaaccatatggtaatttaaattgttgttttcccaatatttcccgcttctccatcacgaaacaatgcatcaactaataatttatgaaatcctttaattccatggtcaaaactcagtctcacaattgcctaatttatgaaatcctttaattccatggtcaaaacgtagtctcacaattgctgatgttattcaagaagtgatcccactcggcacagtccacgtaatagcagagaaagacattactcaacattgtaatagctaacaataatcaagcaaaagaactcgcgcatacatatgcggtggcatgtacggtggtatgcttatcgatgagctaaagtaagaaaatgttcacgataaaattaaatacataccacctaaacctcgtgatgtagaaactgcaaccacctgaaactcatactaatttttacctatctaattccagcagtaatgtgcaagaaaatttgaaaacttattcagcatgaaggcttaacatacattggataaactaatcaatgtataaatgtcataaatgagctaaaactattgcagaaatgctgctgagataacatgaacagcctcttaaatccaatgttgagacatgttttttttcttctggttttcagttgtactcgcttttcagttggagactaattagaattttaactgatcccaaactaaactaaacatatcagttttgtcatcgtttatggcttcaccaaaataatgctattttgttctgcaatagattaacaagcaccaaggaaccagaaacacgcaatataaatgatcaaagccagagaaaaccattgaaatgcaaactagtacaaaataaaggtgcaaagtcatgtcccctatttaatatattgctatatcactacgcatagagcttatgtaatttatcccgggttgtggagatgcttggggccctcttctcaggccccctaccccctcttatataggatgagggggagggtttacaaggaaaatatctagttgattgcaactagatctccttattctatttataaaagatatgcatgatccttgggatttatatcttatcctgggaatatctcttacttaatttacaagtagcctagggctcttggcccaccctatgccacgtggcccaagggcctctccttggttacccgggtaccgtgtaccccacaaatttagaatatgatttttttttactagtgcgagaaatttcatcctgctagctattgctgcaacttattgaaatctttgtgttcttttttagtgttagaaagtatgacgtaatttgttgccttcatttgcaagaaaatcaaacaaaacaaatcaggtgcatttagatgctattgtccatttttcttaatattgtatgaaatccattgcatttgtaaaaactgaaattcgaattattgaataaccaaagattcaatttaaatacatgagtgcgttgtgattcatgatccataccttttgatgcttctagattccagttcagaaagccgagacaaggcatacttcatgaaacccaatacgcttccattcgatgtgattgtaaccctgtaactatgttagcaaactgttctattgcctaccaagtaccaactcgtatggtattgtcacaattttctttaaattcattcttttcaccctctcctggaaaccattggttatatgatgaatgatattgcatgatatattaaatgtgtctatatgatatatgtattgaattctcccgtttcctttttcatttatcttatacaaaggcataaatgtcatgcagttcccaatgtcgaggtccttgagcatgtttcatctattcttaaggattttgggttttgcctcactagagaaggcattgatgcgagaaacctgtattgctctttttttttgcaatgattctgcatttagttttcttgatcatgtattattctttctcttattcttgaagccgtccctatgactgcaattttacaaaacatctgatagagagttacatgataaaggtttgtgttacttatttctacctttactttttgttacttttgtgaagcgatttggtatgtgggcggcttttcacataaacagttcccagtggctctataagaaagtcattaagttaagagaattatatattatatatttacaatccatgtggatcaaattccaaaattatataaatggatagaagaaaaaaaggtaaattacatatatcgacaagggcattttgctagtattaaaaagaaagatgctagaagtatgctttctcattgaaaacatttatatttacgtcatcctttttcactttcttggtgcttgtgggaaagatgtttctgccatgctctgtctgatttatcatcttgatatgttagcaagaaaaaagcaagcagcaagtaattgtcaaacaacaaggcccttcggtactgctgcattcatgggcaatggatattctcgtaatccaaatcataatcttttgttggaaagagtttggaaaccaacaagtaatcatcaatcaagtaggctctttggtactgtcacaccccgaagttctcctcccaagcctaaatttaatttataaatgaccctaagaaaataccggtgcaaagcaagagtaaaccccttttaaatcaatgcaagtaataatcggaatgggaatgtggaatttttcttgagttctacatgtcgaaattcactaacagaatttttagtgaaattttcagagccctagaaataattttaaccaattaaaattgagcaagcaatattttaattccagggaaaatcctttttttcctttttctttttctttttccctccctttttcgaatgggccgctggcccattctctcctttcctccccctcctccctgctgggccggccgcaggccgaggcccaaccaggccgccccgccgccctcctctcccgaggtcgccgacaggcggggcccacctg

SEQ ID NO: 8593 - DNA, 1381 bp, Oryza sativa
acaatctgtgaattgatcgaattccttctgctgccattgttgattttgtgcagtccggcttcgtcgcggcgtgcttcccaccgctgctgcgagtgatcgagttcgtgggcgaagacgacctcgacaacatcggcgagggagaaatctggactacggttgagaccagagggaggtcggtgaggctcctgaaagagaagatcgcgaagcttgtgggctacgaagacttcacgatgtgcgtcagcgccggccgccatgggcagttcacccctctgctcatggatgccaacttcgagggcgaagatacgttgctgtgggaggtggtgcgcgtccccccgagtggagacatgccggggctcccgatcgccactcaggtgagcttctccgatccttctccgctctcttcttgcgattcctgtttttttgttttgtgtcttgatgctgatttcgtcggaaattaatcttgatttcttgcaagaattaaccgtgcagtacaatttgtggattgatcgaatttctttctgctaccgttgttgattttgcgcagcccgggttcttcgtcagggtgtgcttcccccagccgctgcgggagatccagttcgtggacgaagccgacctcgacaacaccagcgagggagaaaactgggctacggttcagatcagagggaggtcggtgaggctcctgagagagaagatcgcggagcttgtgggctacgacgacttcacgatgtgcgtcagcgccggccgccatgggcagttcacccctctgctcatcgacctgcctcgccgccgggagaccctgcagatcgtccttgtcaggcccaacaccgaatgtaagcagcctagttaaatatgaatgttgctgaattttctgaacaatgtttatgtggttctgaattttgctgtgaattctagtaacggatggcatggagtgggcagtgtctctgtttttttgatttttttttgtgtcagatcagcactgtagattttctagctttcagtagtttgtgcctgtttggaatttcctgaaaatgcagtgatgatgtatttgcagaacttatctttcagtagagttaggatttgtctgaagaatactgtagaacagcagaactgcagaagtgaaatatatctgcacttatctgatgaatattcattccagtcatcatcagacaattgtgtgcaccttgggtttaactgaatgctgtaggattcatctgaatgttgtagatttttcggtgtgaaattcagcattcgagtagcattttaacatgtgaattactggcactgtttttacttacaagagctgtaattcttgtgtattactctttctaactgcgtgatttgtttgctatggctgcagcgtatgatcagttgatattcccga

SEQ ID NO: 8594 - DNA, 3376 bp, Oryza sativa
aggtcgtcgaccgcgtgaaggaagcgctcgtcttcgtcgtcgtcgagttccgaggccgagccgcagcaacagcgccgcctctccatcgagctcagcatgccggagatgagaaaggagggaggggatgaggatggaaacggagacagcgtgagagaggagacggaaaaaggggcgagagtggcatgattctcattttagaaatttctagtggcatgtagccgatatgaagaatagtagtggcatttttttaatttcacaaagttgcagtggcatagatccaattaaccaaggaaaaagaccctgggaaaaattcccccgaggggattttttgggtgacatgccctaccccctccgagaaaattgacattgtgccatcgtcaaaagtgggtttcgcccaaatgccacttcacagaatggattcgataaaatgccactatcaacacacggctacacgctaaaatgctatgttggaccaaattaccctccactcctcttcttcctccttccaacaccatcggctccacccgtaccgtccgcacaccactaccgcctcaatggccgccgtcttcttcatcctcctcctccttctccccttgctcccgtccaccaccctcgccgttgttggaaatttggtcataattcggcatattttaatccaaaataacaagataataatcatgatatttacaataggatttgatccagtgatagtggtgaatgtaatcaacatgagcatgcttaacgttgaataagcatcaacaattacataatgacacaatgttgacattgcgatgaacattaacagtaaaacttctaattgaaataatgtaataaggttataccccaagaatggtcctccgctggagtttgaggcagtattgcctcagttggtgttgatgggagtctccttctccttgtctccagtgttcgacatgttggtgaagatgaagtagatgttgacgaacagtgagtagtcgcgccttgcgctccccaaaaacctgatcgcccgcccgtctgtgcaaacgtcgcagcaacgcgtggtttcggaggcctactctcccaacgcgtgtgcacacactcgtcgggatgggattaccgtagcaacaacagctttggaaaatggatgaaagtgtgtcttcttcttctcgcgggagatcaaatccattcccattttataagaggaatggaagatgaagagtaagagtcatggaataggaagaggaatggagcaactaattgtcatcaactagccatgaaccatcctccactacacaaccatcaaccaacaatcaattaagagtaattgatgtaagttaccaatggaataggaagaggaatagagcaactaattgtcatcaactagccatgaaccatcctccactacacaaccatcaaccatccatcaattaggactaattgatataagttaccaattccttaatcaaatggattaattctcaaaactcttcatcccattgatatcccatagaagaatgaattcacatgaattcctagcataatgagccttggaatttatttgatttaattgatttaaatggattaattacccaattaaatctaacagccgtcttcccctacttcctcgcctgcggcgccgcctccaacgtctccttcccaggcgactccccagcgcgcaccttcgtcctggacgctcccttgctctcatctaccggccatgtcccggacacggtgttcttcccgaacaacctggtggagccacatcgggaacccgtcgaggcgacgtgctgggcctccttggcgcgcaccccgtggttaccctggtgacgctgcaccgtacctggactttctgcagccggtattcccgacgacgaggtcgcggacggcagcgctgaggcggttgttcgaggggcccgcgaggcttgactcggctggcgtggcgcagcagtcggtgtgctacgacggcgagtcggtgacaagcagtggctctcgccgacggccacattgcatattcgttctgttctaggctagctagtatcgatctgttttagtgtgtatcgaactatcgattataaacgaatcgagtgtgtcctgcttgtgctagctagtatctaccgtgcttgtgttcccgtaaaggctgcaccaatcgacaatggtgggtggaggttgaatcggcggctcgagcgtggtggctgcatctcaaagctgccacggtgtcggccgagcttgaggaccgcgcgagcggcgactggcggccgagcttggggactgcacgagtggcgaaagcgacggccgtgcttagaggctgcgacggcaatggctgtgctcggggaaggcacatcctcacgtgggtgggcgtacggtgaggagcaaccggagttggaagagaagatggcgatgagagaagccaaggttaatttggtcctagaaagtattttggcgtgtaaacatgtgttgatagtggcattttatcgaatccattgtgcggaatggcatttaggcgaaacccacttttgacgatagcacaatgtcaattttcacaccccctccattcccttggagggaatcccaggctcccagccgaggaaagcctcccctgtgtccatttggaaaaccgatttaccccctgaactatcgcggtcgaccgatttactcccctaaactcgaaaaccaaacattcgacaccccaaactcttaaaacccaacaaattaccaccctaacacagatcgaagcggttttctgcctacgtggaacacacgtgacgatacagttagcaaaaacaaataaagaaactagtggggctcacttgtcagcatttttttcctctcctcctttgcctctctctcggtgagcagaggagagaacacgcggctgcggcgagccaaggacgcgctctgcctccgcctccaccgccgaccgcccgaactcgccgcctccatcgccggtcgcccgagcttgctctgcgttcgccggcggacgtggttggacggccacgatgccgacgaccaggacgacggaccgttcgccgcctccaccacgccaacgagagaagcagagaagggaagggaaaaaatgcagagctcgagcgtgcggccgtccatcctcgccgacccttccgtctgccccatgcgccgccgcagcaacctcatccatggcggcggcggcaagaagtgcggcggcgagcggcggtgcgcatggcgatgctgcttggctcggctcggttagctcgctcggtgtatatgcatggacacaggttgtacagatgtgtgctgcttgccggtgtgacggggtagttttacagaagcagcagcgaatttgggaacactaggagcagcagaagaatcaggtgacatcttgagcggcaggcgcgacggccggggaggggaaatcgatggc

SEQ ID NO: 8595 - DNA, 3969 bp, Oryza sativa
tcctcctcctgatccatcccgatcccgtgcctaccgccacagccgccattcaacgaccggccgccgccaccatcaccgcctcgtgggcctcgtgggcggtgggcgacagccggtgggggagcccgcgcgccgctgctccgctaccgcatgcacgccacccctcccccgccacctgccccgcaactcctccacccatcatcgtcgcgtcgccagtcgctgccgtcaccgctgctgcgcagcccgtcgccggccgccaacgccctcctcctctcccccctcgcactgccgcaaagaagggagagagagagagatagatgaggaagggagaaaagtgggaggaggttgatgacgtgggtcatgctgacatgtgggcccacgtggggtcccacgctgactcagccaccacgtaggacaaagccggggtcaaaaccaccgaaggatctaaagtgaacggtttttgtaaatggcgggatgtcctatatctggttttgcggttgggggacgattctgtaactcgatgacaagttgagggaccttcggtgtactttttccgacataatatatatagctaaaataagtctattttacgtccctactctttggaccgtgccatataatacatctatttatctaacgatcagaaaattgactgaaacgaaataaatttagtgccatatctgatcacgaaacgatcacaaataacaacaaagacacaactcaaaagatcggacacgtattcgtatgattaaaagccattttattatattattgtgtcattaaagcagacctgctattgaacatgataaaacatttatccttcctgatctagctcagttaagagtaaagtagggcctcaaatcattgctttggtcagtgatttgaggcccttggaactaaagtgtcgcatgactaaagcacccaatacatcatttcgctgttgagcttgtacatctcagacctgtgcttcagcatgcggagccctccaccattggcaccaccagcatcgtcgtcatcatcgcagcgctccacctcgacggcggttaacacggcgaacagctcctcgccgtcacggtgatcctcatcggtatggaagaacctggcgatgcagaacttgccgtgtccaaggttcacgaggtatgagctttcaagattgagggcgtcgggcggtgtgaactccagaggaaggcggtgaagcaccggcagcttcgagccgccatcgaggtccagagcggagaggacaaagttcctgctcatgtctctattgctgcgtgagaagccaaaccaaaggccgtgctcatggcaatactcggcgagaccggtaaatggcaacgtccagccggtggccactgtgctccacgcatggctcaccgtgtcaaagcagtagatgccaccgccgtgcgtggacatccagatctccgtgtcaccgacgacggcgtaggagtggacatggagatcggacagcggcggtggcggcggggggagagcgcggcatcgccaatcctcattcaatccatcctcgtagatgagcccatagaagcagccgtcgccgtcgtcgtcgtcatcttcgtggcgcggcatgtcgaggatgtagaggtcgtccccgacggtgacggaggtggtaggcaacctcacctggtagggaagggcgggcatggtgcggacggcgtgctcgccggggtcgtagaggacggtgcggcaggtctggtcgacggcgaccaccgcgttgctgtgattgcctccaaggaggaggaactccatcttctggttcgcaaacaacttggagaagggagggtagaaggtcatggctgggcatggcaggctagcatactccaccgcgtcggcggcgccgacgccacggatggcaccggggttggacgtggcaggaagaagcgctccatgtcaatgttgcgcagcgtatagttgctgcggcggcggccaaactcccccagcaccagataaacaaaccgacgggtgctcatcataaatcgatcgatcgatcggattgaattgctgtggatcttcttctcccccaccacaaacaactaggctgctactctgaagaatcagaagagagatctagatcgatgggtgcctcccacccctttgggttagggttagagacagatcaccggagagaaagtattagtagttttgaacagaaaacctggtatttatttatcttcgttttggactaaaacttcctatcccaagcgaagccaaatgatctttctcgttgcaaatctcaccttagcagagagagggagtggggggagccgcccaaccgctactccgcgagcgaatcggagagtcgccggcggcggacagacgacgggacggggatggcggaggaagagagagagagaggtggggagggagttggctccggcagcggtcgttctggtggcggcgcccggggagcacgccgggtgggaagggaggaagaggacggcttatagttggccatatgggccgcctggcacggcatgggccagacccggtcatgcccgggacaagttttgtcgggctggcatggcccaaactacatgacaggccgggccgtgccagcccacgtgctccacctccgtgccgtaccgggctggcctgaaggcatgggcaccttatcgtgattttttttttgaaaaatcatatgctttaggtccttcaacttacaaaaccatccgctttaggtccttcggtggttttgaccccggttttatccgacgtggcggctgagtcagcgtgggacccatgtaagcactacatgtcagtgtgagccgtgccatgtcatcaccatccttctcacccttctctcccttcctcatctctctctcccttctgtgcggcaatgcgatgttgccgacgtagacaacgcagcggcagcgggcacggggtagtggcacaaccatgctcagagtggcgcgagacggggagagatggagttttgcctcgtgggcttcatgggcggcaggggagctcgcgcgccgctcctccgcttgccgcccctccaccgcctcgtcgcccggtgccgacgccctcctctcccgcctcgcactgtcgccctcgcagcgattctccaccccggctcgcagcgcccgcctcgccgccagcaagctcgccgtaacgcgtgtctcctcctcctgatccgcccccatcctgtgcctaccgccgcggccgccattcgcgatcggccgccaccgtggacgccattcgcaaccggccaccgccgccatcaccgcctcgtgggccccgtggtggtgggcggcggccagtaggggagcccgcgcgccgctcctccctcgctcccgcgcattactccgccgccgcccctcccccgccgctcttccacccaccaccatcgcgtcgcccgttgccgccatcaccgccgccgcgcagcccgtcgccggccgccgacgccctcctcctctcccccctcgcactgccgcagagaagggagatagatagatatatgaggaagggagagaagagggaggagggtgatgacgtgggtcatgctgacatgtggggcccacgtgggtcccacgcctactcagccgccacttaggataaaaccggggtcaaaactgccgaaggacctaaagtgaacggtttttgtaaattgcgggatgtcatatatttggttttgtagttgggggacgattttgtaacttgatgacaagttgagggaccttcggtgtactttttccgacataatatatatagctaaaataagtctattttacgtccctactctttggaccatgccatataatacatctatttatcctccctataaaaatcaatatagcaaacttggccttgaaaagaatgttaagcaatcaatctgcatgttaacactgaactatcttagactcatcaaggtagttcacttttcaagaactctcttatcatctgttatttacttttttaatctaacaattggtttagtgtaggtaatcaccgtaacatgta

SEQ ID NO: 8596 - DNA, 2669 bp, Oryza sativa
agtcgcgtgtccgagtcactgtagtcgtcagcgtttgtcgttttgttctgtaactttctttacagctgtgtgtgtgctgagttatccaagagtgtaatcgatacttaatcagcccgatgaggaatgaaagatatgacgaaaaactcaattatctttgtctcataggagtagaatagatctagtgttagggttcttgcggcgaccaccaacttttcccaaatttctactcccgagtgctgaatccgtccatttctgctccctaggtcctgacagctccggcctggcttgactgagggggacacgcaccacctcccaccgaaacaggatgttataaaaccagccctggaatcacatcggaaaccaaaccacggaagaaaacgccataggagatccaaacatgatgacgacaccgaggcacgatatttgataatggagttcagctgaggcctacatctccggggcactgattacgggcgctcctccccgatccagcatatatagcgtatcagagttacaacgactcacggccggtcgccgccggcagccgctccctctcgctatgctaagtcgccatgcggttacaacaggcacgcccctctatttatgagagaacctaggatagagtccgactcttactctaatcttatacctagtacaactcaaagtcctaaactgtaaccgactttgtacacatattcgacacaaactctaacaaactccaccttggcgaatatgccacgccaacctgaatatgttacttgctcgaacctcgtgtactcggacttgagttggttcttccgccgctcacgccgagccgccccgacaagcctccaccaggcttaccgtaaacaagagactcccgctatctctgtaatttcttcctcttgactccacctgcaacagtgctccactttctcacctatcaccacagtcgtcttgccaagcgaaatttgaattccttcctagctgtcacatcatagacttcccgaagaccatgttcacctccatcttccattttcaatttgacttgaactaatccatggctagataacttgtgtcatcaccaaatagataaatcaaactcaccagacatgaagagaaccatttattccttgttgtcttatgaaccgagctaacgaattcaacatccacgccttcccgcatccatagactgaatatccgataattttgagaaaattcaccgttgccttgaatcacccgaagaaattatcaccatagcgctcgctcttcctcttcagtgacgcagatttcatatatccccatcatgtaaaccccacagatcctggatatatcctgtactgccaaacagcccgctgacaccctcaacgatttttacccgctgttgcccgggattttcttcacgcacctttgccccactcctgcaccaccgcagccttgccttcgaatcataacgcagaagccctgatgcacagttattcttgctgtcaattccagccacctagcctccgtgctgatctccacgtccatcgcgactccgagttgataaacaactccgcaaccgtgtcgacctccaccagctacacaaactgcacatcctctgcaattggattccgataccaatttgctgctctgtgaatagacctacacacaatatgccaatggacacccttgccgcatgcatgcacacatccacagccaccacgaaaccaagcttgttcctcgtgactgcatgcgatccatggcaaaagtccaagaagctcctattgcttgatccaattttgttgtgctgctcctgtgcgcaccgtcaccgcctccaatgaccggagccggcccgcgccgaatcccgccggcacctacacaacgaccacaccaagccgtgttcatgccgcacgaagttcgtcgcaaacaaatccgctccgacctccgattgatcagccgaagccgacaaatcgtcatgccgtcttcccagccgccgaacgacccgagcgctacgtctagccgtctccctgtcaaacgcagctcatcaaaaggcccgggccaccccgcccagagtgttcgatccaccgaccgagaacgccgatcgcctccagcttcaatcaacccgagcgtgtggccacacgtctccctgttgagagtagctcaccagaaagttcgagccacctgcctgaagtgtccaacccaccgattggatcgccaatcgcttccgccgccatcaacccgagcaccacatctagtcatctccctgttgattgcagccatcgaacggttcagaccgccgcctgaagtgtccgattccaccgatcaaattccgttgatcgccgccgtgctccaccttgcgtccatgtccgtccctggacaccctgtgtagtcgtcgcggcgtggagcacctccgtcgtacctctaccatggatctcccgcaggctctgataccacttgttataaaaccagccccgaaatcacatcggaaaccaaaccacggaagaaaacgccataggagatccaaacatgatgacgacaccgaggcacgatatttgataatggagttcagctgaggcctacatctccggggcactgattacgggcgctcctccccgatccagcatatatagcgtatcagagttacaacgactcacggccggtcgccgccggcagccgctccctctcgctatgctaagtcgccatgcggt

SEQ ID NO: 8597 - DNA, 4982 bp, Oryza sativa
aagcatattccacgagcatgtcatcgatgtccaaagagtcttcctcttcatttgtcggagtcttggttttgctcggtccctcttcgtcaggaatggggtccatagctccagtctccagcacttgagaggcgaagtgtgcttcatgcttttggttggtctgtgtatgacccatagacttcatgtacagatcaacaagatgtttaggggttctgcatttcttagcaatatgattgtagcaaccatacctgtagcaggcggttttgctgccgctatcattattgggcttagaattgcctttcctctttttgctgttcccacgttgctttttggctctgttgcgtttgcccttgccaaatgaacttccagtctgggtattcccgctgggaacatttttcttctcattcgcatttacttcaggcaatggtgcagtgcccaaccggcgctggttcgagttccatacagtaagctcatggttcttttatgcctgtttcaatgtctgaatgagtgaagaatagactgtgaaattcttctcacggtattgttgagtgatgatccgttctgatgggagcattgtagacagagtcttctcaattttctccgcttcagaaggttcattcttacaaaaccggagtttagagcatatcttatgaacagcatggttgtattcgtctatagttttaaaatcctgtagatgcaagtgattccactcgtgcgatgcctcagggaggataatcgccatatgctgttcataacgatttttttgagatgtccataaaactcgtgggtcctcctctagcatgtattccattttcaaatccgggtggatatgattccttattattcttaaggctgaaaatttgacgatatgacacggcggagatgatgggtctagccatgatgagggcagaaggccgtgaccacgtccggcatgtccagctgcggtcgcacccgtgcggtccacccatgggacgcacaatggtgtggtgcctccaccaggattctgtccagcgttgtgcacatgcccggcgtcgccggagaccctcggcgagtggcgatggtattggagtcggtgctaccggctccggcgttcctttgggcagccgcgccgttgccgcggcgtcttcctccacgtccggcgaagccaggaggaggagatggggggccacggccggcattgccagcacgacggcccctgccacgtcgagtatgacgcacgggagcccgaaggatcgtctcgagctgctgcaagagacgacgaaggtggcatgcacggagattgcggggaagggaggagtcggcagtgaggggaacatgacgagccattcttaccacgcacgtgccggtgagtcttttcactcttctctcttggtagagctctgataacgtattagagaacaaagatgaacagtgaaaaacagtgaatcctccaagtcttattaatctcaaaatgtccccttttatagtggggatttacatatgcacaagcctaggatactcctaggaatcaagggtgatttaagccactaaatatggctgattatgtgtcacaaattcaccataatatggctgttacaagtcacttgaatcctgccattgttgctctttgatgagtctttgatgagatcaaaaatgtctcatgatgcttttgtaacacttaactcctgcaatttgcatcactgctgaaggttgaaatacgcatgattctgaattctaatgagttatgaaagtaactgaatcttctgaattctgtagcattcaggtcttgtgcttgtctgtctatttggggaactttgatggtgccaacttttgcatgcagaattccagattgcttgaaaattttccattgccaagtttcccatattgattaatactccgtactatttttcttgatcagcttgtatggtggtgatgcagcaatagtaaaatagttgtgtcgctgaaagtagcctgaaataaacgaaacggacatgcagtggaattcggcagacttcagactttcagagttcagacttcggacatccaattttccttttctttttggatcgggctttgttaccgtttacgtcggcgtggcttcgtcttatgagtttccctcgataaactgctggtcttaagctcggtgttcacggtaacaatgtcaggttttcaccggtttcctttaaaataccttataccgttataagttcttttaatccggttccttcaataaacgagatcaactctcctcttcttctaaagcgaaattgcacgttcttttttcatattttccgtttgagcactgctacacgcactaaatttctttttacaaaactcttataaacaatgatctcaaccataatataagtagatgaaagatatataaaatctaaatgtactcataacatgatatgtagtgttagtaaaagttcagtaagataaaattttaataagtataggacttttcctttctgggtttttttttttttttggcaaaaacaaccccgaaaccactggaaatagtagcactgagccacactaaccagtcgtctccctcacaagtcacaactccagctaccttcttccttccgctatcccccagccttctctgccgctgcctccgccgcctcgccacgcggcggccggcaagcagggccccgcagccacggcgtgggcggactcctctcctttccccccgaccacctccgccctcgccttctcaggcctcctcgcgcgcccggccggcgacggcgagcatctcggctcgaatcgaactgaaggtatccgttcttctcgtctccctccctcctctgcgcgccacttcgtgtgctggattgggtagattgggactcatttgaactcgaatcgatccatttcgctccaattagacctcccagttcatccccatttgcttcgtttattgcgtgctttggtgaagcacttactaatggcatttttttttttggaaaaaaattgggggttcagttgaatctgcatgctccaggatggagatcgacgggcaggagcctgggcacgagcacgacgggatgatggagccgcaggtggtggacctcgaggaggaggaggaggacgacagcatcaacttctgggcctcgctgggcgtccatgccgtcgaccagatgccgctgcacggcggcgtccagatcgtcgaccagccgtcgccgccgccgcaggagcaggcgcaatcgcagtcgcagtcggtccgcaaggacctgttcccggtcgactccgacccctgccttgagccccgggttgggatggagttcgagtccggcgaggccgccaagaccttctacattgcctacgcggggcgcgtggggttctccgtccgcattgctcggtcgcggcggtccaagtgtaacgagtccatcatcatgctgaggtttgtctgctccaaggaagggttcagcaaggagaagcatgtcgtcgcggggaagaagacgaggaagcggcctgcttccatccgggagggatgcaatgccatgctcgaggtgctacgcagaggcgatagcaagtggattgtcaccaagcttgtcaaggagcataaccatgaggttgggatgcccagcagagtgcactacattgccatggagggtgatacggtggtcgacccttacattggtatggagtttgaatcacttgaggccgccaagacattctactactcatacgcgacccgtgtcgggtttgaagctcgtgtgcgtcagtcccgcaagtcgcaagatgagtcactcaagatgctgaagcttgtgtgctcaaggcaccgataccattcaggaagagagaccaatggaggggatcccaagagagtgcaggccttggatccctccagggatggctgtgatgcattatttgagataattcggaaagacagagatgcctggacggtctctaaactcatcttagagcatactcatgagctgaacccggcaccaacaagtagagttcgctgtattcgctcacagggtgaggtacttgttattgcaaagaacttctctgacacacgcaatctcctattgaacggtctagatttccagcatcctagagagttccagtataatgatttagggccagaggatgctcaaagcttactcagatatctcaagaacacacaaagcgaggatcctgcttttttctatgctgtgcagcttaacagtaatggacacacagccaatattttctgggctgatgctaaaactaggatggcttactaccattttggtgatgttgttaggcttggtacactgtgcagaaacagcaagtatatacctattgccatattttcaggcgtcaatcatcatttgcagcctgttgtctttggctgtgcactaattgttgatgattctgaagcatcgtttgcatggttatttgaaaaatggcttgaagcaatgcctgtgggccctcctgtctcgttggtattagagtttaaccaagaaatggctgccgcagctaccaaaatactacctgatactcattgtacgttctgtgagaagcatattttgggcactgtcagggaagagctaggaagtttgtatccagaaccagaactagaccatttcattactgatctgagaaagtgcattgactgctgcagattagaagaatcatttgaatcatgttgggattctgtcatcagaaaatatggcttcagaaataatgaactattacagtctctatatgaaattcgcagacaatgggcccctgcatacacaaggaaggtattctgtgccagaaatctactgccacaaagctgtcagaatcttgaaaatgttatcgagaagcacttctcatccaagacccagttatgggtggccgttcagcaacttggacaagctgtttgtaatttttatgaaaaggaaactcaggcagattatctgacaacatttcaaatggcaacagttaggactgcatcacctcttgaaaagcaagcaagttcaatattcaccaggtcaatatttgaaaaatttcaggatcagtttgccgag

SEQ ID NO: 8598 - DNA, 2535 bp, Oryza sativa
catcggcgagggagaaatctggactacggttaagaccagagggaggtcggtgaggctcctgaaagagaagatcgcgaagcttgtgggctacgaagacttcacgatgtgcgtcagcgccggccgccatgggcagttcacccctctgctcatggatgccaacttcgagggcgaagatacgttgctgtgggaggtggtgcgcgtccccccgagtggagacatgccggggctcccgatcgccactcaggtgagcttctccgatccttctccgctctcttcttgcgattcctgtttttttgttttgtgtcttgatgctgatttcgtcggaaattaatcttgatttcttgcaagaattaaccgtgcagtacaatttgtggattgatcgaatttccttctgctaccgttgttgattttgtgcagcccgggttcttcgtcagggcgtgcttcccccagccgctgcgggagatccagttcgtggacgaagccgacctcgacaacaccagcgagggagaaatctggactacggttgagatcagagggaggtcggtgaggctcctgagagagaagatcgcggagcttgtgggctacgacgacttcacgatgtgcgtcagcgccggccgccatgggcagttcacccctctgctcatcgacctgcctcgcagccgggagaccctgaacatcgtcctcctcaggaccaacagcgaaggtaaaaatcccagttcgagtatgaatgttgctgaattttctgaacaatgtttatgtgattctgaattttgctttgtctctgtttctctgattttgttacgtcagtccagcactgtagattttcctgttttcagtagtttgtgcctgttgtggaatttgctgaaaatgtagtcatgatgtgtttgcttgtagagttaggatttgtctgaagaatatactgtagaacagcagaagtgaaattcatctgccgaattttaatctcggccaccaccagacaattctatgcactttgggcttatctgaatgttgtagggtttatctgagctttgtagactttttcacacaatggtctgaatactgtagctgaatgcttgattggtatgtaaatatggtgtgcatctgggttattactattgttgtgactcagaactaaagtggatggattgaaacaagttcaagcctgcattgtctattcaacttgtttcacaatgatcatatcggtagtttagtgtgaaattcgacatccaatatgcatgttgctggattttctgaacattacttatgtaattcttaattttgctctgaaaggaatgcatggcatgacgtgggcagtgcttctgtttttctgggcctttttagctagttcagctcatctttttttgtctgttaggacttgtctgaagaatactttagaacgacagaactatacaagtgaaatatatctgcacttatctgatgaatattcatttcaggcatcatcagacaattgtgtgcaccttgggtttaactgaatgctgtaggattcatctgaatgttgtagatttttcagtgtgaaattcagcatccgagtagcattttaacatgtgaattactggcactgtttttacttgcaagagctgtaattcttgtgtattactctttctaactgcgtgatttgtttgctatggctgcagcgaatgatcagatgatattcccgaatccgaatgcattgccgtcagcagaggccacagatgaagacaatgccacgattgagtgaatccttttgtgctgaagttctgacaggctcagggaactcgacagaagattagtgtgttggtatagggtggaattttcagttcagccgatgctgcaatgcagttttatgtttgctatcagctgtagaatggctgaaaactctgaaattttcagtgtgttcaatgggtgtttttcgacggtttcacatacttcggaaacaggtaaaacaggaccttctaaggaaaatattggttttggtgacaattagtattcatgcctagtatggattgacgccaaaaatgtgcttattcctgaagtatattagtgttcatgctaaacttggtagaaatatgcatgatgtgtctgaattctgatgaatgaacacagtaactgaatgtctgaatctcctgaggcattcaggcttgcccctgcctatctatttgagaattttgatgggttccagtttgctgatgctacatgctatctactatctagttagttagtagttctgtctatacttagctgggtggaccataaaccaattgttagatcaaaaagtaaagtacagaggagagttcttgaaaacataaaactactccaatgctattttctgaagccctaaaacattcaggggttgtccctgtccttctaagagtagtatttgggaattttttttgaaggttagtatttaggaattttgacggtgccggtttgcaaatgctacatcctacatgctaactcctaactctgtgagttcacctatttgacagaactggacagccatattcctgttgtttgcagcaggaactagaacaagtt

SEQ ID NO: 8599 - DNA, 6322 bp, Oryza sativa
agctccaccggtgctctctgtctgggaggaagaaggatagagaaagaaagggaagaggagatgggggaagaagtggccactaacgtgtggctctaatttttatttttagttttatttgctgagtagacttccacatcattgccacatagatgaaaaccagctgaaaaaccacttgagggtgtaaagtgaacggtattgaaagttggagggggtgaaatatctggttttaaagttttgggtgtattttagacaagacaaatagttggagggtgtaaaatggacttatccctataatgtatgacaagtgggtctcactattttttaaaaaataaaatgctgactgaattaccacgtgtacaccacgtaggacaaaaccactttagattcggtcgagagggtaatttgtccagtattgaaagtttagggtgagtaatatctagtttttgagtttagggggtaattcggtcaaccacgataatttaggggataattcgtactttttcctttagaaacatgccaggggaaatttttcatgtagccaaaaaaaataaaagaataattaaaaaccatataaaatctcaaaaaacagaaatatcgcagaaatatattaaaaaggaaaatctagataaagtgaaaaacccagcagaaaatctagaataataaaaaaataaaaaaaatattcaacaagaatatagaaaatactaagtcatatttaaatgaggtacccttttcacaagatcagagaaaataaaaattgatctatgcaacatactgagatcatgatgagctttataatgtaataaaatatcataaaagctgcagaagtatcaatggcatccatgcatccacacatgcaaataatatatttcatacaaggttataatgtcttgatcaagaaagaatgatgagtaatcaaagaaatagggctgaagtctacagactatagagaacccatactagctagtacatgctagctagcatttgcttatatcacgatgggataaaactctgtacaaaatctcccaaatgttctccaggtacaaaaacttgatgaaatgcatgtgtgccaaccatgtccataaggcatcttgaatctcccaatcatactctgcattataagaataattgttctgcatattcgtttgaaagagattgcagagtgtcataacatatattatgggcacttactgaaccagaaccaatacgacagtgtatagctaagtgaaccaactacttagtatgacagctatttgcttcctgaaacaagcttccgagagataactaaagaaaggatatatgcagagtattatttgtcgaattaaagaaagtatagcgaaagaaggactatctaggaagattagtaaaaacaggatatttacttgatacagtacaggaaactactgctagcaaaacaaaactaatcttccctcctcaatcgaaataaatttagctctgttcttatctccaagttcccaaaccctcttcctcgttttccgcgcgcacgcttttaaaactactaaacggtgtgttttttgtaaaaagtttctatacgaaagttgcttaaaaaaatcaaattaatccatttttgaaaaaaaaatagctaatacttaattaattatgcaataacacttgcttcgttttactgccatatctgatcacaaaatgattacaaatgacaacaacgacacaactcaaaagatcgatcggacacatattcatatatgattccctttaaaaccattttattgtattattgtgtcattacagcagatctacctgctattgaacatgacaaaacctttaatccttcctgatctagctcagttaagagtaaagtagggcctcaaatcattgctttggtcagtgatttgaggcccttggcctactaaagtgccgcatgactaaagcacccaatacatcatttcgctggtgagcttgtacatctcagacctgtgcttcagcatgcggagccctcctccattggcaccaccagcatcgtcgtcgtcatcgcagcgctccacctcgacggcggttaacacagcgaacagctcctcgccatcacgctgatcctcatcggtctgaaagaacctggcaatgcagaacttggcggctcctaggtttacgaggtatgagctgacaagctggagggcgtcgggtggcgtgaactccagaggaaggctgtgaagcaccggcagcttggtgccatcgagatccagagcggagaggaccaagctcctcctcctgtctccagtgctgcatgagaggccaaaccaaaggccgtgctcatggcaatactcggcgagaccaacaaatggcagcttccagccagtggccactgtgctccacacatggctcactgtgtcaaagcagtagatgccactgccgtgcgtggatgacatccagatctccatgtcaccaaccacagcgtacgagtggacatgcaaatcggacttgtgagacagcggcggcggcggcggggggagagcgtggcatcgccaatcctcatttaatccatcctcgtagatgagcccatagaagcagccgcaggggacgtttccaccgccgtcgtcgttgacatggcggcgcgacgtgtcaaggatatagaggtcgtccccaacggtgacggaagtggtaagcaacctgactggtagggaagtgcgggcatggtgcggacggcgtgctcgccggggtcatagaggacggtgcggcaagtctggtcgacggcgaccaccgcgttgttgtgattgcctccaaggaggaggaactccatcttctggttcccaaacaacgtggagaagggagggtagaaggtcatggctgggcatggcaggctagcatactccaccgcgtcggcggcgacggccgacgccacggatggcaccaccggggttggacgtggcaggaagaagcggtccatgtcaatgttgcgcagcgtgtagttgctgcggcggcggccaaactcctccagcaacagataaacaaaccgacgggtggtgctcatcatcaataaatcgatcaatatgataatatactgtacaattgaacatagggaccccgcgtcgctctcgcgcgggcggctcggggggcgaaaaccctagccgcccgcgcctcctccccctctcccccgcctcgccgccgccggagctcgccggcggcaaagccggcagcgagcagggaaggcggcggcaaggtcctttcttcctcttggcagctccctcccggcgcgacgtggacggggcgacgtcgatgaggtaccccaccgccgggagaagtggaggcggcggggcggtgtggggtggcggcggatccggcacccccatggccggatctggcgcggcagcgcggcccggcggtggtgcgcggctgggggcggcgacggtggcccgacggcgcgatgcggctgggcagcggcggcggcccggcggctgggagcggcacggcaaggcggcggcggctccggcggcgccccgcccggatccggcgtccccacggccggatccgactcccggatggccagggtcgttatggccggcgtcgctggcgacgggaggacggcgcgtgcggaaggacggcgcatgcgcgacgggaggacgccggcgttgaggtcgatgcgtgcggcgccgtgcagcgggccgacgcggcagtggctggcgccggcgatgcttgccgccggacctcgtgatcctcgtggatgaccgccgatgggggctgctgccagatggatggctgcgttgtgggggacccgactgggacaccggcttgcatggcggcggcggggtcgttgcacgtcgcccgtgtggcggcgctgcaggtgttggccggtggagatgccgccggatctggggtcgagctcggattcagccgcacagtactgccatcacgaccggcgatgacgaggggacgccatgtgggtgccttctcatctccttggagctcctccccttcttgaccgcctggtcgtggggagctcctttgcgagacggtgaagacggcggcaaggttgccccaggttgttatcgatagtgatgggcggtggcgggcactctctttgtaggtgacggcatgggaggaaggctagctggtcgccgaagtgcagcggtggtttggtcgtgctcgttccaacgtgtagctgtgggggtcgcgctggcagcaggttaggtcgcttggagtccagccgacggaggggcgtcgttgctgtagaggccacgtgttgacattgcctgggagttggtgaggtagcggcaagaggggcattggcaagtgctaggcgaaagccagcccaattcttgggcggcaacggcgatgtctttgggcgttgcaaccctcttgagggcgttgttgaggtgcctccctccccctcttcaaggatcctctaggtgaaaacctcatcctttcgggatgggcgatggcggcgttttgaatgtcgtgaccttcttgaaggcatcgttttggaggtggctgtgtgttcctctcggtgtggtggtgtgtaggcacgtggcggggtgtgttctcttgtccggttcccctgtcccctgctgcttttgcctttggttgtaaatgtctattttactcctcttaatgcaaaaatacgcttctagcgtattcccgaaaaaaaaatcgatcaatcggattgaattgctctggatctccttctcccccacaacgaacaactaggctactactctgaagaatcagaagagatctagatcgatgggtgcctcccacccctttgggttagggttagagacagatcaacgaagagaaagtagtaaaacttggtatttatttgtcttcgttttggactagaacttcctatcccaagcgaagccaaatgatctttctcgttgcaaatctcaccttagcagagagagggagtggggggagccgcccaaccgctactcctcgagcgaatcggagagtcgccggcggcggacagacgacgggaaggggatggtggaggaagagagagagagaggtggggagggagttggctccggcagcggtcgttctggtggcggcgtgagtgcggcctgcggcggcgtccggggagcacgccgggtgagttagcgaattttttttatttttaattttttttattaaaagttttacaaaaataatttttcattttgaacattgccagacacgtggtcgcctcccgccgtccggcagggcgattttgcaccactccgccatcgtacagggcgcccaaactgacgtggcagacggccgttcgctctcgaggcgacggccgtccaggaaatttgcaggggcgcccccttgccgccctccgctagggcaattttgtagcggccggggggccgcctgcaaatgggcagcggggggcctggaattttgcaggcggcccccttgccgccctgggggagggcgatttttgcctccccctataaagcccagccctctctctgaaatttcattatattcagtaaaaatccaaaaaaaaacgaaagagagagaggggagggcagcagaaggggagcggcgaagccctgctggttcgctcacttcatcacaggtttgctcccatacatcttttgcatttgtactaatatgttatgtttgagtatatatgttgcgttttagttttagttccatatattttagcagatctgtagcacacagcacatatgtgtagatccagagcatagaatataatagtatgaattgagacatagacagtagtgttaattgtaagatgtagtttagtttgatctggagaatgtaacctacttttagaattttggagaacaatattgtagagaatgtaacttagggcgtagtacagaaatgcgaggttaacgcagttattgttttcatcaggcacaatgtcaaataaggtcacatttcagatagttcacggtgaaggaaatattagatttggtccagatggtattgatctgtcagattttgtaatgacatctaagggcatcgataggcctgcggagagaacatttcagtcaatttatagttggttgttgagaggatttagaatagaccaagaagtctacacaatgtcagtatcagttgtagtgagtcgtgcaacagaaggttatttttgggaactaatgccgatggacagcactgctgcttggagacggtatgtggaaatggcttttgaacggtcatggcccctcgttatatttgtatcggtacaagagaaagatataaatgtttcaatgcaaaccgaagatgtagagggtcctatcaacgcaggggatgttgttggaccatcgatgtaaaatgaggaaaatcaaccaagggaggagcaggccatgggcatggcggatgagggggagagagtcgg

SEQ ID NO: 8600 - DNA, 7576 bp, Oryza sativa
cacagaaccaagagaagaaatttaatgagttgtgggacaagttggatgagttgacaacgaagcaaacagatgagcaatctcgcagaccacaagttgaaggtgacgagcctcccatacctcttggtgcattacatgatgacccaccaacaatgagaaggaggttagggccgtcatcagaaatttcactcagtggattgagaatgagcctaaggagaagtggtctctattgttcgacaccgatggatctcggtatggcataatgacaaccaatttggcagaggtgtacaactgggtaatgcgaggagttcgggtacttccattggttgctatcattgaattcatccttacggcacgcaagcctactttagggatcgatacaagaaaattggtccgtccatggccgataacaacatagtgtttggcaacatagtgacaaagtacatggaagataaaatcaaaaaggcacggagacatagagttgttgctcaaggcacacaagtgcatcggtatgaaataatgtgtgttgataggagcaggcgtggtatctattacaagcaagccgtgcaggaatgtgtcttgaaggcggatggtggatgtacctgcagttatatgaagccgaagcttcatcaccttccttgctcacatgttcttggcttcttgctgctgccggtgattgtggcatatctcccaatgtgtacgtctcaaattatttcaggaaagaagcagtctttcatacatggagtgaggagatatatgggttcgggatctcaggatcttacacaacgctgagtgcccaagttttttatattccagatccatctaagttaagggtgaaaaagggtcgacgccaaactagacgcatcagaaatgatatggatgagtcagaagcaggtgggaggactttacgctgcagcaagtgtgatctgcgcggccatacttacaagaaatgcccgaagaatgcagaagttccaagcggcgcagatgctagtccatctggacaggcaagtgatggtaggcgaccacctggtgaaggaacaacaagcaggcgcgcaaggccaaggcgtcgtcgcgcagcaggcgattccatggtgtaacaatgctatcgatttagaaaataaaatgctgttgtgatgtgatgagtgttcagactaaatacttctatcgtgtaatttcaattgaatgttgttgtaatgagtaccttcgactattgttgtactagtagtattgcgaactattcggtgttgtatcataatgttatcgtgatgagtgttcggactaagtactcatatcgtgtaactgcagttattgttgtaatcagaaatattccgtatggtgacacttttgtttgtttgtactcttgtttaatatgtgttagtaattcgcttatgaacatttattacttatgttgaactaattatttatatgtttctgatcaatctatttgatgcaggtatagcgtacgacacaccggcgctgttcaaccgtgggattgacaggaaccaccgctcgttcctgtcagcagtcgagggtgcacagctcggcaccttccgtccacgcacgtcgcgcgagtggttgcgtgtcgacccccgtcacgttccttggtacgcgtatgttcacatttcaactcaactttgctttgtgttgtacttatgtttgaagtttgctctatacaggttgcgtgcggcaggccttctaccactttgtaggcttgttgaggcggcggcggacgaccgtgacccagcgaagcggtgggatgcagaccggtcactccttgccgctctggtagaccgctggagacctgagacgcacacgttccaccttccctgtggggagatggctccgacactgcaggacgtgtcgtacctgctcgggctaccgctggcgggagcaccagttggtcccgtggacggtgtttttgggtggaaggaggatatcactgcgcgcttcgagcaggtgatgcgccttccacacctaggaccggccaacacccttcctccgtactctacagtcgggcctagcaaggcttggttgctccagttcactgtaagtaaataagttgttattatcatacatgcttatttgcgatcaacagagtgttttgtactaacatttcattcttaattgtaggcggaccttctgcaccctgacgctgatgattactcggtccgacgctcccttgaggcgtacctgttgtggttgttcgggtgggtgatgttcactagcacccacgggcacgttgtggacttccggctggtccactacgcacggtccatcgcggatgctcagccacaggatgtgccgcagtggagctggggttctgccgtgctagcagccacgtaccgtgccctctgtgaggcgtgaacgaagactgacgcgggagcgatcatcgctggctgccctatgttgcttcagctttgggcagccgagaggtttgccataggtcgaccagtggtggacagcgcaccctacggggttggtcgcagcgcgcagtggccagaggacggtcccacgatggggacttactggtgtcgacgtggggttagtgcaacttcgctgcgttataagtttatcagtcgtcttcttttttttcttcacataacatgtctaattccgatcatgtttattgcagcgtcgttacgctcacgtccaggtgagacgaggttacccggacttcgtgttcgagtttgaccgtctccagccgagcgacgtcatctgggagccgtacacagcagaggccgtcgctgcgagagcaccgctaggactttcgtccttgtgcacacgcgaccaggcttactggctcaccatcctgccgatggtgttcgacattttcgttgagcctcactgcccgcagcgtgtgatgagacagttcggacttaggcaggtgtttccgggcaacgtgcagccgaccgtcctccctgccgaccactcgtgagttcggattgttcatttctaaatttttatgataattacttcatcgagccatataatttacctctcttcacaggttgactcgacggggacagctagcaggcgcactttgggctccacgtgtacagcagtacgttgacgactgggtgttagctacagaggaggtgatcaacgagctcttcccacacacggaggagaactaccgtgactaccttcgctggtagcttcctcgcacttgtgcgcgtgtgaccttcactccagacgccccagagccgcacgttgccgctgtcacggacgcgtatcccacgcaccgtgaccgagactacttcgtgggggtacgtcgaatttgtattagttcttacaattatttcatttatcttgcataatataggacaattactgaattttttatttccatcttgcataggctgatgccgcacgggatatcagtgccgatatcaccgtagtccaagtgaggttgaacagaggtttgcacttgactgacgttgagcagagggtgaccttcgaccggatgcaggagaagatgcatgcggtcatgcgcgtcttctcctgtcgcagcgccgtggacgtcgtacctccagctggtccgatacaaccacggcctcgcgcgcctaccgtcggagcaggaccttgacctacggcacctgtttcgcatggtactgctcagcccagaggtttcttaagttttgtttctgtttttgtatgaaaacatcaccccgtcgtaacttgatgttccatcctcgcaggacctcgtttgccttcgagcgcccctagcttcggagcagtgcgacctacagcaccggtttcgcacggtacagttcagcccagagattagttcatttttgtttcagcttttgcacgaatatgtcaccatgttttaactgcacgtttcctcatcgcaggacctcgtctgccttcgagcgcgttcgcaggcacgaccggcgcttctacgagctccgcaggggcgttcgccacctcttcgggcgtgttcgccagctcttcctctcacggagcgtcgatccctccccacacggtactttactttttattaatactattaaatacctgtatgaaactgatggtccttgtccagcaggatttgcagccgggatcttcggtactggggcctcttcgtctcacgccggtaggactggtcctactagccagttctacgacgacgacttgcacggtgcacaccaccatgacgtactaggctcctctcagcttggaggagcaccagaggcgcacactcaggagcagccagaggtcacacctgtacaggcaggacgggttggccgtgctgtacccccggaccgactcacgtactcccaggggcacattagggcgcagggtaggagggacaggggtaagaggcctcgtcagtagtgttctacctcttcaatccttatgtgaccgtttcttttggcttacaaacttgtaaagcagtactacttttgctattactactgcagtactacttgtgtttgtctcgtctacatagttcttttcattcatatggtgctagaacaacttattctcacgacaacacactttcggcgcttcacggtagtgtcagatccagtagcgcgcacagtccacaacagcacacatgaaaagcggcagctcgagttgtcactatcaactttcggcgctgcctgttgacataaagtgaatcacgcccacgcgtgatcgtcttgtcacatctaatgaataatgtatctcattgagttcacatatattgcagtgaaaacgacgctatataattgacaatctgaaggcaacctcttcatatcttctttcccactagcacacaacacacgaaaatggaagcgccattccttgagcgtctcaactggcgaagcgatccttttgctggttggtttccaccatggtgtgaccgtcctttgtgcgattgtggggatggatgcatactcaagtcttccctcatgatacaaactcggggcaggagattcttccaatgcgcgaactttgatcaggtatgcttcatctattcgaagttcaaatggataaaaaaactaacttcttcgtacacaattgtaacatcttacgcagacatatcgtccaatgtgcaacttcatcgagtgggtagacatggagaacccacaaaacgacggaacacgtgcttacccacgtagtgaaacaagatcggactacctaaggcggaaggatgagcatgaacgtcgaattgctgctgaggctttagaatggcacgtaaatcccctaggactccccacgtggcgtgagcgtccggagtgtcgttgtggtgaccgttgtcaggtcataaggtccgtaaggcaccgaactcgaggtcaaaggtgtttcgtgtgtccaaacattgtcgacgatgatttcgtggtaattacaactattcttttcatcactcctcagtactatcattaacttaactatcccaaaatggatgtacataggaggatgtaaggaaatgtcaattcgtacaatggattgacacagtcagagttacttcaagtggcgggccgataacgcaacctgaaccgaccatacagttcattcatgcttggatggagtacgaacgtcgggtggaaattgcaagcttagactagaggaacaatccattagggttacctaaatggtccgagcgtccaaagtgtgggtgcagagatcgctggcaggtggctacatcctttgctgaacaaacatttggaaggagatattttgtctgccccaatgtagacaacgatttcgttgtatgtctaaccatttacaaaatccgctatgatttgcacaaaattactacccaaactgaataacattactatttttacagggcaatccaaggatgtgtggatttactcgatggatcgacaatatcactccatcatatcatggccagaagataacagagtcagaaacacaagtagagtatcaacgattgaaggaccacgagaatgcaatgcattctgaccgacctagaaggggccgataggttaccgcatgcttgattcgtcgggatcgacaaatttgtaccgtgtatcgatggcacttcttatctatcttatcattacaatgtttaattatggtggtgattttttgtatgcgtaagactaagggcctatttggattgctaccaaaaacatgccctaccaatattttggtaatttgaatagtacttgtgtttgatttcgattgaagcctattcattggtaatacgtaatctagatttgagattatgtagaacattcttttctacaattttacattttggcagcaaaccaaatatgatcaaatgcaattttaccttaccaaatatttggtagtgccaaaacttgcttatattttggcactaacaaaatatttgtacggtaacattccaaataggccctaaaaaataataaaattgtattttaccagtcttggagattttaatcttgtatagttttcaatataaaaagatttgataactattgatatttataaaaaaatataaagcacagtataaaatcgccctcccccagggcggcaagggggccgcctgcaaaattccaggccccccgccgcccatttgcaggcggccccccgcacagtacaaaatcgccctagcggagggcggcaagggggccgcctgcaaatttcgttgacggccgtcgcccgagagcgaacggccgtctgccacgtcactttcgccgccctctgggatggcgatttttaaaaatcgccctcccagagggcggtaggcgaccacttctgttaattttcaaaatgaaaaattatttttgtaaaacttttaataaaaaaaattaaaaataaaaaaaattcgtgagttagccggggggttatagttggccatatgggccgcccggcatggcacgggccagacctggtcgtgtccggtacaagatttgtcgggccggcacatcccaacctatatgtcgggccagcccacgtgctccacctctgtgccgtgccgggctggcccgaaggtacgggcaacccatcgtactatttttcaaaataagtctatttctcctccctcttctttgagttgtgacataataggaaaaagtacaccaaaggtccctcaacttgtcattgagttacaaaatcgtcccccaaccgcaaaaccagatataaggcatccctcaacttacaaaaccgtccgctttaggtccttcggttattttgccctcggttttatccgacgtggcggctgagttagcgttggacccacgtggactccacctgtcagcatgacccacgtcatcaccatccttctccctcttctctcccttcctcatctctctctcccttctgtgcggcagtgcgaggcaggagaggaggagggtatcggcagccggcgacgggcgacacgacggcggtgggggatgagctgcggggtgggcggcgagggaggggcggcgtgcgggtggcggcggagcaacgcgcgggagcgggggaaggagcggtgcgcgggctcccccatcggctgccgccctcaaggcccacgaggcggcggcggtgggaggagcggcgggcggacagcgagggaggggcgacgtgcgggcggcgaggagaggagcagcgcgcgggcttccccgccggccgccgcccacgaggcccacgaggcagc

SEQ ID NO: 8601 - DNA, 10611 bp, Oryza sativa
acgacaccgaggcacgatatttgataacggagttcagccgaggcctacatctccggggcactgattatgggcgctcctccccgatccagcatatacagcgtataagagttacaacgactcacggccggttgctgtcggcagccgctttctctcgctatgctaagtcgccatgcggttacaacaggcacgcccctctatttatgagagaacctaggatagagtccgactcttactctagtcttatacctagtacaactcaaagtcctaaactgtaaccgattttgtacacatattcgacacaaactctaacacaggagattgacagggacgctgcggcggggagccaggagattgttgctgccgcgcaggtagcgcccgtacctgtcgcgcaggaggacgacgccgcgggcatcgcgaccgccgacgacgtcggagccggagcacgcgacgggctgccatatgatggcgtccatctccaccctgtcgcggtcgcgctgcgcggcgtccaccgagaggaaggggagcggggagccgtaggagtcgggggccccgaggtagcggccgtaggcgccgcggaggcgcacgtactgcggcagcggcgccgcggcgtcgatcggcggctcgacggcccacaccgcgcagtgcctcgagtcaccgccgccgtcgcgggggaggctgccgacgtagacggacctcccgtcctcgtcggcgtggaggtaggagccgctcttccagatcctcagcgccgcgaactccacctcctggaaaacctccatcatcggctgccgcgcgaggacgttggacaaggactccatggccgcgccgcggtggtgaggcgagcgatcgatgcgcgcgcgcggtggcgaggcgaggcgtagcgagagcgcgcgcgcgatggcgaggcgtggcgtggcgtggcgtggggaggaagacgagagaggcaagtagccgtggaggagtttgttagcgacggttacgtttcgacgccgagggaggcggtggcatttgaaggcgtcgcgactcgcgagaagacgcaggtcgctctctgacaggtgggtccgacggtcagctgtggtcaaccgtagtcaatgacgagtggggcccaagaacacggagtgtagaatttgctcaaaggaagcgcagattcaggattggatttgaaagagtggactctgcaagattcatataaacgagttctgaacttgttctcatctctgcagcaaacaaaacgaatctgcccagtcctttccagtgagtgagtttattgtgaaattttacatacaaaaaacagagttctggacaaaatttgttaggatgatcccatagccaccatggatgcttgatcgcctgaccggttcagtgattcagaactcagaagattcagttacttactgtcatcactcattagaattcagagtcatgcacatttctaacagtaatactatattatattgcaggagtttgatcataaatgcatgtctggtttcattgaacaaatgcagataagtcagaatagtgcggcctcgatcaattggtccagtgattccagaaattcggtgtctgaactagctctcatgacataatcactgcattgaactgcaatgctgcatgccattttgttactttcatgttgattaatttcagtggttctccactatttttacaggcttgcagcaccagaatcaaatagcgagggtaatttaaactagccaaaacatctcagcaaagttcatggaaaatagcaactataacaaagttcaattttaagaaacaatattataactgatgccatgttctaaaaatgacaaactggtttaaggtgatcacaagaacgatggcatgttctacttgttgagctttgatggctcatggctccatgcctccatatgctcattggattttaagtgggtctaattccgatctcttggaggtacggaggttgagagactcggaagaaacagaagaaattcctgatggtgattatgaaccggatgaacctgatgaggattgatctgataaatggtttacagaagaaattatgttatataaagttgatattgataagcacaagtttgttaagatgcgcagcattggggatcgtgctctgttccttcagtggtgtaccttctaacaaaggaattttccctatgttaaaacttgattgtgcttatctttctgatgaattttctgaagaaatgtgtggaaataagattaggcctctgtggcattggtttagttgcttgtagacgtgcctctctgtttggcgagggcacggccaaattagggctatcgtttaattgtaatctcgttatgtttgtcattggctactacatttatgtgtcacaatggtcaaaattgctcggtaaattcggggccagtactatctaagtttggctgacatttagaacgtatgttgcacgtgcacgaatactagaaaactcaaaaggccgaattggccatcattccacgagaaacaacttgatgcttcacaagattcgccaaatttttatcaagaaatcaagaggacaataattcatattgacaaaataaataaataaataaatgcgtcaaaaaaaataaataaaatgtgtggtgctatagctgaaggcacgagatgcgctagtagaatgttggcgtgatctagacaggagttggccagttgagccaaggctgcgacggcgccgccacgtcatcttcgccggagagcctttccatctgacctctcttcatgtcccatctgccaatgtctcgccggcaatgctttctcatgctgacgagttcgtggtcgtcggcgaggtaagcgcatccgggcttcaacgccgggaagtgctcagccgggaagcacgccgagaactcgtagccgaggaagaggacatgatcctccaagctcgccgccgacgcctccacgagcttctgctcaccgccgtcgaccttgaggatctgcagttgtctggtgaagagtccggcttcgtcgtcttcgacgtcgtcgccgtcggcgtagtcgaacctccaaacctgcaggagatcttcggaacatggcgcgcccggacgaggtacttgctgccgttgtccaggtccgtgacgccccgcatgacctctctcgtcgccggcggcggcggcggcgacgacgacgcggatgcggcgcgtgggacgtcgatagcgtagatggagccatcgaaccgcaacgtgtagaagaggccgtcggcgtcgtcgtagatggcgtggcgacaggcggtggagcacgcctgtcccgggtacgcgacgggcgtccaccgctcatcgccgtcgggccggtgcaggaggagcgcgacgcaggcgctcccctcggcggggctgcacgagaggaccacctggtggtacgcccattccctcgcctgcgccggcgagtacacaagggacgcctcgttgtatgccatgtcgtcgtacaccctgtacctcgtcttgccctttctgctcgtgaacctctcgacgttgtggaggctggtgatcggcgggagggtcgccatggcgccggtgagagggttgacgagaacgagatggaggttgggcgcctcgtcgacggtgaccagccacccctgcgacgcgccgaacacgggccgtccatcgagcagggcggccgggagcgggacacggagggacttgccggtggcggggcagtagagcgcggcggcggcggggccgtaggcgtcgcaggagtagagcaaccacggcggccgtgccgtcgtggacggcaggcggagtcgccggaacgtggcgtacgcggcgcgccaggtggagcagacggcgccggagcggacgaggtcgtcggggtcggccaaataccccattacggtgatgacgacgtcgtccggcagcgccgaccagtctgcgacggcggtttcttcctccatggcggcggatctgccggaggcggccgggagccctactggaaacggatgaattggcggattttttttttcttgctctgctttgcgactgcgatttgcgatgataaaacggccgagtcggagatcgaactgttcagcccatcgcagtgtcagagactgaataattatctggcatggttgtgatctttcctttcctttcccaactcatactctccaatttttcttacgaaaaattgttattgaaaagttattaaaaaaattatattaatctatttttaaatattgtattaatcatgtgctaataagtttgcttgttttccgtgggaggaaggttcccaactccattaaacaacggaactgctatattaatttttttaccgtcgattccgctctaagatttgtgttgagatattttacaatcggatctagaccctctttttacaagttagtcccattatcgcatgtttatggtagatttgttcaagttacattccagttacatactagttacattgtagttacactctaattacattgtaattagattgtaactacagtgtaactacactataactacattgttatctctatataaattggatataaagttgcatatattattttaatacatatatacaagttattattattatagtatagttctagtgaaattatatactatagttagatttgaaagttttccccttaaaaaacactcgacagttttttagctagtcccttaaacaaacgttattgtagtcttaatttgctcttttggtaaaatgttcagcccatcgtcgagtccgatgataaatttgattcatattcgtgaaataggataccggatatctccacctctcaactattaaaatcggtgcaatttgactcccacgatagtttcactgacgtggcgcctatgtagtggtgttgacttgatcttcgactcacgtttttcacctctcttttttgatttgacatggaaatatctcccatcccttctttgactctttttccttttttatacgagaaatgatcccaaatgaaaaatgaataggtgtggaagttataattgtaaataaaccacgatcgaatctatggaagcattggtttatacgttccttttagtttcaactttagggataatttttttcgctatcttcttccgagaaccacctaaggttccgactaaaaaagtgaaataatttaattgaagtaagaagtctccccatctgggagacttcttacttcaattagtcctctgttcttcgaatggatctcttaattgttgagagggttgcccaaacgcggtatataaggcatacccagtaaagcttacaagtaaaccagatatggagatggtgactaaagttgttgtttccatttttatagaatttcaagattacaatggatctacgaaaagatcgtgtatttacaactacaatggaatagtatacaaagtcaacacaaatcattaaatagaatttatggctacacaaaccgttgaagatagttctagacctagaccaagacgaactcgcgttatgtggtgttagaattaaaaaaatatatgtgagacccatttatccgcagagtgactgagtgactggcgcctacctcgggaggccatgcgccatgctgatgttgtcgacatcaacaccgatgagcgcctccttcctcctcccagtcaccgctcaccgacaacatgtggaggaagagaaatggttaggtttgaccgatgttccgtgtctttctccggtatccgacaataacccctcgttgcacactttgcacaatgccgcgtcacccttctgtcttctaagagcaagtttaatagtatagcccactactgactctaattcatctatagccaatttatataatagttgcttactacactattaatatatggtcctacctatcatacacacaatacgtcttagagtccgtgttgcagctggctacagatctgtagcccgctgctcttctctctcatcttttatctcattaaatatgtttgtagccggctaatagtctgctattgccctttgctctaacaacgctttaccctttgctcaacttccttaccttttatttccatcacacgcgttttatcatctgacatcattgcaatatctctctttcgtgcaacacacagatattttgctagtggtaaattaatttcaaatgctcggttggacaatatgtcatatcagggataaaatttgatcctatagcaaaacattattagctattatccctatatcaaactgaaaattttattatgcacaacaagtaaaagaattcatgttttttagcattcaaaaaaaaaggagagaaaatgtaaaagggctagattgatcacaaataggactctaattattatcggcctccctctctagccttcatttcttcgtggatctcttttagcgtacaatgacccatgacaggtatcccaagaaggatgaccaaacagaaaacgatggcaaataccccctcgatactgttgcaccgtggaactaacgggacaacaaagaaagcaagcaacacgagagcaacagtgttcgcgaaccactgcaatatatatgaagaagagttaaaataagaactaatggttagttgaatatataacgaatgtaaacaatagtagctgataagacaacgagacaaaatatacagatatgaactttcaatggtatagctttaatgctctaaattattataagtataggtttgtccttgatcaaaccatttatagaaacagaaaaaaaaaatataacaatatctacaacaccaaattgatttcactaaacccataattaaatatatttttatagtatatttatttttttgaaaaatattgataattctttttataaacttggtcaaagtcaatgatgattttacttgaaacaaactgatggagtacgatttaaagccacataacttatagatggccatctggaccgtccggcacggcacgacccaagcccggccatgcctgggctgaggctagtcgggccggcatggcccgaccgacacaccgggccatgccgtgccagcccacgggcggcatacacggcccaatactactcgggccggcccgaaggcacaatggctcatcatgtttcctcatagaaaaagtctatttttggtccctcaactctgtgggttgtgtttaaatggctggaaagtaagtctattttatatacctcttgtcttgggccttgccttatacaattatttaagtctttgcatccctatattttttttatttgatcgggttgtgctaggccggccgccatgccgagggtgcagcccaggcacaacccggctgtcaggccatgccatgcttgggctgggccaaaattgcatgtttcgagccaggtcgtaggcctcgggccctatggccatctatacacacactcaaagtgggagagctgattagcgactgatcgcgcacggtcgtaggcgcgtggtcagtccagccccttaagtccctcctatatactactaacacattatcatcctctctttttatactactatactgtgtatagtatttatatacatatgtagtgtaaactttgtattacactatgtatagtgtgtatatacacatgtataaacatacgtatataagatatatatatatatatatatatatatatatatatatatatatatatatatatatatatataaactttgtatacatgcgtataaaaaaaaactttgtatacgtgcgtaaaaatatatacatatatataaactttatacacgacgtatacagactttgtatacgagagtatacaaactttgtatatgtatgtaaaaatatatacatgtatataaactttatacatgtacatatacaaacttggtatacgtgcgtatataaagtttgtatatgcgtttacaaactttgtacatgtctttatatacgtacgtaaaaatatatacatgtatgtatacaaactttgtacacgtgcatatacaaacttgctactaaaaaaccgaaaagggagagaaaaaaccgaacaaagacgaaagaaaccaacgtagaaaaacgagaaaaccggacaaaaaaaacagaagaacggcagaaactaacgaataaaacgagaaaaccggaaaaaaaaccaacgaaacgaacggaaaaaagggaaaaccggaaaaaaaccaatgctacctaactcctccgcgcgcaatccgccgtcccctctccgcgcgcgccacatggctagtcgtgcgggaaggaacgcgcgcgactagtcgcgtattagcgctttcgcactcaaaggctgtactagagtgcatctactatataatcgtttaagaaaatagaaaagaaaaacgatagaaggctcgattgcctctaaaaatgtacttcctccatcctaaaatataaaacttttttggtgtatgtgactatgaatctgaacaggaactcgtagttttaagataagttacatccatcttaaattccttatattttcagaacgaatgcagcataaaaaaaataaaaggctttggtcgaacttgtgtatgtcattatgtgcagtcgtacagagaggggtactgaccacaagtgctctgatgccagcaggggcaccggtaggattccatatatctctctcgatcatcggatgatctgaaggctgtgccgccggcggccgtgccggcgaggccagccgcccttgttccagcaagctgcacaggagatcggggccctccgccgccgcggccttctcctcctcctcctccttcttctcctcccccatggcgaattggcgattcgatcgacaatcaatacagctaaactagctatgcgcgttatgttgaggccgtgtgcacgtacgtacgtatatacgtgtaggtttcggatgcggcacgagcaaaagaaatcatgtcaggttcgagttagacaacttcccggggtgtttttctctggttgtcagctagctagctctacctctgctcatcttatatcagatagtgtgttggaatttccaggcgtcaggtaaagatggggtgaaaagggaaaaacacctgacagacattgtgatactacagtgcatagctagtgaatctcatatatagtatatactagtaaaaggtaatatatcccacagggtatgatgaccaattgaccaatcgggccgacaagtgctaatttgtaacacatgtcaggcaagaatctggacaggaaacacatgtcaggggctgtttggttgaagccctgagccaaaagagcctggcctgatatgtccctgagggatatcctgtgtcatttggttggtggcctgatggtttcattccctgcctgacctgaaaaacctgataggttcattagcctagctcaggccaccaaaaacgagcgcctggctcagtctagttacacaaaacaaaacgcgctaatcaagcttgtcctgtcacggacccacgactgtgcatgcaaaaggtgttggaatattttattgttgaatcttggttggtgcaaacgaaccgaaaatacaacatttgcttatatgcgatagattaggatatgagataccgttttatttaaataatatctaccttaaccatgtaattatgaaccatctaatctcaatttagtttcctcaggcttaggctactaaccaaacaacatttgctcaggctagcctcatcaggcaagttttgacaggatagctaatgcctcttaggcatgtagttttcttaggcacatcactcaggtagccaaccaaacaggcccaaatccacaggccaaacaggccaaattgctaacgtgagactatgcctcccggtcacggtcaacaccagtgtagcagcactgcaaattaagaatgccaaattaattattgcaaggactatatactgttaataacgcaagaacaggtaaccgatcgagcagtttatcgtacctttacccaaaagaatagatgtccaaatgaaactagaacaccaataagaccgaacactccttcccatgtcaaccccaatgacggcagcgctagagctggaactgaagctgaatgggtcggatcagcatgtacagccagtagatatatgccataaatcaccagcgctgagaatgtcatgtagagaatatgacccacatgccgactcaagctcttgcaaatcctctcaccgaacatgccacagggaaggcatacattacccagaccccaaacagatgcaaatgcggcgagcatccagccgtcataaccagccggcagaaaaggtcgggcaagaaacagaactgccaaagaggtgctgaggatgtagacgtagccgatttgccttttgttccaaatctcgtcgtccgcctgtgtatacacattaatatttatatagagagagagagttgtggattgttataataacggagcgttgcttaaggcacaaaactggaatgtatttttttcacaagacaaaaattactaaatttcttgaaatgaaaataacacacaaaaaaaaaggtgtagcagtactagagggggggtgaatggtagagaacaccaaaaacacaaaaactgagcctgagaacactgtgtttaaatctgctggcatcatgtcttctttgaatgcatcttcttcgaagtcaaatgttgtgaatgcaaaaccttctgttgatgcaaaatcattgatttcaaaaccatctacttcacaaacttgtcgtgagaagtacccttgttctttttgcggaaaagatggacatttg

SEQ ID NO: 8602 - DNA, 15550 bp, Oryza sativa
cggtgtgggccgtggaggagttgctcgtacctgctcttccgtggaggagttccgcggaggaggaggaggccgccacgcggtacctgctcctccgcagcgcctacggccggtacctcggcgccaccgacgcggcccccggcgaggccgcccgcaacgccaccgcccgcgccgccgccgccagctctgacgtccgccaaccacacgaccgcgagggttgctgcggctgctgctgctgctgctgccgactccccttcggcttggtcgaggccacgcagcgcgaccgcgatgaggaggagccggaggtcgacgccatcatgtggctggcaaccaggtgcggcgaccaagacgtacaagaggatcgcgacgcccgcggcgtcgtccttctgcgcgacaggtccgggcgctacctgcgctgcaacaagagtatcctggcttgccgccgcagcatctcagtcgacgccaacttcgaggacgaagatacgttgctgtgggaggtggtgcgcgtccccccgagtgaagacatgccggagctcccgatcgccactcaggtgagcttctccgatccttttcccctctcttcttgcgattcttgtttttttgttttgtgtcttgatgctgatttcgtcggagattaatcttgatttcttgcaagaactaaccgtgcagtacaatttgtggattgatcgaatttctttctgctaccattgttgattttgcgcacccgggttcttcgtcagggtgtgcttcccccagccgctgcgggagatccagttcgtggacgaagccgacctcgacaacatcagcgagggagaaaactgggctacggttcagatcagagggaggtcggtgaggctcctgagagagaagatcgcggagcttgtgggctacgacgacttcacgatgtgcgtcagcgccggccgccatgggcagttcacccctctgctcatcgacctgcctcgccgccgggagaccctgcagatcgtccttgtcaggcccaacaccgatgtaagcagcctagttaaatatgaatgttgctgaattttctgaacaatgtttatgtggttctgaattttgctgtgaattctagtaacggatggcatggaatgggcaatgtctctgtttttttgatttttttttgtgtcagatcagcactgtagattttctagctttcagtagtttgtgcgctgtttggaatttcctgaaaatgcagtgatgatgtatttgcagaacttatctttcagtagagttaggatttgtctgaagaatactgtagaacagcagaactgcagaagtgaaatatatctgcacttatctgatgaatattcattccaatcatcatcagacaattgtgtgcaccttgggtttaactgaatgctgtaggattcatctgaatgttgtagatttttcggtgtgaaattcagcattcgagtagcattttaacatgtgaattactggcactgtttttacttacaagagctgtaattcttgtgtattactctttctaactgcgtgatttgtttgctatggctgcagcgtatgatcagttgatattcccgaatccgaatgcattgccgtcagccgaggccacagatgaagacgatcccacgattgagtgaatccttttgtgctcaagttctgacaggctcagggaactcgacagaagattagtgtgttggtatagagtggaattttcagttcagccgatgctggaatgcagttttacgttctctcagctgtagaatggctgaaaaacctcaaattgtctgtgtgttcagtgggtgtttttcgacggtttacgtactttgaaaccggtaaaacagggctttctgacgaaaatattggttttggtgacagttagtattcatgcctagtattgattgatgacaagaatgtgcttaatcctgcaatatattgctattcatgctagacttggttacaaatatgcatagcgtgtctgaattctgatgagtggttccagtagctgaatgtctgaatctcctgtagcattcaggtttgttctagtctatgtattttggaattttgataggttccggtttgcaaatgctacatgctagtatctgctggttctaaacttactgattaccctaaaccaattgttggatccagaagtaaagtacacaggattaagactatgtctgatgccctgaagcattcagggtttgtcccagtccttgtaagagtaattaggaattttagaaaacttatttttgtaaatagtcccttccactcttgtaataggtttttagttctatttataaaataagttttctacaaggtctaaatgtaaaaacaacttcagatatgcttccacatcaggaagtggatttttgtccctcgagaagacatcccatcgttttgtgtatggtgttcaaaaagttatcaaaaaatttgaaaacaattgtcaaaaaaatcaatatatgatatatcttttcacaaacatacaagttaaaatttgacttatacaattcgaaacaaaaataaaaaatttgaccgtgaattactcattctagtcatagtcaaatttattaccttttacagtgtttgcattcctaaaatggcatagatctaaccgctcacgatgaaaggtatcagaggtagaaaggtactaaggattaaaaggtaattgataacagggcaattatgtctaacaacgtatggacgtaccgaaaggtacggtgtaagtggatttgaaggtaccacaaggtaccgcgtaagtagtttttaaaggtaacgtaaaatatgatttatgtggtgggacaaaaattacattctcttctattcggtttccaatcttcggtcgttctgtttgcgtcggttttcaaactttggtccgatttacgtggtacatatcatattcgcatgatcttgataattatttccagttagtcattaatttacatagcaatttggtgaccatcgtttgatgaatgtaatcaaagatcgaaaggacaacaaattgagaagatttacgcacctaacaagaacaaaacaagttcaatgaggaagatttgcgaaaaaaaaactaaacaaatcgtctgacagatcgggaccgtgcggccacttctagctccggcgaacataggtagtcctggaccacttcctcccggtcctcttcctccgccgcccctccctccaaccaccgcctccggccacacgtccaccgccggccctcaattctccacctttcaacttatcgaagaacacgtaaaccttacgtatgaacagaacgtatctaagaacgatgcaacgcaacaggctacaagctaattccttcgataccttctcataccttttcatatgtgtaaaagacacatttgtcattctaatatcatcatatttatattaatgccacctattacaatattttctttccataccttgcccctcgcagatcatcggctcacgtcgccccacctcctttacctcgcaaacatcgtataaattgaatttgaatatgcatgtttgtgaagtgacatatcacatattgatctatcatactttttttaaggaaattttttgatgactttttaagtgacatgtaaaaacggggcatatccaaatagagtttcccttccacatcactgtcctttgtaaaggtgataagctcacccaaggatgctcaaattacatccagcacatccatggccatctcaaacgcaatgaaatttctgcgggttgggattaagttcaagttctttaatctcaacctgccgaaatttattttctttgcaattacccatttgagtaaatttaaagcagcaaataatcatgtttcaagcaaagtgagtgtttttcttgtgcggtaactgaagcctcaatttggtggcggagacctggtggccttctgcgtgctctcaacacagcttatttcgattgcttatccgccaaaaatggtggagcttgaacgaaaaattggagaggaccaatatgatagtttcatttaaaataggaatattatgctttgtttaaaacttgagcatagagagtcaacaaattcagtgtaacttttctaagactgaggagacatgattaaggttagcttctactcctatcgtcccaaaacaaaacttaatgtaagaggagatatgacccctcctaatacaatgaatgtgagaccctgtttagatgggactaaaacttttaagtccctatcacatcagatgtttggacattaattaaaaatattaaacgtagactattaataaaacccattcataatattggactaattcacgagacgaatctattgagtctaattaatccatgattagcttatgtgatgctacagtaaacattctctaattatggattaattaggcttaaaaaatttgtctcgcaaattagctttcatttatttaattagttttgtaagtagcctatatttaatactctaaattagtgtctaaatacatagactaaagttaagtccctggatccaaacaccacctgaataaccctttatccagattcgttatattaggaagggtcacattctctcattggttgagtagagtgatcaaagaaacaccatccggactgtgtattagattggtgctactaatgatgaaacaaaagatatagtattgggtaattttaacatcctcgaaaaagtaccgggaattaccatattttctagtataaaattaatttggtacctctagatactaaatatctcgagataaaaaaaatagtataaaatttagatacctcgagatactttttcaagtacgataaaatttctctatagtattactttgataacgtgctacatcgaaacaaatgctacagtgcccaaaaataaaaaaaacatatgcatgaagccaaacagttgatgaaatatggggatagctaactttgaattcagggattgcagaagtgtaataaatgacctaataatcctggataattaagaacttaaatctagctcgttaattaattatgctttctccttttggcacaaggcacatcatcatctgcaggcgcgtgaccctccccgtcctcttgaccctcctcctcgtcctcgtcctcgtcgtcgtcgttgtcctcctcctcctcctcgtccggtatcgctaacgccggcggcgtcgacggctgcgccggcggctggtggaagggctcgggctggagggcgacgtcgtcggctggggctgggcttgacgttgccggatggtgttggcgagcgcgctcggccttgaggcggtcgagctgctgctggagcttgagaatccggccgtaggcgccaaggatggggtcctcgaccctcgcgtcggcgaggtagacgacggccgccatgctaatcacggtggagccgttgggccggatcccctgcttctccgcctccgagaagccgaggatcctctccatgccgaacatgaggcgcgcgtaccagaagcgcttcggcttgtcggccggggggggggggggggcgcagttcggcgggcagctgcttgccccgtggtgtgcgcacgcggcgcacgcctgttgggtcgtcgtcgtcgtcggcgacggcggcggctccgccattgattaattcttcgtcagcgagggggtcaagaactcgatgaaatttcggcggcgtggcgtggcgtggcgaggcgaggctagtgtggtcggctcgcttcgggcaccgaagcaaaaatatagatatagtgcgagagtctgtgtagtgcacgtactgagcccgattcgaattcactgttaacctcttgtgttggtgggttaattcgtctccatctcaaattacatattcaactgcctctggattatgtgccccaaaacgcgaatattaccactgtaatttcctgctcacatcggcggtttcaactgcggttaaggatgaaaaagttaaaacggaaagtaagcagtcctccacagtaactatcaggtttcgtttcactcccaccgttcgatcatccaccatcttccttcggtagttaactgttcttaataactcattaactagctagtccagttaattctggagaatcgttccattggagcaagcttcaattctgaaactcctagactctgaatcagacctctaaaactctgaagattcagagaacatctgaacttgttctgctcgctggaaacgaaacgaatctgctcaaaggagttaatcttgcgagaatgcgagtcgttgcgcatctgagagcaacataaaactatattcagcatcggcagaaaaatctactctctgtcgctaatcgaccaacgaaacttgtgtcaagtaccaacaaaacaagttcagcacaaaaggattcacggagtctgtctctaataagctgacgaaccttctgtcgacggtcctgtcaagtacccataaacatctggggaaagtttcaggtggaaccccctctttcagtgaaaccatggaacctcaactgagggtgtgtttagatccaaagttttcatccaaacttcctacttttcccatcacatcaacctgtcatacacacacaacttttcagtcatagcagagaaacgacacagttagactcaggcagtgtggtacaatcataaaagcaatagtattcttgagagtaaaaactgggcaagtaattctgcaaattaaagatgctgaatttcacactaaacactggcatgatcattttcataacaaattgaaattaacattcataacatatacaaaaaatattttcctcaaatgaaaatatacagaaaataaagcattgaaggtgtatgagaccattcatttcaggtatactggagacaatgtcaacacatcatttcagctacaattctgtttgtgtacaatattcagataaatcctactcacagagggtattcccaaagtgcatacaattttgtcctgatgagtcctaaacttgtgttgttctacatgcattctcatcaacagaaaattcctcagatgagtcctaaactcaagtcaacagtatatttcgcttgtgttctacaatattcttcagactagtcctaactcaagaatcaaatgcaggattgcatttttcaaaaaattccacaacaagcacaaacaatctacagcgatgcactaacaaacaattacccgcataattgttcaacaattactagcgatgcgttcctttgacagcaaaattcagaatctacagtcatgcactaacgaaaagaacctggagaacggaaacactgccagcatgctaggctgcttaactctggtgttcagaaccacattaacagtgttcagaaaattcagaaagagatcgaactaggctgcttacctgcggtgttggacttgacaaggacgacgtgcagggtctcccagctgcgaggcaggtactcaagtctctgacccatcagcatcaagaattgccacaattagaactcaaatcgatataatctttggcgcaaacgagttcaagaatcgcaagaagagaggggacgaggaggaggagctcacatggcccatggccgggatgtctcgcctgaagagagttgtggggacgggaagcacctcccactgcatcgggatgttgaggtcgccgtcgttgaaggccgcgacgccggcgaggcacgggagccacctctcgttgacgcgcaggtagcgcgcggtcgtacttgtcgtgcagcaggacgacgccgtcgccagccgccggcgcccagcccgacggcacgccacatgatggcgtcgacctcacctcctccctgtcgaagtcgcgctgcccggcggcgggccagaagcagaagggcgcgcccagaagtggctgatggcgtcgggggcaccgagatagcggccgtaggcgccgcggaggagcacgtggcccgggaggaggacgccgtcgccgccctcggcctcggcgttgatcgtcttcgctggcgaggaggtacctgccgacgctgccgtccacccgcgaccgaagccggacggactccacgtcctggaatacctccattgctcccgccgccccgccggtggtcgcctcgcgcgcgcgggcgctcgcgtcaccaagcgggctcctctcctctcatcggcgacggcgaggcgtgggcgcgtggcgtgcggaggaagacgagaggaggagtttgttagcgacggttagagctgggacatgggccgttccgggctaggcacggcccagcgtgcttcgtgccaaatcgggccgtgccagcacggcgtcttcatggacgccgcccaagcacggcccaatggcccgatgggcctattcgtgccgggccggcacaagcacggcgcctgatggatggatgagaaaagcccatcgggccattatcgtgccatggaccatcgggccgtttacgtgccgtgccgcccgtcgtgcccgttgtccaggcccaggcacggcccacgtacgggctgtgccggaccgtgctttctagcgtgccgggccgtcgtgccttgggccggcctgataaagcacggcccaagtcccagttctagcgacgggtgcgacggggaggtgggcatttgaagcgtcgcgaagcacagcacagggctctgtctgtctgtgcaggtgggcccagaaacggtcaagtctggtcaactgcgtaactgacaggtgggccaccccacaactagccatagttcggagtggatgacgagtgcgcgcgctgacgagccgccgcggccgccacgacgacgagttcgtcgccttcgaggccggccgccgctcgacggcttcctccaccgcgcggcacggaggcgccgccacgctcgcgcgccccggcttccctgcgctacgcctccgccacggctgcatcggccaggtcgcgctccgcctccgccacggcctctcctgatctggccgcatcggccagatcaggaaggggctcgacgagatctcccccaactatgccgcctacgacatcgccggcctgggatgcccgtgctccctcttcctcctccgccaccattctcgccgtcaggtacgctctcgaactactcatcgttgtcggggaacagggcgatcgaggagggtggggtggaggtgggctgagtgcgcggcggaagccgtcggggtcggatgcggcggagatagacgagcgcggatcggacggatgcaggtggggaaggagcggcggcggaggaggattgaggtaggagttcgtcgcccggccgccggccagcttgatctgacgaccagcggcaatcccaaaaatttgacgaacctgattttttttcaaatacacccctggtttggattgctgtcattggaagcgacttggaatttctcaaaattgctcgaatgaggcgcagattcagggttggattttagtgaactctacaaaattcatacaacaaagtttgaacgaacggaaaagggagtgtccaattctttcaaagtgaatttacagaaggattttgatggccgccatgggtgctcgatccatcggtgcttcgccagctgtgcgaggaagaagacgacgacgaagactagtaggacatggatgcatcggctacgtgtcgagctcgaggggatcaggggacgatgaggcagaggccgtcttcttggtcgccgtcgtcttcctccggaacggccggcacgccttgacgctgaggtcgacggcggcggcgagcgccacgaacatggcggcgtcctccatgcacgtgacgtggcgcatggcgagctgcacgagcggcctgctgctccgggactccccctccacgcggcagctcatcacgaacccgccgccggcgcacgcctcgcccaggctcgccgcgcagtgctccgccccggcggccagcgccggcgcctgcctgtccatgtcgatggcgaactccccgcccctgtcgctgcggagcggcgtctcggccaccagcatgcacgcgtcctggccgtcggggaggagccgcagccggaggcacaccgtgtcctgcctcgccgcgccgccctgatcccgccacgcctccagccgcccccacggctgccagctctccaccgccgccgacgacgacgtcgaccccggcgccgtcgcgccggcgcgcgcgatcagccacgcgccagggttggaccgcgccaccgtgtcgcagccgctcgccgccacgaacggcgtcgccatgaacgccgcggcgacggcggagccggacaggtcatggatcaccaccttccaccccttcctctccctcctcctcatcatctccgcctccttctcctcgccgccggagctcgaccagtacagctgatccgaatgtgatccactgccaaccaaacaagaacaacatcaacgacatgatcaccaagacgagcacgacggcgtcaatggcgtcctctcaccgtctgtcgcggatgaacttgcagctgaagatgggctgccggttgcggccatggagctggacaacctgcggattcagcgcgacctcgtcgtcgaactcaaagatgtaccggggatcagcctccatcttcaccctcaagtgcagctccggcttggcctcaccgttgccaatgccaacccagccatggtgaagcatcaccggcttgccgtcgcgccactcaggcccaatgtccatcctgaccaccccaaccagcctcttcatcccggtgacaatgccacaatgcccgccacgccggccaacgtacaccgcgacctcgaggtaagacccatgagctccgaaacaccccggtgccgacagcgccttcagttcagattcgtcgagggagaagacggcggcattggtgtgtggatcaaggttgaactctgaataattgatcagagggacaggagctatctggacagggaatcctcggagccggatctcgcagtggaagctccgggccgccttcctcgcattcgcaccggggagtttcagaccaagctgtccaactgaaagtctgacaaaaatctggggatccattcttcgtgtcactgaagattagctacttccatggcacatgctgaaaaattcacaaatcattgaagtcagatataatttgatgtaacaatcaattgtaggaaaagaaatgaattctgcaaattagcactaggtgtgcagctgatcttaaaattcttccaatagtagtgtatggtatgacagtatatgctccaagtgatatggaactatgaaaaagactacatagtagcaaatccagaaagaaatgcatagagcatgtttcagtatcagctatgtgctataggaatggcacatgaaaagtagcaacattgctgttgcatgaagatatcactttcagattccattcaaaaaattacatcacttttacccttgtaggtatgaccaaattctacagaaagtaaaagcctaactccgtagccagattcagctcatcacttcaaaatcataggcttaaagcgccagatagaagctgattgcattagattagaccatagccaaattcagctcatcacttcaaaattacagatcacaggcacaatttctccatctgtaaccaagttttattaggtccacctaatctaaggtttaagatcagccaaaaaaaaacttaaaagtaaaagaactaattatttaggaaataaaaatgatttacttagtaagttagctgttttttttttctcaactcaaagtagattttgccagcatttggaattagcattcagacatgtctttaatcgtgattttgatctaatagaaggtacagttcaccttaaacattccccactaaaaaaagaacacgcaactgacgcctagatgcttgcctttcccccattttttttgtgaaacctttgggatccttgacaaaatttaaagaaagatgaatgttgatcaagtagcatattcttcccctttgacaatccctagtgcaagcactaaaaaaggcaagcattgctaatgccactcaacacctcttagcttaaacaactgaaagggagaagaaaggaagaaagaaaaagaggcatctggtgctttgcaatcatgccattgagtggttatcaatggcaattgccaatgccattagcatgccacctctgttcaaagctcctctcatcagtcaggcactgacagtgtcactgcaactgcaaaaaaaaaaaaaaaaggcttgtgcaaccaaagaaaagcatccaagaagagcagcatcaatggcgcggcgcgacataagctagcccgtgtgtcgcgaaaaggggcggcggccatggcagcaatggtggtgcatgggtgaggtagcccaggatcagaattctccctttgctcccatttctttaaccctccaagcaaagcttcctcctctgtcgtatgatcagcgtgcaaagtggagattccaaaccttcctctccaccaacaagtcctcctccggcgcaggcacgccacgccacgccacggcgtggacaaggccgagcacataaggcggccgccgccgcagccgcagccgcagccgcagccgcagcaaaagcttcgctgcatctcacaatgttaagcgcggcgaacggcggcggcgtccaccatgatcaccggggtgattacccccccgaccagcggtacggcaacggcggcgaggaggccagacaacagcagccttcgtggcagccgccgcgggaccaggtgacgcaccacccgcgggggcggagggcgcaccggtcgggcccgctggagtggacggcggcggtggtgttcacggtgctcgccgtggtggtgctcgtcgcggcggtggccgtgctggtggtggtgctgctgctgcagccgcgggcgccgtacctcgccatccggtcggcgcggctcgacgacctcgtctacgaccagcaaggggcgctggaggcggcgctgtcgctgggcgtcgccgccgagaacggcaacgcgaggtcgggcgccaccttctccgacttcgagctccgcctcgtgttccaccgcgtggtcatcgccatccttcgcgccgacccgttcgacgtcccgcccaaggggtcgctgccgctgggctacgtggtgcgctcgtcggggatcccgctggacagctccggcatggccgccatggaggcggcgctcgccgacggcgtcgtgccgttcaccgtgtccggccaggcgagcacgcggtggaaggtgggtggcctcgtcccgttcaagtactggacgcgcctacgctgcgacctccgattcttctggcccaatggcaccgccgtcgacctcagctgcagctccaagcccaaatccaagagcagctagctagctaaccatcaaaagaaaagatacttcatctttcttgctccaatccaagttctccatggatttctgatgtgatcaagattcaagaacatgccactgcctttcttggattaattcttcctttcatccttcctttcttcgttgattcagttcatgtatagattggtcaagaaaatgacaactacacccccaatttgtacaattaattagattgtgtaattgatttgaggtgtgcagattaagatcatagtaggtcctaattaaggggaaagaaagggtagtggaaacagtctggcatggtaaagtaaaaactgattaggaaaagatgtagtcttgttgcaagattgaacaagaccagtgacttcttttcttgcaagctttgttgcttggaggaaacaaattccatggaggggaggaggaaaggggcaaaaggataaaaagagaacaccatgaaaagaagcaaagctactcctatgtaggaaggaaatgtgcttttggtaatggagattgtggccctagcgccatgcatgtgcttcttctcctcctttccatcccttgatccttgtcatgttctttcgcttgcttttgtttcaaggattatctagaagaataagtgaataataaccagtctcagatcccaagaatctccaactcatccattattcaaccacttctctctgaccggatacatctttgatgtagaagttggattgattaattatccttatcggaataaaaatcctctcaaccactctcaagctcaaacaacacactaggaagctaccaatacatttctatgtaaacaaaaaaaaaaaactaccaatacatatacatacatcaacatcatgcagtatatactatagtagattagtaccaatagtaaacccctaaaattgaacaaaagcaataggcaaaaagaattgaaattgagttgaatttggatttcggaccatacctgtcaaaattggttggtttcttggcagaactcagcaacggagaagaagtgaagaacacctaggagaaggaagaagaagaagcagcagcaacaggcaggacaccactagagctcagccaagagacaggcgacagatgctccgattctagacgacgacgacgagctcaccggaatccatcccgccggcgacgacgacccgccctgcgtgatgacctcgccgccgccgaacccgaattccatgatcgattttcagaggccgaatcaatcgcaggtggagaagaagaagaagaacaagagcaagaaccagaagaatacagctgctgctactgttagctactatagcttagctatgcaggagagagtgggaagagagagagagagagagagagaggaagacgacgacgactttatacgccgcggccgctgcccaatgcgattgctcctaccacgcggcaacaaagagaaagtcattagtttaatttagtaactaactataaccatagtaaaagaaattaccactactcactgattcgagcatggataacagtaaagctaaaactaactggtgtggaaaaaaggagaaaaaaaaatgagaggtgttagctctcatataacaattagttctacacgtgttccaatatatttacattaaatccatagtgaaaaaaaaagagagttgagaaaaaaatagagttaattttagagttaatttattactccatccatctaactttaatagtcatatttcatcttgacacatagaccaaggataaacaattctacttatcatccattactagtcattcctcgtaaacaagcgattcattaatatttacatttctcgatgcccatgtagccaatcttgtgtgaaagaatggagagtcacgcattaaatccgaaaaagtcattaagatgataggttgttggcttgaaatatgcctatcaaaaataaatttttcagatttggaaatatgactaccaaaagtagattagatggagggagtatatatgtaaactctaatataaattaatagtcaatagctttactattaaacttgttgttaggaattgagctgattgaataagcaagcaaaggttatgtgccgtgctgttgctgctgctggtgctggtattagaaggggaattaagtgagtagcagtggagctgtgtgcgcgagtaagctaagcgcgcgtgattagactggtaattgcgtgattagactgctagtgacgccgtggtgggggggtacgtacgtccgcgtgatgggcttatgatgcgttaatgatagaagaaggggggattagataggaggagtataatgccggcgccagctggagtccaaagcggcaacttgcgacttcgctttcctgacagccaggcatggacagcaaccctctccaccgctcatctcaaattcccgttttgcccccactattttcttctgttttttttttctcatctcattgctatgg

SEQ ID NO: 8603 - DNA, 10989 bp, Oryza sativa
agcagaacgaatgatgacgcaaacaagttgcagaatcgcatagaggacacgcgacaaacaccaagaatcgcaacaagagatgggagagaggatcggaggagctcacctcaggcacaatggagatcgggagctccggcctgcctggattcgggaggacgggaagcacctcccaccgcaacgccttctcgtcgtcgttgaggcggccatcgccgacggtgagtctggggcggtcaccgagaaccagggtacccagtttgccgcgcaggtagcggccggacttgtcgtgcaggcagaggacgtggtcggcccgcctgacggcacgccacatgatggcgtcgacctccggctggtcgaagtcgcgctggccgacgacgggggcgggccagcagcaggagagcggccagcggcgcacgacggcgtccggggcaccaaggtagcggccgtaggcgccgcggaggagcacgtactgcgtcgggggcgccccggcgaggaccatctgcaccgcccagattgcctcgtgcgccgggcggtggcggtctggggcgtagtggtagaccgacctcccgtcctcgtcggccgtgacgtacgtctcctcccaccagttccgcagccgcgcgaactgcacgccctggaaaacctccatcccgcgcgcgccgccgcggatgggacgacgtacgtacgccggagatgcgcgcgcggcggcgagtggcctgctactcctcggcttctcggcgtggcgtggcgtggcgcggcgtggcgtggcgtggcgtggcgtggcgaggaaggcgagagaggcgaggcggtggcgcatttgaaagcgtcgcgaggaagagggagacgcaggtcgctctctgacgtgtgggccctttggtcaatgaggtcaaaagaagtcaatgacgggtgggcccgagcacagtgaatgggcgtcgcgaggaggagaggatagaagagtcacgggttgccagttgcgcacagccagatagccaatgactggtggggtcaggcacagtcaatgactggtgggcccgaacacagcgggtgcaataggattagccatcgacgagccgtgctaacttgaacggaactacggaagatgtgtgaaatttgctcgaacgaggcgcacatttaggattgaatttgagtacactctgcaaatttcgtacagaacgagttctgaacttgttctggtcgctgcaaacaaaacgaacctgttcaaaggagtgaatttacagagttcggttattctctttttgcttaagggtgattaacatgagttactatgatatgtagaagacttcatcgggctcattaacatgaggattttcttggccgtgttgtttttgcaaaacaaataaaattcgaagtctgaactccaaagtcatacacaacattcaactgcaagtcattttgttgccatttcagtggtacatttgcttcaaggtgatataatatacagtagcaaacttggccacgaaaaaacttcaagcaatatacaagttaatggtgaactgtcttgtttgtgttatgtacggagtagtacttttgcatcaaacaatctgtttagagtaatcaccgcaataggtaaaaactaccaactactcggtacctaggtagtagaagcaattactcctgaaccattatctaaaaaaagcagcatctgaaaactggcaccatccaacatattgctaagtagaaatatattactgctgatgctaaacttggtagaaatatgcatgatgtgactgaattctgatgaatgattacagtaactgaatctcctgaaccattcaggatttcaggtagtatccctttctgtttgggaattttgaaggtactagtttgatatgtggaatgtagttaatttagtaattctttttacttattccagtgattgctctaaaccaattgctggagagttcttgaaaagtttaaacatgcagatttcttgacagtttgtcatggccaagcttgctacactactacaatgtattgtggtgctgctacaacggtgaagaatcactgaacttaaactgaaagtaacaaaatggcatgcagctgaaatgtaccagtacatgattctgaattccaactgaatcttctgagttctgacttctgaatcacagaaccgatcgatcgaacatccatggtttgccactcaaattctgtaaacagagtcgttttgtttgctgcagagatgagaacaagttcagaactctcttcttttgaagtatgaatcttgcagagtccactcaaacccaatcctgattaacctgcgccgcttcatttgagaaaatcctgtaccatgaaatctgccgcactccctgttctcgggcccacccgtcattgagtacggttgacgacagttgactgtgggacacacgtgtcagagagtgacctgcgtcttctcgcgacgccttcaaatgccactgccgcctcggcagaatccaggaggagaggaggattggagcatcgggagcagagatgggactcaaccacaaacccgtgcatcacctatagaaaacctagaaaaaggagaggatgtgaagagcagctcaacccagatcttggaggagggaggcttggcgctgcatctcgctggaggggaaggactggcggcggcggcgaccttcgttcgcgagaggggaatcgtcgctgcggcacgcgagcgacgcgacgagattttccacgtggatcgggccgggaatttcccagctgatgggcttccaaatggtccggaaaattggcccgtggaattttactgcccgggctggccggccagggaataggccgggatccagtattattcaggtggtgtttggatccaggacttaactttagtccctatatttagacactaatttagagtattaaatatagactacttacaaaactaattacataaatgaaagctaattcgcgagacaaattttttaagcctaattaatctataattagagaatgtttactatagcatcacataggctaatcatggattaattatgctcaaaagattcgtctcgcgaattagtccaagattatggttgggttttattaatagtctacgtttaatatttataattagcgtccaaacatccgatgtgatagggacttaaaagttcagtctcatctaaacagggcctcagtctctgactcggtgatggcctgaacagttcgatctcggactcggccgttttatccttttaaataggtcgatgtgcatgcgctagcgcgaccgaaccatccgagcaaatcgcaatcgcaatcgcaaagcagaggaagaaaaaaaccaattcatccgtttccagtagggctcccggccgcctccggcagatccgtcgccatggaggaagaaaccgccgttgcagactggtcggcgctgccggaggacatcatcatcaccgtaatggggtgtttgtccgtcctcggcgacctcgtccgctccggcgccgtctgctccacctggcgcgacgcgtacgccacgttccggcgactccacctgccgtccacgacggcgcagccgccgtggttgctctacgcctgtgacgcccacggccccgccgccgccgcgctctactgccctgccaccggcaagtccctccgtgtcccgctcccggccgccctgctcgatggccggcccgtgatcggcgcgtcgcaggggtggctggtcaccgtcgacgaggcgcccaacctccatctcgttctcgtcaaccccatcaccggcgccacggcggcgctcccgcccatcaccaccctccacaacgtcgagaggttcacgagcaaaaagggcaagacaagatacagggtgtacgacgacatgggatacagcgaggcgtcccttgagtactcgccggcgcaggcgagggaatgggtgtaccaccaggtggtcctctcgcgcagccccgccgaggggagcgcctgcgtcgcgctcctcctgcaccggccggacggctatgtctcgttcgcgcggctcggcgacgagcggtggacgccagtcgcgtacccgggacaggactgctccaccggctgtcgccacgccatctacgatgacgccgatggcctcttctacacgttgcggtacgacggctccgtctacgcgatcgacgtccctcgcgccgcggccgcgtcgtcgccgccggcgacgagagaggtcatgcggagtgtgacgaacgcggacaacggcagcaagtacctcgtcagggtgccatgttccggcgatctcctgcaggtctggaggttcgtcgactacgacgacggcgacgaagtcgaagaggatgaagacgctgaagatttaccactcggcaccaagcacctgcagatcttcaaggtcgacggcggcgagcagaagctcgtggaggcgtcggcggcgagcttggaggatcatgtcctcttcctcggtcacgggttctcggcgtgcttcccggccgagcacttcccggcgttgaagcccggctgcgcctacctcgccgatgaccacgaactcgtcagcgtgagtaagcattgccggcgagacattggcagatgggacatgaagagaggtcagatggaaaggctctccggcgaagatgacgtggcggcgccgtctcagccttggctcaactggccatctcctgtctggatcacgccaacattctactagcgcatctcgtgcctttagttagcacccacacattttatttattttgtcaatacgaattattgttctcttgtgaagcatcaagtagtttctcgtggaatgatggccaattcggtcttttgagttttctagtatctgtgcacatgcaacatacgttctaaatgtcatgtttaaatgtcagccaaacttagatagtactggccccgaatttaccgagcaactttcaccattgtaacacataaatgttgtagccaatgacaaacataacgagattacaattaagcaatagccccatgctgtgtttagttggtggtccaaaatttattttgaagtatacggacacatttgaagtattaaacgtagactaacaacaaaacaaattataaatttcacttgtaaactacgagacaaatatattaagcctaattaatccgtcattagcaaatatttactgtagcaccacattgtcaaatcatagcgtaattaggctcaagagatttgtctcgcaatttacatgcaaactgtgcaattgatttttttcgtccgcatttaatgctctatgcatgtgtccaaatatttgatgtgacggaaaagttaaaagtttaaagcaaaaagtttgaatataaacagggccctaatttggccgtgcccttgccaaacagagaggcacgtctacaagcaactaaaccaatgctacggaggcctaattttatttccacacatttcttcagaaaattcattagaaagataagcacaatctagttttaacctagggaaaatccctttgtacaccgctaaggccttgtttggtttggaggggatcgaagaggattggaggggatcgagtgggaataattccacaccacaataggtgtggaataaatcccctccaatccctccatcacaggaaatctgggattaaccgcacaagaatttaatccgggtcaggaatgacaagtatagtaagaaatttatgatagatacaacatgagaccaggatttatttcgggccgggaaccaatttactcatgatagggacaataagagatcaggaatcaattcactagttaagaggtataaaactttttgttgtacctagctaatataagtaaattggttcccgacccggaataaatcccgatctcttattgtacctattataaatctcttgttatacctatcattcctggcccggaacgaatccttgtgtaaccgaacaagaacatagcatgatccccaatgctgcgcatcttagcaaacttgtgcttatcattatcaactaaataaggagtataacacataatttcttctgtaaatcctcatcaggttcatccggttcataatcaccatcaggaattgttcataatcaccatcaggaatttcgtctatttcttccgagtctctcaacctccgtacctccaagagatcgggattagaccaacttaaaatccaatgtgcatatggagccatgagccatcaaagctcaacaagtagaacaggccatcgttcttgttatagttgttcctgtgatcaccttaaaccaattcttagatcagcaaggtacacgagatagttcttgaaaagttaatagcacatcaatttgtcttgagtgacttgtattctggtgttgcaagcctgcaaaaatagtggagaaccactgaaatcaacctgaaagtaacaagatggcaatgcagctgaatgcagtgacagtgagtgtgtcatgagggctagttcagacaccgaatttttcctggaatcactgggccaatcgatcgaggccgcactattctgacttatcagcatttgttcaatgaaaccagacatgcatttgtgattaaactcctgcaatatactatagtattactgttagaaatgtgcatgattctgaattctaatgagtgatgacagtaagtaactgaatctgctgagttctgaatcactggaccgatcaggcgatcaagcattagttatgaattctaatggtggctatgggatcgtcctaacaaattttgtccagaactctgttttttgtttgtaaaattcgacagtaatttaaactcactcactagaaagagctgggcagattcgttttgtttgttgcagagatgagaacaagttcagaccacgtttgtatgaatcttgcatagtccactcgttcaaatccaatcctgaatttatgcctcctttgagcaaattattttttgtttacaaatatatcatttcacttattccaacttaaagaacaaccggacgaaggactgatggatttccaccttggaatcctactaagttcctaaggatgtgtttagttcagtgcaaaatttggattttagttgaatttcgagatgatatgactgaaaagttatatgtgtatgacaggttaatgtgatggaaaagaactgaagtttagatttaaactttggatctaaacacagcctctgtaaatccaaatctttgaaaacaagcggatagactctgtaaatcttgaaccttccatcgatcacaggttcactgtgcacgggcccacccgacttcggttgaccagggagcccacctgtcagtgagcgacctgcgtctccgtccctctcctcgcgacgcctttaaatgccaccgcctccctcggcgtcgaaacgcaaccgtcgctaagaaactcttccacggctacttgcctctctcgtcttcctccccacgccactcgccaccgcgcgcgcgccactctctcgcgactcctcgccaccgccttcggaccacgagattccggcgactttatggatgatgaattcgtgggagtggtacagatcgacggcggcggcggggacgggggctggggccctgttggagcagcggcgggcgtcggcgaggtcggcgacggtgcccttcctcccgatgcggtcgcgggagccggcggagccgatggagtggacgagctgcgccaagcagaggcgagactccgaaaactatgcttggagtacaccggcacgggcagcatgccatgcgccggctgctatctccgactcgataaaggaattcctcataagaagtttaagcttctcctccttaaggggaatggagccaagcgtcatttcgagacagtgcataaactcgacaagaataagaaaaatcgctgcaaaaactgcggaagctacttccgcagtaaagaagaattgcgagaccataaagaccgaatccatcaataagctcaccgaggtgagctcctccgatccgctcctcttctcttcttgtgttcttgccacggtttggttctaattgtgacgacgatggaggttttccaggaggcgctgaggatctggaagagcggctcgtacctccacgccgacgaggacgggaggtccgtctacatcggcagcctcccccgcgccggcggcgactcgaggcacggaacgatgtgggccgtcgagccgccgatcgacgccgcggcgccgctgccgcagtacgcgcgcctccgcgccgcctacggccgctacctcgggacccccgactcctacggctccccgctccccttcctcccggtggacgccgcgcagcgcgaccgcgacagggtggagatggacgccatcatgtggcagcccgtcgcgtgctccggctccgacgtggtcggcggtcgcgatgcccgcggcgtcgtcctcctgcgcgacaggtacgggcgctacctccgcggcagcaacaatctcctggctccccgccgcagcgtccctgtcaagccctacgtcgtgaacgagcatatgtttcggtgggaggtggtgcgtgtccccctgagtgaagccaggccggagctcccgatcgccgctcaggtgagctcctcctctccgttctcttctcgtgtgtttgttgcgtctcttggagttgatttgggtggcagatcaatcttggttgttgcaagaactaaccgttttgctctgtgaattgatcgaattccttctgctgccgttgttgattttgtgcagtccggcttggtcgcggcgtgcttcccaccgctgctgcgcgtgatcgagttcgtgggcgaagacgacctcgacaacatcggcgagggagaaatctggactttggttgagaccagagggaggtcggtgaggctcctgaaagagaagatcgcgaagcttgtgggctacgacgacttcacgatgtgcgtcagcgccggccgccatgggcagttcacccctctgctcatcgacctgcgtcgcagccgggagaccctgaacatcgtcctcctcaggaccaacagcgaaggtaaacatcccagttcgagtatgaatgttgctgaattttctgaacaatgtctatgtggttctgaattttgctgttgttgacgagaaatcttgtgttatgtagttcagcactgtagatttcctagcattgcgtttctgcctgtctgttgaatttgtggaagatgcagttctgtgtaaaatcttgttcctgcttgttgagttaggaagtgaaattatgtctgaacttatctgataaattttgaagtgaaattatgtctgaacttatctgacaaattttcatgttaggaattaccagaaaatcgtatgcactaattctgtgtatcttggcaataggacttatctgaatatagcagacaagcagaaccagtagtagttaatactatgtgcctctagctaacgactactattgttgttaggcacaactaaaatgcatggtctaaaaccagttcaagcgtttattgtctgcttaacttgctctgaaaatgatcatatcagtagttcagtggtgaagttcaacttgtttcgagtaacattttacttgcagatttacttgcaccgtttttatttgcaagagttgtactgcttgtgtatcatactgtcaatgatttctaactgcgtgattcctttgctatggctgcagcggataatcagttgatattcccaaatgtcagtgaaattgctgtcaaatggatcaaggcgaaccaagattgatttagtgaatccttttgtgctgaagttttgacaggctcagggaactcgacagaagattagtgtgttggttagagacatattgagtgaaatttttagttcagccgattctggaatacagtttcatgtttgctcagctgtagagtggctgaaaaatctcaaattgtcagggtgttcaatgggtgtattaccacggtttacgtactttgtgaacagggttttctgacgaaaatattggtcatggtgacaattagtattcattcctagtatggattgatggcaagaatgtgcttaactactgaaatatatactgttcaagataagtgaactttgacgagtgttctgaaatctgatgcatggtgttctgaattctgatgtgtgttagaatatgcatggtgttctgaattctgattagtgatggcagtaactgaatctcctgaaggctgaagcattcagggcgtgtccctgtccatctatttgggaatcctgacggtgccaatttgcagatgctgcatgctgtattgctgtgctgaatccagttagttgcttgagtattagttccaaaacttaagaacaaccgggcgaaggactgatggatttccaccttggaatcctaccaagtcctaactctgtaaattcacatcttggaaaagaagtggacagactctaatttcaccctgcaaattgacttctgacaaaaatattgattgaggtgacaattagctatgtctagtatggattgatcacaagaatgtgcttaattcctgcaatacattactggtactgttcattgtaaactaggtagaaatatgtgtatgattgagctctgaagagtgatgccagtaactgaatctcctgaagtattcagggggcgtccctgtctttcaatttgggattttggacggtgctagtttggagatgctacatgctatacgtggaatttagttagttagcatcctatccctccatcacaggaaatctgggattaaccgcacaagaatttaatccgggtcaggaatgacaagtatagtaagaaatttatgatagatacaacatgagaccaggatttatttcgggccgggaaccaatttactcatgataggcacaataagagatcaggaatcaattcactagttaagaggtataaaactttttgttgtacctagataatataagtaaattggttcccgacccggaataaatcccgatctcttattgtacctattataaatctcttgttatacctatcattcctggcccggaacgaatccttgtgtaaccgaacaagaacatagcatgatccccaatgctgcgcatcttagcaaacttgtgcttatcattatcaactaaataaggagtataacacataatttcttctgtaaatcctcagggctgcaggaa

SEQ ID NO: 8604 - DNA, 10637 bp, Oryza sativa
gcatatgtacctactggttctattggtcgtgtgactcagtgttggattccaaaatttcttatttctaaccccaacacagaggcctcgacatcttctcgttcgtaggtattttggcggcatactccccatgtgcattcaacgttgagatggcgattgctttttatggtaacatcaatttatttttggattgacatatttttggttctactctctcgattattagctttttatatgctagtgtttgaggtagtaatttttgttaatacaagtggatatatgtcgattcatgagaaccttggtgatatcattggcaattggatgtcttttttaaaatctttgatttcttcttgatttttctttggggagaattggaggttaatttgagggggagtttgtgctttttcatgcattcatgtttattttatgcatttgctctaattttgaaaataaataaaaataagaaaaataagagctttgttttatacctctagtatattcttgtgcatgctagcaaaataattgaggtctatttgttgctatgttagcttgtatgcattttagtctttatatgaagcttagatattgcttttaagtgagatgatgcatgacactaattcttttacttgaattaagaaaatatgcaatattaatgctagcatatggtttgatttttaaatgcttatatatagctttattgaattgttattcctcaaatagctttgtaattgctcattgtgaaaagagaataaaaaatacgaaaaaataaataccgaatccttggaagcagtcttgacgataaggacgtattcgatgtgagcaaaaataatgggtgccgaatccttggaaacagtcttgacgacaaggacgtacccggaataattgagagaaaaaaatatgagcaaaaaagtctcaaggaaagaaaaagttaaaaattctcttggttgttttgtactaaagctaatttgataaacagtaataaatgcaataggtatatatgtatagtgtttatttttcaacctatgtgcttgtgaatatattgcattataaatcatttgaagtcatgagtccttattgatgatttgagcttaattgtaatatctttgattcatgtttatactatgatgcatgcttgttaactagttgatgaatttatctcccttatcttgcaaaacatgatcattaattgcttttggtacatttcaaagctctcgaaaaaaatagaaaatggaaaataaaaatttgttattacaagtggcaagcatgacatcatttcatttgtgctttattgtcattatttctcttttgaattcttgatgaaatcattgtcaaagggggagaaatatacaaaatgcatgcttcttggaaaggggagaattgaactgaaactgtttcgatttacaaaatgcatgcttctcgaaaaggggagaattgaactgatgaactgtttcgatttttaaaaatagtcgattttgtgctttgattgcaaattgatgggagaaattctttcttttaaaaagggggagagtttttctttttctgctttgattgcaaattgatgggagaaattctttcttttaaaaagggggagagtttttctttttcacttttgtgatttttgtttttatttttcaaaaacacaaatttgcattttggagatgttgccaatgtattcatcaagggggagattgtgaaatcattgtcatgattaataattgtgatgaacaattggctatgcaaatgatttaatcaaagaattggtttgaaaagatgtgcgaatgttagtgtgagtgcgtgtgactaatgtgagtcaggttgtgatatctgtgcccagaaacggttgttttgtctgattgtgtgcaggtgacttgaggtcagccttagtcaatggtgaggaccgggactatgctcaagaggagcagaggtctattgcggtcgggataccatgtaagaaggtgactagagctagtattcttggaggtcaacttcggtcaacagtggggatcgggactaaactcagggaggagttgaggtccagacggtcgaggatatcgggtgacgaagttggatacgagatgtcacacggtggatggacaccgtgtgggagagatcttcgcaacaggcttcacgaggtgtgcgtgcaagtgctggtgttcgcgaaggagattggagtgagaaattgagaaaagggtatatggtgctacagtacacgtggtactgtagcatgcgtatggatggtatctatgcatgtatgttgatcatgcatgtgtggctcggtgcgttcttcatgcatgtgtgatggttcggtgggcttcggtggcagctggctggaggccgaaccggtccaggagcagcagcacgttggcccacgtgcgataggcccaagcaggagcaagcgcaggagatcgagtccgatgcggttgattgcggctgtgcgagttttgggaaattgtaaaaggtttggaaattgagggtttgagtcctactgtgaaaaggagttctacacctattttgagtagggggtttttcatgtataaatagagggggagcgtgaggcttcccggtatcgcttttttatcgcttttcagagcgtggagctgatagtttagttagggtttcgagtttagtcgagatttttgtaaggagtgttgttagtgcactttgtaaacacagagagaagcaataaagttgtcatctactttgagagttcttcgatttgtgtttcatcgggttcggcggttcgaccggcggcgtgcaagcggttcgactggcggcgtgcgagcggtccgaccggcggcggcgacaggactacgtcgagatttccatcgatttgagggtaacttttatttccgctaaaagtttttgggttttagttttctctaccattcacccccctctggtaggcttggtttcttgtgttcgatcctacactcttgagggaaaaaaattacatctccatttttattatggtcatctttattgtcaactgctaccttttgaggtcttttggcagttgaaagttgaaacaagaaaacatattactctaataaggtgcaagctagcaggagatctatgcaacaaatagtatctccaaaaccaagctattaaaatcttgcaatactagtaggaaataacatgatttttcagcaggacaactgcaacctaactatgcctttgttacaccatgccattggaaagtatgaaagacagaaagagcagattgttcagcgggactgtacctttgctgtggctgcggtgccattatccgtcaaaggaagggtataagcattgtgaggcgtcgagctctgcggagcagtttcattgggcctcagtgtgatcaatggcaatctgagaccattggagcctgaaactgcatatcctctgtcggaagaagagctgccggagatgtgagaggtaaccgaggcaagtaacaacaatgcattcagatttgggaatagcaactgatcgtcagctgcagcaatagcaaagaaatcatgcagttaggcacaagtaataacagaggcaagtttaaatagtgctgaacaagttggatataggcttgaactggtttcagaccatccattttaaggtgtcgtagaacagagacaagcagtattaacataccattcagctactactggttttccctatctacaatattcagatcatcatctccgaatttccacaacattcagataaaactatcatcaagaaacacaaaataccaaagtactgaacaatttacagtactgaaaactacaaaatccacattattgaacggacaaaagggacctgaaaaacataaacattgcccacaggaaactcagtcaatctagcaagcttggcaatgaaaaaatgccaggcaatctgcaattagtgaactatactagacttactgatgcagttttaacatttcaagaacttgtgcttcaggaaattcagtcactgtcatcacttgtcagaattcagtccctgtcatctacggaatcatcaataatctcaagttatgcagaccattcagaactacataaacaatgttcagagaattcagacacatgcatatcgagctagtctgcttaccttcactgttgggcctgacaaggacgatgtgcagggtctcccggctgcgaggcaggtcgatgagcagaggagttagccgcccatggatgccggcgcggacgcagagtgtaaactcgtcgtagcccagaatgcctgcgagcttctctctcaggagctggaccgacttcccggtgaacacgtcgatgttgccggcggcgcctgcgccggccgtcacgaactggatctgccgcctcagcgggggaaagcacgccgcgacgagattcttggtcaagttgcactgcacaaaatcaacaacagcagcacaacgaatttgataaaaaaaattcacagattgttacatggttcaagattaatctccgacccaatcaatcatcatcaagacttcttcaactagaaccagaacaatcctcttgttgtagaattgcataaaggacacaacacaaacacaagaattgaaggaagagaggggatcaggagagaggaggagtaggaggatctcacctcagtggcgatcgggagctcaggtctgacttgactcggggtgacacgcaccacctcccacctcagcgacgtttcgttgtcgacgtcgctgtggacggagacgccagggcggcgagccaggaaggtctggttgccgcgcaggtagcgcccggacttgtcgtgcagaaggacgacgcagccgcgggcaaggtccgggccggagcacccgacggcgcgccacatgatggcaccgacatccagcacgtcgcggtcgcgctgcgctgcctcgagcgagcagcagccctcgcgctcgcggtcgggggcgtcgggggacccgaggtagcggccgtaggctccgcggaggagcacataccgcgtgggaggcaccccggcgaccacctcctctacggcccacaccgcgttgtgcagcgagccgccgccgctgccgccgcgcaggttgccgtggtagacggaccgcccgttctcgtcggcgtggaggtaggagttgcagcaccacacccgcagcgccacgaactccactccctggaaaacctccatcgacggccgccgcgcgtggatggagtggtacgaggactccatgatctggtcggagagtcgaacgcgcggtggcgagacggtgcgtcgcgtcgcgtcgcgcggccgcgcggggaggaagaggatcgagcgatcgcgacggcgatggccgccgcacaagaggtggcggcgtgcgcgcggtggcgaggcgtggcgtggcgtggcgtggggaggaagacgagagaggcaactagccgtggaggaatttggtggtggtggatttgaaagcgtcgcgaggaggaggacggaggcgcacgtcgcggtctgacaggtgggccctctggtcaatggtcaacctcgtcaatgacgggtgggcccgtgggcaccgtggccacgtaaaacttgggggcgacctgcaaaattcatgcaaacgagtttctgaacctgttcagatcgctgctgcaatcaagatgaatctctccagtttcaaaagagtctgaactctgaagtcacactgtgtctgcatgctgcaatgtttcaaaaaaaaaattgaccaccatcatacaaatcgctcaagataaaacgcaatatactctctttaataatgtcaatctatcggtctgcatgtcaatagtgaactatcctagactcgctgagtcatgtgttcttcactttttgatgtaacaattggtttagggtagataatcaccgtaacaagtaaaagcagctactacctaactagattccacacttgacattaccaaacttcacgagattaagttactgtcatgacttcagaattcagaacatctgaccttaatcaatatttttgtcagaagtgaatttacagaatgaaattagaatctgtccagttattttcaaagaagtgaatttacagagttatgaaggttccatggactcagattcttaacttttggaactaacagattcagcataggacgcagcatctgcaaactggcaccgtcaaagttcctagatattttcgttaagcacactggacaggggcatgccattactcatcagaattcagaacgatggtcatatttctaactagtttagcatgaactgtaatacatattgcaggagagttaagcacacattcttgtcatcaatccgtactaggcatgaagactaattgtcaccaaaaccaatattttcgttaaaaaaccctgtttcacttttaccgggttttcgaagtatgtaaactgcgtaaaaacacccattgtacaccctgacaatttcagttttttcctgtcattctacaactgagagcaacataaaactgcatttccggcatcgactgaaaattctactctatgcctctaaaaccaacacactgatcttcgctcgatttccctgagcctgtcagaaattcagcatgaaaggattcactgaatcaatccctcctccgatgcctatatctcctacgtcacgatgcatccggatctgggaatgtcaaccgatgatccgctgcagtcatagcagagaaatatgcagttagacagtgcccaaacagtactactcctgcaagtaaaaaaaacagtgcaagcaattctgcaaatgaagatactactcggagttcccgtctttcgcactaagcactggacgatcattttcacaacaaattgaaactaccatccttcatatatgcaaaccatctgctgttgcatgataataatcagaacaaagtgaaattagcatccattctatatgcagataataagaactcgaaatggtttcagacaatccattttaggtgacagacccaccacaacaatagttctaggccagatcacacagtattaacataccatttagctactactaattcttcttatctacatattcagataaaatcctattcccaagaaagcatagtacaccaattgcatacaattttcttgtgacgcctgacttgcattccatcaacagaaaattcctcacatttgtcagcaagtaaaaacaattcctactgcaatgttcacttctgctgttctactacaatgttcttcagaaaactcctaactcagcaagtaaaaacatgactgcattttccacaaacagtgcactgagaactggaaaaatctacggtgctgagataaccaaaaggaccagaaaaggagatatatgccattcagaacaacataaactatgttcagaaaattcaggaacatgcatatcgaaatcgaagctaggctgcttaccttcgctgttgcgcctgagagcgacgatgtgcagggtctcccggctgtgaggcaggttgatgagcagcggggtgagccgcccatggcggccggcgcggacgcacatcgtgatggcgtagcccacacggttctcgagctcgtttctcaggagctgcaccgacctcccttggtactgaaacgaatcccagacgatgttgccgtcgccgtcgggcgccacgaactggatctcccgccgccgcggggggaagcatatcttgacgaagagctcagccaagtcggcctgcacaaaatcaagatagcacaaggaatttgatcaattcacggatgatctcccacccaatcagcataacagattgtagcagaacgaagaacgatgacgcaaacaagttgtagaatcgctagaagagaggggagaggatcggaggagctcacctcagtggcgatcgggagctccggcctgcctggactcgggaggacgggacgcacctcccaccgcaactccttctcgtcgtcgctgaggcggccatcgccgacggtgaggctggggcggccaccgcaaaccagggtactcatcagtttgccgcgcaggtagcggccggacttgtcgtgcaggcagacgacgtggccggtcctcctgacggcacgccacatgatggcgtcgaccaccggctggtcgaagtcgcgctggccgacgacgggggcgggacagcagcaggagagcggccagcggcgctcgacggcgtccggggcaccgaggtagcggccgtaggcgccgcggaggagcacgtactgcgtcgggggctccccggcgacggccaactgcaccgcccagatcgcctcgtgcgaggggcggcggcctgggtcgtagtggtagaccgacctcccgtcctcgtcggcggtgatgtacgtctcctcccacaagttccgcagccgcacgaactgcgcaccatggaaaacctgcatcgcggcccgccgcggatggtgcgccggtgatgcgcgcgcggcggcgagtggcttgctactcctcggcttctcggcgtggcgtggcgtggcgcggcgcggcgtggcgtggcgtggcgaggaaggcgagactgcgagagaggcgaggcggtggtgcatttgaaagcgtcgcgaggagaggagggagacgcaggccgctctctgacagatgggtcccctggtcaaatgtggtcaaccgtagtcagtgacggatgtgcccgtgcaaaatgttgaatttgctcaaacgagggagcgcagattcaggattgagtagactctgcaaaatttttaagaaaaaaacgagtttctgaacttgttctgatcgctgctgcaatcaaaacgactctgttcggtttcaaaaatgtatgaactctgaagtcacactgcctctgcattcagctgcagtgtttcaaagaaaaaaaatggtcaccaccatacaaatcgctcaagataaaacgcaatatagcaaacttggcccttaaaaaaaatgcatcaatctgttttgaaaggaggaagtaatcagtctgttgttcgcttctagagaactctcttgtcatatttttttttactttttgatctaaaatttggtctagggtagacaatcaccgactcaccgtaacaagaaatgtagcatctccaaacttcaggagattcagttactgtcatgactcttcagaattcaaaacatttggcattactaactgtcaacttaatcaatatttttgtcatgactgaatttacagagtgaaattagaatctgtccagttcttttcaaagaagtgaatttacagagttattaggaagattccatggatgatcgatccatcagtccttcagccggttgttcttaacttttggaactaatagttggtttagggtaatcacaggaacaggtaaagaactactctactagattctgcatagcaaagcagcatctgcaaaccggcaccgtgaaagttcccaaatagatggagagggacacgctattactcatcagaattcagaacgacgtgcataattctacctagtttagcatgaactgtaatacatgttgcaggagttaagcgaacattcttgtcataaatccatactaggcatcatgactaaattgtcaccaaaaccaatattttcgtcagaaaaccctgtttcacttataccgggttttcgaagcatgtaaactgtgtaaaaacacccattgcacaccctgacaatttcagtttttttctgtcattctacagctgagagcaacataaaactgcatttccggcatcgactgaaaattctactctatgcctctaaaaccaacacactgatcttccctcgatttccctgagcctgtcagaaattcagcacgaaaggattcactgaattatggccctcctccgatgcctatatctccgacgtgatgatgctttgggatctgggaatgtcaactgattatccgctgcagccatagcagagaaatatgcagttagacagtgcccaagcagtactactcttgaaagtaataaacagtgcaagcaattatgcaaactaagaacttgaacaggtttcagacttgaaaccccacaattaaggtactacgaggatgccgaatctcacactaaacactgatttgacaataatcaaaacaaattgaaattagcatccattctatatgcagataataagaacttgaaatggtttcagacaatctattttaaatgacagacccaccacaacaatattaccataccattctgatactaccaattgatgttatccacaatattgagataaaatcctatcaattgcaaacaattttcttgtgatgcctgactagcattccatcaacagaaaattcctcacatttgtcagcaagtaaaaacaattcctactgcaatgttcacttctgccgttctactacaatgttgttcagacaagtcctaactcaacaagtaaaaacatgactgaattttccacaaattccacaaaacttactgaaaactggaaagatctacagtgttgaactaacaaaaaggacaagaaaaagatatgcatgccattcagaaacatcgcccacagcattgccaacaatttcagaacagcataaactatgttcagaaaaattcagaagcatgcatgcatatcgagatcgaaccttcgctgttgcgcctgagaacgacgatgtgcagggtctcccggctgtgaggcaggttgatgagcagagggctgtgctgcccatggcggccggcgcggacgcacaccgtgatggcgtagcccacacggtcctcgagctcgtttctcaggagctgcaccgacctcccctcgtactgaaacgaa

SEQ ID NO: 8605 - DNA, 15877 bp, Oryza sativa
  unsure (1)..(15877): unsure at all n locations
ttcctgcagcccttgactaaagttaaaacatcttataatctgaaacatcttataatctgaaacggatagagtagataacaaaccctgactatctttgtaattttctacatttaccttttataatttgctacatttatgctcattggcacgatgtatatatatgtcgagtaaacgatgtgtagcttggtctgatattggtatgatgagattcagtggtatacaaggatgaaaaagaattgcaatcttcggggtgttgctcttcgctagagtttaacgattgtggattcatggcaacatatgaactgccaaacacatgagaagattttacaaattagctctgagcttggctcgttgttctttttacttcatgtcatctagcagcacaaactttatatatatatactccctctatcccaaaatgtttgacgcttttgacttttttaaatatgtttgaccgttcatcttatttaaaaaatttaagtaattattaatttttttcctatcagttaatttattgttaaatatacttttatgtatatatatagttttacatatttcacaaaagtttttaataagacgaacggtcaaacatgtttaaaaacgtcaacggcgtcaaacgtttagggaaggaggtagtatatatatatacgggttacaaaagaggtgatcatgagcaagcaaacagcacaaacgcatctccgctgtttgctacttcttcatctagccgcccgctgccaccggccgcaccctccgcccgccactagccactccacccgcatcgcgccgcctgtctcgtgagagaggagaggtgagagagtggagaggaaatacgaggagagaaggtgagagagagatgagtaggtaaggatgaaaaatttgacagtgttgagagggaaatgagtaggtaactcagactttaggcggatccttaagaggcccaaagatgagtggataaggatgaaaattttttaagtgttgagagggaaatgagcaggtaactcagactttaggcggatccttaagaggcacatctatgaaaatatattttcgtgtgtagtcctctaaaaggtctgcctacaaaaataggcttattttgcgtgtggacccttaagaggcccatatgtgaatcgatttttgcgtgcggtcctcttaaggagctgtacacgaaaatagaggatgatttttgcatacgcgaccggttacggtctgtctgcaatctaaagaaggtctccgttgcaatctaaagagggtctccgtttaaaaaaaatatttatgtagtagtggttggtatgagctaactagaaagtttgcttagctgcaattagtagtagacgagtttaattcaggagatgttcagttgtactgctaacatttgggtgataaatctgaatcacgtaattattgagccgtatgtcatgaactgatgaacatgatgagcacgttggattaattttttttaataatggagcacgttggattaattctgaatatgttttgttttatctatggggttctctgaactacttgttccctgcttgattgagaaatgagaatggtaaagtctactcaacttagcttctctgaaatatcagtgttagtatggggccgttttaaattgggatttacttagattctagcagaaatttcagaatgtgtgctttacggaaataaaatatgagaagcagctctaaagcctgtttggattttattttcagattactgaatcaattcaaatatgcaacagtatgaattttgagctttcgaacttcttggctctacattttgaccttgtactagtatcaactgtggggtggggtctataggcctgtttagttcgcgaaaagaaaatttttgagtgtcacatcggatgtttgaccggatgtcagaaggagtcttcgtacacgaatgaaaaaactaattaatttcataactcgcttggaaaccgcgagacaaatcttttgagtctaattaatccgtcattagcacatgtgggttattgtagcacttatggctaatcatggactaattaggctcaaaagattcgtctcgcgatttcccccctaattgtgtatatttaattctccatatatgtgtttaaagatttgatgtgatgtttttgaaaaaaaatttagcgaactaaaccagcctaggtgtgcttggcactgtacatgtctgccgtagaagtttgctcagcttgcaattagtacatctaggccctgtttaggttctaatttttttcttcaaattttcaattttttcatcacatctaacttttctacgcatagaaactttcaactttttaattatatcgttctaatttttttaaacttctaatttcgacgtggaactaaacacgggaattccgtagctaaaggcacgagatgcgctagtttaatgttggcgtgatctagacaggaggtggccagttcggccaaggctgcgacggcgccgccacgtcatcttcgccggagaccctttccatctgacctctccatccgtaataagtatcaagttcatgcatatattgcatatatacatgatgacatcaatcatggagaccacatccacaaccgttatagtaacacttagctaaaaacacttacaagttgatcaaacaaccaaaacttaaattacaagctcttctgttctgtctatggggaggacaggtggccaggcaggggctcccaatgcttgcaagctagctcctaatttcatcttatgagttaattcctacgcttatgtgcgataaatccactggcatatactaagaacagaaaattagcaaggaaacgcatcctccattgtatcgtaaattcttcatcagtactgcaaagcacaaaaagagaaagagagagaaatgttatgagactgcaaaatttgtacttgagcaacataatgaacacacaatcaacatagaaaaaaacaagtagagcgcatgggctctagtatatgatttacttactttggctctggagtccttggatgccaagattgacgaaacgaatggctgtccttgatgatggaactggatgaaaaaggtatcttagccccattaagagaattcacaaatggtgtactcgtgtggttggttttagccaaggccatgccagttcttgctacctgcataataaagatgaaaaccacaagttaaataagcaaggaaaactggccagtcacatatgacatgtcgggacatgcattggtaatcaacatgatgttgaattgccacttgtaaaattcgggacatttaactttttaccacttttaagatgtaacaattaaggatttgccactcgaagacttaaagtctataacatgtgcatcattatgtgtctaaggtatgtgggttcagtggtaaatctttaattaccacacctgtactagtggtcaatagttaattattccgatgatcaaatattactagggtttaatctgtttgtcgtactgccatcataaagcctaagaaatttcatgaactactacagtatatactacttaccgatgatctgcacagcagcggcgtgaatttcttggacaggatgcggatgccggacgcggcggccatctcagcagtcgatccgatcaaaaaaaggattggattttgaagagtattgttcttgaacgaatcannnnnnnnnnnnnnnnnnnnatataaagaagggctcaattccgaatccgaacaatatttggaagcgaaaaaaaaaggaaaaaactactagtgtataattaattaggtttcaattattgtaaactcaaaaaataaatttatttatatatttaaatttaaagaaaattaaaagaacgagacgaaactcaagttttgttggagccttggaggcccaaacacgaagaccggcctcggcccaattcggactctcccccatctcggcggcggcggcgatggcgtccaccggcgtcaagctcatcggcgagtgctctactctctctctctctctctctctctcgctcgcggctctcatgctcctacctggactgacccggccttcttctactcctcctctcatcttcttctccatctccggcgccaccgcgacgagcagacatcgccgtcaacttcaccggtacccacctcctcctcctcctcccgactcttatctcgtttttcgcgtttcactgcctggctctcacgctttctactcgcgtcttggcgtcttgctcttgctgctgcgaacgaactgaagatggcatgttcaggggcatctaccacggcaagcagtgccacgccgccgacatccccgccgtgatcgcccgcgcgtgggcggccggcgtcgaccgcatcatcgtacgctgctttgctgccggccattccccctttcgcttctttcttgctttgtttctactttcttttggctcagctttggtgtgcttaatctcttgctttctttggtttggtccgggcggaaggtcaccggaggctcgctgaaggaatctagagaagtgctcgagatcgccgagactgacggtgagctcagctgcttggatgcgggttgttttgactatgttatgcttggtgccttcaaggtgtttgttgtaatgtgcccgagaagctgtgatgtgcttggacgatgcagggaggctgttctgcacggtgggcgtgcacccgacgagatgtggggtaggggtggattgtgtatcattcctgtttcattgctggcatctgagattggcacatgcctttcgcgattggtttatgtaattagtgctttgttgaatgctaggagtttgaggagagtggagatccggaagggcatttccaggcgctgctggctctggcgaaggaaggaatcgcgaaaggcaaggtgtgtgtatcacttgtcctgtaggtctattgtgtagtgaaatgtttcttttaatttcacccggggatcccctcctgagtcctgaatatataatatatttggcatgtcatttttgaatgaccatgcaaatagttagaggacatatagggcggcagaaagtacctgtttccatatagaaattacatgtcaaccattgggctttagtctcactgcccaaaggttgatatgttaaatgcattgtcgtagcagtcttgttcttgagggaggtaagctattgaagatcacccattgcggtgtttctagattctccagaagaatagtaagaagaaagtgctgaaatgctgccgtggtagtgcttgatctgcttgtagacttcccaagttgtgtcctatagtgaaatgttattgcaatcttgccatatattttgcttgaaaataattgggctcactgaattttgtttgatctgcttgtagacttcccaagttgtgtcctataatgaaatgttattgcaatcttgccatatattttgcttgaaaataattgggctcactaaattttgtctgtagttcttatcctatcttcctatatagttggtacccactaaggagcatttactcctataaagcaagacatgcaagaagccacatcatcaataattctaagccatcggatcacattagtacatagttatcagctgttggatcaagaagctactcatccatctaatttaatcattgattactcatccggtcatctccctttagatcataatcacacgtgacattgttatccattcttcacataatactatgttttctcctcccaagtcctccaagataatggaaacttatctcctttatttaatacaactcaaattattgtataacatgtgagttttgtttttgttataaacaattggataacatagaataattaggcatcattaacccaaacctattgttgaaacaagcttgagataaaagcaaagaggttcaaactaccctaattatgacgatatccagattgtgcaagaaaataacttccgtatatcataacaatacacaatgatgttttaaagaaaaataaaacatgaattgtttgcatattttcaagcctgagaaccatatttctctatctcagattccctggtggtgttacacactccttcactggaactgcagaggaccgtgataagcttctttcctttgaagatgtttataggtcatctccctccctccccttgatgttacatatttgcacgtggtgcaccttgataattatagaacttaagagtaccacaacacttctatttgtagtcaaagttcatttcaatttctgctgcaagttcgttcttttttggtgaagatctccatttgggcaattagatgtgaataaaaatattagtagcaattaaaacgttttcattccattataattcagttatgtcaggtaaactctaataaggttattgttcagtaagcatttgactggcctgcaatgcatgaacacctgaagttattatttgcttttcatgctccttttacttggttcttttcctgaggaaacacagtagaagtaatgctcatcattctgagaacattaaactattttgttattaccacatgcttgttgaaatgtcttacttgactaataaaatactgaccattggcagttcaatatgatgttttgcagatatttatttggttagcattttccatcgatgcagaatcatttgcccagattttaagctaaatcaatttaaattcttatcataatcaatcatgaatctttcgatggaacggaaattgatttcatcaaccttttcttttgtttatactttacacttgcacctaactttttccgccaagaaaattgataactgaagatacatcaatcccaggcaagttcttgaggttgtagctggatgcaaaggaatttctgacattgaaggcttaagtaaaactctgtaccacaacacgtgcaggtaagctgtccgtgcgtcatgccgaaactttttgctgtctggtccaagtactcatctaatgcagtcaatttctctaaatttcacgagtaattttgcccttgatgctacagctctgcacgtctccaatttccatcagatcatgttattgagctcaatctttcatttctctgccttgcaggttcttcttccctcaggacctggatgcttctgctgatgcacagcttgagagtggtgcggctattcaaaatagctgatgggacatgacagagcgtttgctacttaacagtttgctacctttttttgcttggttaaagattttgtactttgacaattgccaaattggcatgctatgagagtgtcgttcatgttctacaaatgttaataaggaagtgaatctccactatatctactataactgtcaaattggattactcaagtatagttatattctagaagtaatggttttctaaaagtagacaaattgaagaaaagtacagaaacgaagtatcaccccaatttattcaagtaataggtacgccttagtgaatccaatattttacttcatattacacagagaacatattaactgaataaatataggaagcaaaacagttgcactttagatttctgcacaatatattacagcaataactgaaactcggagcacctctatgtctaataatattctattgactatggctcatatcccattttagcatctcttgtgtcaaaattttcaattggacaagtacaatttagattggaatggcagaataagtaaatcagagcaccacagcttatagctgtctaatttgtaacaattaattagatactaataactggcagctgtctgcaagttgctctcttccgttgctctcattgtcattgtctaatttttcttcaatctctgtgaatttgacaaaaaaaaaattcatagattgttacatggttaaagattaatctccgacccaatcaatcatcatcaagacttcttcaactagaaccagaagaatcctcttgttgtataattgcataaaggacacaacacaaacacaagaattgcaggaagagaccctctgattgtgatgcttggcttttgggctcggatagcgctagttccaatcacaaccttagccgaggaggggatcaggagagatgaggggtaggaggatctcacctcagtggcgatcgggagctcaggcctgccttgactcggggtgacacgcaccacctcccacctcagcgtcgtttcgttgtcgacgtcgccgtcgacggagacgccagggcggcgagccaggaaggtctggttgccgcacaggtagcgcccggacttgtcgtgcagaaggacgacgcagccgccggcaatgtccgggccgcgcgccacatgatgacaccgacctgatccagcacgtcgcggtcgcgctgtgctgcctcgagcgagcagcagcggtcgcgctcgcggtcggggccttgggggagtcgggggacccgaggtagcggccgtaggcgccgcggaggagcacgtaccgcgtggggtgccccccggcgaccacctcctctacggcccacaccgcgttgtgcagcgaggcgccgcccccgccgcgcaggttgccgtggtagacggaccgcccgttctcgtcggcgtggaggtacgaattgcagccatcgacggccgccgcgcgcggatggagtagtacgaggactccatgatctggtcggagcgacgaacgcgcggtggcgagacgtcgcgtcgcgtcgcgcggggaggaagagatcgagcgatcgcgcgcgacggcgatggccgccgcacagggggtggcagcgtgcgcgcggtggcgaggcgtggcgtggcgtggggaggaagacgagagaggaaactagggagtagccgtggaggaatttggtggcggtggatttgaaggcgtcgcgaggagaaggacggagacgcgcgtcgcggtctgacaggtgggcctctggtcaatggtcaacctcttcaatgacgggtgggcccgtgggcaccgtggccacgtaaacttgggggcgacctgcaaaattcatgcaaacgagtttctgaacctgttcagatcgctgctgcaatcaagatgaatctctccagtttcaaaagagtctgaactctgaagtcacactgtgtctgcatgctgcaatgtttcaaaaaaaaaaataaaattgaccaccatcatacaaatcgctcaagataaaacgcaatatactctctttaataatgtcaagctatcggtctgcatgtcaatagtgaggattcggattcggattcggtgactttgcgtgcatctcggccgtccaaaacgaatccgaacggctgctttacttgggcaaaacaattgccgtttcagcctaacaggaggccacacggcctgagacgtgagtggggaggcaccagtgccgccgccgcgaccggagaggcgctaggccgccctgccctgccgccgcgaccgggggcgcgtggaggcggctggccggcaggactgatggcgcgctgatgcaggcgggcggggccccagcccgagcccggcgcgtggaggaggccgcggtgctcctgccggccgttgggaacacactccgcccgcgccgcacctccaatttcggcagcctcgactcgttgatggagttcagcgtccaagcccgcaccggtcgaccgcccacgtcgtcgccggcgaggggggacgccgtcgcacggcttcgtccagtggagaacgctgcaccgtttcctgcgcccgcgaggtgtttgtggaaatgcccccgaggctgtatggttctgtattgtgaaatgcccctgcccctgctctgtggttctgtattgtgtggttctgtgttgtggaaatgccccagtcctgccctgctgcctgggatgatgcagactcctaattggaagtgaattgttattgtttggcattgtgagtttttgcaaattgattctgtaatcttgatttttgtcataaaaaaaaggtgaaacatgattcagcagttctgatctgctgaacagggatatatgagaacctggttgcaaatgtctaatttggtatatgagtgagcatttcagtaactgcagaactgcagattgtatgacctcagaacactgcataataatgtggcaagtttttacttataataggagtatgtgagctcattaatttcagctgaaattgaaataagtataattggagtatgtggcaagttttatgtccattagcaaatatcttattcttcaatttttccactgaataagtgggaaatgaaagcagtttagttacttgaatcaatagaaaggaaatgaaaatggtggcagtgacatgtgcctattgaaattaactatagattgaaggaacattcatgttctgaatcttccaaatcagtgaaaggaatgtgggggcgccagtccatcgtagagcattgtaaattttgtgaaagaacaaatcagaagaattgtttctgaacctgttcagatcgctactgcaatcaagatgaatctctccagtttcaaaagagtctgaactctgaagtcacactgtgtctgcatgctgcaatgtttcaaaaaaaaaaaaaagaccaccatcatacaaatcgctcaagataaaatgcaatattgtcaagctatcggtctgcatgtcaatagtgaactatcctagactcgctgagtcatgtgttcttcaccttttgatctaacaattggtttagggtagataatcaccgtaacaagtaaaagcagctactacctaactagattccacatccgacattactaaacttcaagatattcagttactgtcgtgacagaattcagaacatctgacaatactaagtgtcactttatcaatattcctgtcagaagtgaatttacaaagtgaaattagaatccgtccagttcttttcaaagttcctagatattttcgttaagcacactggacaggggcatgccattactcatcagaattcagaacgatggtcatatttctacctagtttagcaagaactgtaatacatattgcaggagagttaagcacacattcttgtcatcaatccatactaggcatgaagactaattgtcaccaaaaccaatattttcgtcaaaaaaccctgtttcacttttaccgggttttcgaagtacgtaaaccatgtaaaaaacacccattgtacaccctgagaatttcagttgtttttctgtcattctacagctgagagcaacataaaactgcatttccggcatggactgaaagttttactctatgcctctaaaaccaacacactgatcttccctcgatttccctgagcctgtcagaaattcagcatgaaaggattcactgaatcaatccctcctccgatgcctatatctcctacgtcacgatgcatccggatctgggaatgtcaaccgatgatccgctgcagccatagcagagaaatatgcagttagacagtgcccaaacagtactactcttgcaagtaaaaaaacaatgcaagcaattctgcaaattaagatactactcggagttcccgactttcgcgctaagcactgggcgatcattttcataacaaattgaaactaccatccttcatatatgcagataataaagacctgcacaggtttcagaacatatgctgttgcaaggaaactctgcaaattaagatatactaggatgccgaatttcacactgaacactggtatgataataatcagaaaaaatagaaattagcacccattctatatgcagataataagaactcgaaatggtttcagacaatccattttaggtgacagacccaccacaacaatagtcctaggccagatcacacaatattaacataccatttagctactactactagttcttcttatctacatattcagataaaatcctattcccaagaaaacataatacaccaattgcatacaattttcttgtgatgcctgacttgcattccatcaacagaaagttcctcacatttgttagcaagtaaaaacaattcctactacaatgttctcttctgctgttctactacaatgttcttcagaaaactcctaactcagcaagtaaaaacatgactgcatttgtcccttccacaaacagtgcactgagaactggaaaaatcgacggtgctgagataaccaaaaggaccagaaaaggagatagtacatggcattcaggatccgcgaatgtaaactcattaaggacaatgatagcacaaactaattatcaatgatagtttgtaatttgtaatttttactacaaactaatcttctctgtaattaaaatgatagcacaacgatgacgcaaacaagttgtaaaaacaaatgtaattacaagttgtgaaatacctattgtattgtttgtgtgattagtgtcccgccgtacgtcgccggctgcggccagctaggtgcgcggccggaatatggcttctgctgcggtgatgactcccacgaagacggcaaacgcgtagagactccatatcggcgggggagacgcctccgtcggtgggcgtgtcggtgatgaaggacgagacgtcgtcgggggcgcgggcggcgtactgggaatgggagtcgccgccgtcgacggtggtggagtcctgaccgctgatgtggaagtcgtcggaggcgcaggcgtcatcgtgttcggtggcgcgggctggagggtgggtgtcgccgccgtgggtaggagagcctgtgccgtggatgggggcgatgtcgtcgccggcgtcgcggtcggtggcgcgggaggcagatacatccatcgatcagatgcatccatgtcgtagtactcgtcgcaactgaggaccgggccgaggcgtggctcgctccagtggttggcggacaccgccgtcaagcccgccgagcgctcccaaacaatgagacgagctccggtctgctcctccagaacgcgggaaaccacctccaacctctcctctcgaatccgccgaaactccggcgaggagtccacgtcaagatgatctagaacccgaagaatctgcgtcccctgattcttgatgttgacctccagtgcatcccaccaagtgaacgcggcgcgtcgggcagccatggacagggggtgagtagcgtggtggagcggagcggaatggaatcgagcgctaggctgtgggagctcgaggcgagccgcgagcgaatggagaagaagaagagaggcagcgctctcctcctgtgttctttttatattgactacggttgacctgngacccacctgtcagagagcaacctgcgtcttctcgcgacgccttcaaatgccaccgcctccctcggctaacaaactcttccacggctacttgcctctctcgtcttcctccccacgccacgccaccgaggagtagccactcgccgccgcgcgcgccacgcctcgcggcgctcgccatggcgtcgagacgtgggacgtcgcgcgggcatcgggtggggatggaggttttcgacgatgtggcgttcgcgcggctgcggagccatatgtacggctcgtacctccacgccgacgaggacgggaggtccgtctaccacggcagcctccgcggcggcgcctcgcagcacaacgcggtgtgggccgtggaggagttcctcgtcgagggggaggacgaggaggtcgaggaggaggcccccgtgcggtacctgctcctccgcagcgcctacggccggtacctcggcgccaccgacgcggcccccttcgaggccgcccgcaacgccgccgcccgcgacgccgccgccaactctgacgtccgccaaccacacgcccgcgagggttgctgcggctgctgctgctgctgccgactccccttcggcttggtggaggccacgcagcgcgaccgtgatgaggaggagccggcggtcgacgccatcatgtggctggcaaccaggtgcggcagcgaagacgtacaagaggatcgcgatgcccgcggcgtcgtccttctgcgcgacaggtccgggcgctacctgcgctgcaacaagagcatcctggcttgccgccgcagcatctcagtcgacgccaacttcgaggacgaagatacgttgctgtgggaggtggtgcgcgtccccccgagtggagacatgccggagctcccgatcgccactcaggtgagctcctccgatccttttcccctctcttcttgcgattccttttttttttttttgttttgtgtcttgatgctgatttcgtcggagattaatcttgatttcttgcaagaactaaccgtgtagtacaatatgtggattgatcgaatttcctactgctaccattgttgattttgtgcagcccgggttcttcgtcagggcgtgcttccccccgccgctgcgggagatccagttcgtggacgaagccgacctcgacaacatcagcgagggagaaaactgggctacggttgagatcagagggaggtcggtgaggctcctgagagagaagatcgcgaagcatgtgggctacgacgacttcacgatgtgcgtcagcgccggccgccatgggcagttcacccctctgctcatcgaccttcctcgccaccgggagaccctgcagatcgtccttgtcaggcccaacaccgaatgtaagcagcctatgttcaatatgaatgttgctgaattttctgaacaatgtttatgtggttctgaattttgctgtgaaagctagtaacggatggcatggagtgggcagtgtctctgtttttctgattctgttatgtcagttcagcactgtagattttccagttttcagtaatttgtgcctgttgtggaatttgatgaaaatgcatattgctggattttctatgatcaacttgtttcacaatgatcatatctgtagttttcagtcatgaaagttcaagcctgcattgtctattcaacttgtttcacaatgatcatatccagcaacatgcatattttccagttttcagtaatttgtgcctgtaggattcatctgaatgttgtagattttttagtgtgaaattcagcatccgagtagcattttaacatgtgaattactagcactgtttttacttgcaatagctgtaattcttgtgtattactctttctaactgcgtgatttgtttggtatggctgcagcatatgatcagttgatattcccgaatccgaatgcattgccgtcagcagaggccacagatgaagacgatcccacgattgagtgaatccttttgtgctgaagttctgacaggctcagggaactcgacagaagattagtgtgttggtatagggtggaattttcagttcagccgatgctgcaatgcagttttatgtttgctatcagctgtagaatggctgaaaactctgaaattttcagtgtgttcaatgggtgtttttcgacggtttcacatactttggaaacaggttaaacaggaccttctaaggaaagtattggttttggtgacaattagtattcatgcctagtatggattgacgccaaaaatgtgcttattcctgaagtatattagtgttcatgctaaacttggtagaaatatgcatgatgtgtctgaattctgatgaatgaacacagtaactgaatgtctgaatctcctgaggcattcaggcttgcccctgcctatctatttgagaattttgatgggttccagtttgctgatgctacatgctatctactatctagttagttagtagttctgtctatacttagctgggtggaccataaaccaattgttagatcaaaaagtaaagtacagaggagagttcttgaaaacataaaactactccaatgctattttctgaagccctaaaacattcaggggttgtccctgtccttctaagagtagtatttgggaattttttttgaaggttagtatttaggaattttgacggtgccggtttgcaaatgctacatcctacatgctaactcctaactctgtgagttcacctatttgacagaactggacagccatattcctgttgtttgcagcaggaactagaacaagttcagaactcgctttttgcatgaattttgtagagacacagtggaattttcagtttagccgatgctgtacaactttatgtttactgtcagctgtagaatggctgaaaaatcctgaa

SEQ ID NO: 8606 - DNA, 13242 bp, Oryza sativa
cattttcaaaaatatgtgggtgatttgttacaaaagaatgtttcaattcactacaacattagatctataaatagtgaaacattatgaatacactaggtgaaatattttttgtggaacaaaaaatgaaacgaattcccttaatagagggtttctaaaatatatgggtgatttgttgcaaaagaatgtttcaattcactacaaacattagatctatacatagtgaaacatttttttgtgaagacacgtggcaggtgggggcagagaccatggtggggcccaggcgtcacgtgtcacgcgcgtgggggggggagcgctcgattttttctccccccaccggtccaccgatcgctggcattctcccttttaaaacctctcatcgcaaggaacggaacggaacgggctcgcaccgcacgcacgcacgctcgctcgatcgtcgatgggaaacgagtgatgcgtgaggaaggggcgtcgcaccaacggaaacggaaaagaagggggcctaaatttactggaggcagaggcaatagaagaaggatggtagcggatatgagtggttaaaattaggatcccagaggattgtgggaggcaacttagaatcggtcgcccgatggggagggggaaaaatcgagcgctgatattagcatgacgcatgcgtgcaaaaacacttttaactatttttttctcttaaattatttatccaaatcatgatccgattacaccattaaattcattgcaattaaatcttcaaaacaagactacacatggatatattccgacgaattttttagcttattattgaattatttttaaatgttgcacgatgttccaccaagtatatcggaattgtttcactaagtagatcgaaaatgtttcaatcgtttaaatcgggcgttgtttcaccttatataaaaacaatgtttcagcaaatagagaaataatgtttcagttcactgcaacattagatctctctacatagtgaaacattgtaagtgcactaggtgaaatatttttggtggaaaaaaatgaaatgtattcccttagtatagggtttctaaaatatgtgggtgatttgttgcaaaagaatattttggttcactgtaacattagatctatacatagtgaaacattatgagtgcactagatgaaacattttttatagaataaaaaataaaacgaattcccttaatatagagtttccaaaatatgtgggtgatttgttgcaacggcgtatatgctaaggtgaggcggcgtgtgagctggaggcgacggcatgcgagtgaggcgcgggcgcccgaggcggccgattttttctactggtgtcgggcgcccatatattcttaaatttgtagtttcgtgataatttttatcaaagtatgtgtagatttgcaaaatttactcaatatattaattccttgttgatgcataagttagtactcttttaactttttgagagaagagatttcaaccctacttgttcttggtagttttggtacttaaattgtactggtaatttttcaagcatttactcttttttttatgttggtcttcgtgtccgtaaccaacagagaaactttcttggatgtaactttgtcatatttttatataaaattctcacggacattaacctgaaagtacacctacttaatagaattataacacgataatgttaggaacagaaacagccggcttcaaaatagatgacttcaaaatatttatatgagcgtcaatattttgctttctgtactaaacttatgcaaaaataaaattgaactaaacaacttttctaaggaggaaggtagggaccacataaacttatttacaaaaatatactactccacgtttatatctcattaacttcacagaaatgagataaaaggaaagatgtaagcagatactctgttttaagcaaatacgacgataaaagggatttttcagttttttgcaatacgacgatcaaattagaacggtgggagtagatttgaatacgtcatacaatgttaattaagctctttgcttaaaagcaccacaaatcctgaagcaataatccaagcggagcgatgcttttggaattcatttaacttttgaattaataggatgagtccaaaaagaatttgcaaaagaaaccaggaaaaatagctgatctgaactgcattttacagcacggaaaaaactgcgttttcaccttcatcgctcgttcttcctctgcaatgttcagtcactatttgacaatggatacatgcatcacggaaagaacaaacattacactaacttggttgcacccacgtgaattcatcaattcaaacaaaacgaactcaaaaactgttcagagcgaaacgaacatttccctcaaaattttcagcactactcacgcatcaccatcttcctcgccctccccttcggcacgacgagcatcatcatcgccttctctctcttggccctccggtgatcaacgatgacatgcggcggcacgaagacatgactgccaacgaagaagcttccgccaccggcgccggcgagggtctggccgaatttgctgaatcccgccggtgctctcgcgcctttcgcaccggcagagctgaccttccgggcggggatgtcgataggggaagaagctttctgccggttgccatgctgcttcacggagcggtgctcgtcgtcgtcctcgtcggcgtcgacgagagagtagtacatctggggaaaatccaggtcttgtgctgcatctggccataggatatctgcctcttggaattcctctttgtccagctgctgctgctcaatgcgtagcatcttcttgcttggggtgtaactagaattaggagaggataagcacgtattaagtagtactagtaatatgtacacacagctcgagtgagtgagcgaccagtcatatattttgcgtgtcgtgatttaataatagttggggagggctagaagttattactgcccaagtgcccatagatatcttggctgtctgaatgcgtcattcctgaactacatcatgcgagtcacagttactgaatcagcagcaagtcagcaacgtgtacacgtacgcgggtacaaattaccccgtaattaaccacaacttgcattatattttttgacaatcattcgttagtctcatcgatacgtttgcagccatcaacagacatatatatattcacctcacatttcgaaccaattttacaaaatgtcatcgaggaaaatgtctcgcagatatgacataataaaccaactaattaatctggtcgcgtgaccatttcggccaggccaagtctcgcgcgcgcgcgcatggccgcccgccgcccgcgcggcgcgctagctctcgatgaagccggtcatgcggaggacggagtcgcgcacgcggcggaggtcccggcccttgagcgtccgcccctgccccgagcacatcgagaacgccgccctgcgccgcgccagcagcacgtgcggcggcaccacctcgccgccgcagccgctgccgctgccgccgtagtcaccctccccgtactccgtgtcctcccgcctcgccgtcgccgcgcccgagggcgccgggatctcgatcgggtccgtgaacggacgccgctcctccgcccaagacgcggcggcgcatttcgccgacacggccacgctccgctgcgacgccgccatatcgctcgccgatcgatcactccgcggttacaagcagctagtatcagcgctatgagcaggagcggaaacagatgcgacaaactatcgcacgcgcgcctgtcgaaatctctagccaacctttcgccgcagctggtgcggcgaggcgagagatttataggagacggcgcgagagcgagctggcgcggcgagcggggcaaccaagctatcctgcccataggcgccctaggtaggcaggtgccgtgtggagctgcaccgctttgtgtgacagagaagtatgcggctttgagctttgacggggaagggaaggaataattccattgatcaggctggagagattaacccctaactcagcttagatcaaatgcctttgcgctaattcatcgccaactaatgcgaatcattttgctttctgaaccaaaaactattgcaaaaagtagccgattggcattggctttcggtacggttcaggttcagacgctcttagttttttatcgcttcgtcgcctctattgtttggttgcataacggcgcaagtttactgaaccgcgcgtgctaccaaggtgcttaattaattgaaagataaatcaataatctcgtgtgccttgttgagatcccatgtgtttgtcgtaacgcaaagaaagccagtacactcctgctcccgcgatgttagctgatgattggtttagtgatctgatccgaagtgtttgatttcgtgattacaccgtattcccacgtgtatatatatgcatctgcgctgcatatgcacgttatgatgatgcacactgatgcagacgcctcgagagaaggatttgcacgcgcggcactgcgtggtgcgtgcacaactacacactcccatattggcccccccaaagaaaatgtcatgtgttgcactcaaccgccaaaactgtgacctaactggtattctttagatgcgcggattggttagaggaagctaggtatcccttgtttggaaaattgcacatggctataagcctattcgatgtctggcacgagtgtactgtgcacggttttcatgccaaagttcacttcaccgaccgaaatgagagcttttgctagcgtggtgctttcagtctttcagctatggcctagggtcgatcgatatgtatagcttataactgacaaagggaccggtattgaaagggaaaaaaaatctacagctgaaatcgtctcatctccattattaatgtgttaaactctccttagaataagggaggcaaaattgtttatttactatttatatgcaacctaataaaatgatttcagtggcgtgtcatacggacgtacaacgacagttaattatgagtaaccaagcaacaggcgccagctgcaggtcagataggttgcataacacagctagatctataactgctacttgtagcatgccaaacacgcaactttctaatgagcagtttgattatgacaagaaccatcaaccatacagttcacactcgcctgcccataacgaacttaacgtacataaacgggtttaagttagggatgggagctaaacacgtcgatgtctcagactgaaaagcaaaagcaaaagtgttgtgtcacgttgcttgactcgatgggccggtgtcgagatttttaagcttctgcacgtacgttaataggcttatccgtcagggcatacgtgcatccatagatcgacacacggaagtgcatgcttctgctgaaaatgcttttgtttgattatcctctcttgcatgacacgcccctccatttcgtggttacattgtataaccctgttcatgaattcagattgtgtcagatcatttgatcagtactgatccctagtgatcatctggtcttgtgggaacgactgaaattaaaagatctgataatggggcatatgcagggagcatactaattaagtctggcgatcaatgttcagcaaaccactgatcaagggaactgtaggttctggataaacatgtcaaacaaatcctctgtcattaacgcaaacgcgaaacgtgcatgcatcacgcgtgccgtcgttttcgagtactttatgtagacaagaaccaagttacaccaaagcagccgatgaattttcagcgtcttattactcgcgaacggacaaacctagctacccgacggtccgtacagatgaactcatcgatcgaatatcctgcgatcctgttctgtaagtagctacgtgtcccgcgtcgacgggattctaccgtggcagcgattcaacgcgcacggtgtcgtgatggcctacgctaccgccgtggatcatacacctgtaacgcttgttgcagcttggacgaggggacagggcaaatggcggattggcgcgctcagcctgtggtaatctgcacgccacaggcaccgagcgaggaatgagacggtattactgcgttttggataaggatatgggtaaggattgacgttgaatgattgttagacaacaatgttatgtcaaatttggagcggattagttttacaaggattttgtgggacatggaattttgctctgaacacttaagtttgcactttgcagacaacgacacaacgtatactacggatcctatcaaagagggaagaatatatataagtcgtgttcgctttcttttcgctgaatttatctgccacaacatggttccagccttccaggctttcggctagatttcacttctttcaagcaatgcatcctaagcagtaaagagtaatcaatctaacctaagaatgaatcacgcgacaagaacgacaagagggctcgtcacaacatggacaccgtcgctccacgtatacgatcccgccacgaactgcccgtttacacgccaaccgcctctccctttggtggcctcgatctttatcctgaacgacttcttctcgccggtgcgcgcgaagctgaggctcctcggagacaccttcaccgagacccccatcggctcgaccacggcgacgctgtagcgggcgctgccctggccgacgttggtcaccgtccgctgcacggtgacggatccgttgaggccgtggatggccagggacgggtggttgagctggtacggcggcggcggggtcgccgggcaggggagggagtggtcgagctgcgcgccgccgctggcgcacgcgaagaggaggtagtcctggtacgacgcgtcgtagacgaggcccgggtccagcgcgtgcttgggcctgatgtggcccgagccgtagtcaatgggccccgcgaccgtcccgtccgcatccatcattgggccgccctccgcgttgctcgttgtggctgcgaatcgaatcgatacatatgtacgtgcaaatgggttataacgccggtgagcgatgaacggggaaagttgaattgtactagtcaggacgagacgtcaccggtggtcatgatggccgatcggatcgcggcggagctccagcccgggtgggcggacttgaggaggacggcggtggcggagacgtgcgggcacgacatggatgtccccgacatgatgttgtacttgacgacgcggttgtcgccgtcgagcttcgtcggcgacgatgcctcgctccacgccgccaggatgttcagccccggggccgtaacgtcaggctgcgtaatacacaggctagcatcagctcatagtcaatgtttgccgtaatccgacacgggcattgaaacgatcgagatgcaccttgagaatgttgggctcattcacgttggggccgcgcgacgagaactgcgccatcaccggcgacggcttgacgtccacgacggtcctcgagggatccagcaccgctgtcgggctcgagctggagttgatgtagcggatgatggcgttaacgtcgaccgaggagactgcggtgcccgggagcacatgcgcgtcgacggggacctcgcctccgaacgccggcgggttgccgaggataatggccgcgccgcccgccagcttcacctccaggcccttctccaccctcaagccagtacccctcaagcacacgacgatcttgccccgcaccttctccggcgccagcgatttcggcaggcattggctgcaaccatatcgtagaaaacagtaagatcacattggatttcagaaaatgtgttactaattcagttggttgtgagttgctgtacttggaaacgttagcgggagtgccggggacaacggcgtctgctgcataaaccaacggatacggcttgttgcctggtagctggtacggcgtcacagtttgaccctgacacgcacgtacaacaaaaagaacaagtcaggacagatgaacaagacaaatatttgttggtggacgtgccacgaatagtacggtcgatgttgcgtttagcaggtaaggaaatttgtagcgtggtgtttattaccatgatcaccatgccgttgccgagcttgatcggcgagatgaacgcgcggtcgatgctgctcgcggcgaccgtgagcatccacggggcgaggttcgacacggtggccggcttggggccggagttcccgccgctgcacacgagcaccacgccgcgcatcgcggcgtgcagcgcgcccaccgcgatgccgtcctccgcgaacggcagcggcttccccgtggacccgatggagacgctcatcacgtcgacgccgtcgccgaccgcgtcgtcgatggcggcgagcatgtcggcctcaaagcaggtgttctcgatgttggggttgggccccgggatgggccagcacaccttgtagacggccacgcgggccagcggcgccccgcccgaggccgtgcccggcgcgaacccgccgagcgccgccacgccgggcaccgtgcgccccgcgacggtggacgcggtgtgcgtgccgtggccgtcgtggtcgcgcggcgagcggtacgcgttcgtggtgttcaccgcgccgtacctggcctcgtacgccttgacgtagtacctcgcaccgatgatcttcctgcgtacacacgcatgtacagtacgtacgttggcgccaatcagaatcaggtcgttttaccacatctacattgtctaacctacggattagtattaggcgaagtttagttccaattctttaaactttcaacttttctatcacatcaaaatttttctacacacctaaacttccaatttttctatcacatcgttttaattttatctgaacttctaattttgatgtgaactaaacatacccttagtttgattaaacaaatgtgaactgcgcatgaatcttaggtcgatctgcagagctcgctgatgccgagggaggaacatttgacagggatctcgtttggggcacggtgctaggaaggtgtcacggggtcaccacctaccatgttctgattcgtgcagttgcttcagaggaaaacctactctgctgcagaggtttgtacgtatgctaaggtcacgtctcggtgccgtcccgttgtttgtctcgttgcatgcatgggtaggggtcaatgacaatctgcagtgactcgagaagatgccaagctggagacttgctcctgcgtggcccacacagccttgggttttcgtttggaagtgtatgctggtcctggatggctggatcacagcatgatttatcttgtttttccaaacattttgaaataggaatcagtggtcgaagttgtattcgatcgtatcgatataaagataacatgtttagggatcggattggattatgtttaatctttttttttgtattttaaagacggaatcgatgaaaacaataatactactatgttttagctagctgacctgttgcaggaagagggagagaaggaatcccctccttggcacacccctttccaccgagccggcactggtcctaaaccttcgtcgccgaagctcctcgactccggccaaatccctgtaaaaaaaaaatcacttttcatgcacatccatatcaatgttacccaatgatagcctccttttcttatgcatgtccccccatgttaatagaaaagcaatgcaagatgtagtaagagcacccgtaatgataaagtaaggtgttctctataaaatatgtacatctcagcaatagactagattaatagtaaatcacctcaatagtatgtctatatgggtatctatagctttctaatctattgtctcgtttttctatatagactatctccaggttaatagatagatttgctctctctcttcatttaatctcttccaagtaggaaaatatgctgacatgaatctcttgtagagagcctataaataaccattgcggatgccctaacacacagcaaacaatttttttatatttttttagagaatggtatttttacccggtctctatatctaaccggatatatgctttatcatattagtcaaatcgacgaaatatgtatgatttaattgatagatagacatacatcggactactcaccggagtccaacacgcccacgatgacatcctcgccgccggctttgtcgccgggcggcagccggccggtgtcgtccggacctcgcaccccttcctccaaccccacaaactcccaagacctcgtggtgtgcgggctccatctcccgttactcggaaaggcagacaccacctctgtcctcgctgcacacacagcactaatcaagcatgagtacgagcacaaagatacaatctatcacttgcaggccacatgtaattgattgttttagccactcctgaataaaacacaaagcattcatttcatcatttgtactattactgtattacatacatgtacagtcagcattcgaattgttctcatcatctctgcgtgtcactgtgcgtgtgacatgtacgtacctgacagcgctgtggcctcttcctcggagagaagggccgcgaagccattcaggctgtgcttgtagctgtacaacagcgacgcccgtgcctcctcctcactgttcgatggacagagagcgtgttgcatgattagtttagttactgacttttaatcgaagcaagtataatccgtcaatctcacatcagacagctgatggagctacaggaaagcgcataattagatgtcaatgatggtttttgtataattgatttattgcattattgtttacctgcccttgacggagagcaggaggccatggtgaccggcgaggatttcttcctctaccttcgctccggcatgctcgcccaggtacaccacgtacacctattggcaatggcgagatgaaagaggagttcgtctattcagttcatggaaagtaggaggccggagactggagactacggcgccatcatagccggaccggagaaatgaactgacgatcgattacctggcgtggcttggtgaaggcagctgaggctgtggagaaggaagaggaacaaggaggaacagaaggctcgacgtggccattgaccctcccatcgtcttcttctgaagatgcccgtatcctgctctgtaatttggctgataggccgcttggttaggacttaggagtaggacttcaggtgtttatatagtacacaaagcaagtgctgccgattacagtaggtgtttatatagtagtacattgcaagtgctgccgattaggtgatagataatatatcgaaaagatatgttacatagtatgtatagacggggaagcagagaaatcagaaatggacagtggaatctgaatgactgatcctccggggctgacatgatacgagagtatctttcattttctaaaccttttttttacccgcgtttctagtgctccctatctcgttcattgcttgcaacttggagtagtggtgaacctatacttgggaaaatctctaaggctggattggaccaagcatacactactacagttttctgacactgcaacgcacacatgtattcaccatccactagtttgatgcctgcgtgacagcgtgagtgttctcatcagaaggactgaaagagcgaagagaatcatcatcaggcatgcagtgccttgttcgaaggggaactgagtaccgattgatgctgtgacgattggttgcatcggccgtattggaatacgaatacgatggctcgacgccgagcacgtacgtctcggcgtctcctattgcacatacttctctttgggcgtccacatcgccctttttgtccagcgtcaggcacgccgcacgctcgcaaagctacgatcggagacggtttggtttggctgatcggtgtttggatagatggaaaccgaccggttcgtcgtctccttctatatgtgccatactggcatgcgtgtctatgtatagttgacccgatacgaaggctctctatctattatccgggctgatcaccgggcattgttcagtggatatagacatgcaggagtcactcagagtgatatggccgctggtccctcgtcacttagcagtgcctatcacctatctttgacaagaaggttgtcaaacgtagatggagttgtgcagataaatctaggaggtgtcaggccaatatatggtaagcacgccttgctcgaagtcacttgcatacgctccgtgcaatccttttcaaaacagacaatacacatcgtgaaactactcgctttgtagttgagagtccgagatcaaaacgaccttggtttcatagggaatttcttactaggtcgtaactatggacatgtgccacatccaacctataaatagtccagtttaacagagcagcagagtttgacaacaaatcaaagcatatgcttggcaaacagtagtgttatcttttttttttaaggaaaccgaagtgtttgtatgtatacagaaacacatattttgtacgggttaacacttaatgaatgggatatataggtcagaagtcctaaaatgcttagcattcttgtgaggaataagttcactttgactcccataattagcgaccgaatctgatttgtatccttaaccataataccggatatctcgatcctccaactattaaaatcattgcaatttgacttccttagcggttttggaggatggttttgctgacgtgacgtctacgtggcactgttgatctagtctgcaatatgtgggacctatttgtcattcacacaaaaagagccctactgacatgtggggcccacatttccatcccctatctcattcctcctccctctctctcccttctctctctttatgtttctcggtcatctccagggggatccagagcggcggtggcgggcgggcgagagccggagcagcggtgtcggcgtgagcatgggagctggagcgcggcggtagcaacggcctcatggctcgtcaagtcatgcatcccagccgaccccactggccatatcgccatccccattctttgcccccaccccgcaaccactgcgtcgtccctcgtcactagctacgttacctggatacggcttctaggccgcgtatccgtttcagatacgtgacggatacgggatacgtatcggatacgtccggatacgtatcccgtacatatcagtgattcgatgcagagccgccgtctcgttgtctcccatcccgatgcagtgattcgatgtcgccaccacacgttgggtagcaactgcgtcgtcgccgcacccggcagcacagcacctgctctgcaacacatgcacagccgcacagcatctccgccacgagtttgaggccgggtggcagccggccagggccgtcaccgcccaaggcaagacagcaccagctgcatcgaagcacccatg

SEQ ID NO: 8607 - DNA, 2389 bp, Oryza sativa
ccagtggatcgggccagacaggccggccggggcccgttgtgccacgtgaactgaacagtggcgccgcgcgagcgggtcaaaaggcggagccgagtagccgactggcgacggccactggctcggggagcaagcgcatgacacgtcggcacaagtggggtgggcgtgtatcggtggatgatttggggctgagacttttcaaaaatgttggaactacggggtaacggagtagaatttagatcactcacgtcggccctacaagggagagcgatgcagcgttggatctgaattagatcaccaggccaccagggtccgcacaagacagcagggggaaatgggggcccaagcaatttcatgatcttctttttttttttttttggagatcttctatggacattaacagtgatagaaatcatactaggattacattgtacattaacagtgttacgtaaaatattactccctccgtcccaaaatataagtatttataagtatttttagactctgacagtctccaagatgctactttaactaacaatatctaaaaataagatattttaaatagaaagaattatatattatgatagtttgtttaataataaatctagtaacatcaattgtacatgattgatatttgttacttttttttgctattaatagttaaagttaaaaatgtttgactcgtcacaatgctaaaaatgtttatattttgggacggatggagcactacttagggaggatatctgatgctctaccggataactccagatccctccaggttaataatacttgtcgtgttggataagtatacacggttttaaaaaaatatcaatcattttattaagtattttgtagactaatccatacatataatctttagatttaagacaaatattttataaattatttgtgattgaaagattttaaaatttagccttagtcttgtccaaaacaataagtattattaacttggaaagagtagtacccaagcacctaaaactcactcttgagacatggaaaattttgaataaaagttaataacatgcatctacaatagcacgaaatttccaatccaagttttatttgcatgtcgagaacgcctgaattgattcacttgaagatttaacatcgaaaagcattgccgatttatctaggcttagactgtctccaacaagtgacccataagggcacctaaacccaaaatgggtctccgatagtactattttagcctccaacagagtacctatacagaagacccattttgcgtgctataagaggcataacctaaatctgagtatcctctctcctgaaaatctatttgcagtaatggttctcttttaggtcttattgttagagaagaccaaaaataggtattgaactctttaactgtagcgctatgcaaacgtgaaatgggtcttgtattttgggtttcattgttggagatagccttataagttcctgctgttacactaccataccatattgcacatgtttgacaacggataaataatatatttcatggaaacaagaaaggctacataatgacggagtgaccataactgataagtttaccaaaatggttagattattttgtattataatttaactttgataaaacaacaagctggcagcatcagagcttattacaattttaatgcacaaaatttgatagatgctgcacaacaggaattacaatttggtgattaatcatctaatttactgacctcatggggtttgtctccctgaagagagcgaaacaatgcactcttggaccatttcctggactcttctcttcaaaagcttatccttcacaccagaaagcatgctgcggtagaagatctccaggcgattgagttcatcagtacctgctgtatccaagatgttctcaaattcctttctaatatcaaagacaggagattcttgaagggaacgtggaagtgttcgttcatctagaggtttacgaaatattgaaatgtgaagtatgttggcatatctctccataagtgtcagttttgaccgaagaaactccagctcttctgaggcagcagatagcttttgttccaactcagcgctattccggtcattcactcccgatgttgatgcctgtgctctatcctcatgaatttcttggaagttctcatcaagaggaggccacatcacaacacatggtatgtaactgtcagcagtctggtttctcccaagcacaccactgcggcctctgccccaagcccacatcctatacccatcaccagcaacaagaacagtgtgagcagctccacaagtgacctgcactgcaccaagaaatttgaacccatttgtctcaggagactgaactcttatcgggcgtagagcatcccctgaatcaactcctgaaaagctggcatcagggcac

SEQ ID NO: 8608 - DNA, 1331 bp, Oryza sativa
aaaaagaagaagggctttttatggttttcataattaacctaccagtccacaacttaactaaatgttgtcgcgttcttaaaacaaatcctaacttaaattcagcaaaagaaagggagtatcaagaaacatgacatattgacatgaatggcaattggcaattagtggcacttcttttgttacttcagaaaattagtggtgtcgtgtgcaaaaaaaaaaaatccaaacaaatgaatacattgcatatataaaaagagggacagaaccatgcaggcacatacttcaattgtaacaaagctaatttcttttatgtaattaaaaatgaagtacaagtacccatgaagctatgattcttgagtatttaaaattggattaacatgttcagatcgtgcaatcgcatgcgtgcttggctagttattttatccttttctattattacataagttttcacatgcattaccaatctagacttgatctaatgacagtgctagtgaatattacagagcattgcatctgctgagatatatacttagtcatttacagataaccttccctagctccttgccagcagtaatggcctaatccttattccctttttatcagaccaaaatatcataatagttttatcatgcagtgtacgatcttaagctatcttcactagtaggaaacaaatgcagtgccaacttgtcggagaagtatactagtaggaataataaagtactacttcctgctgcccaaaacgagaaacatacagcttctagttctagtgttaattttatcgcgcatatgggcagatgacacacgcacctcatcttcggtcgggtctccggcacagggtgcatcaacaactgacagaatgatgcttccttgggccacttgagcagcagctgtggaggcaagacgcggtgccgtaggttcgccattgctcgcatcttctcctccatcgtctcgaacgtacagaacaactgaaacaacagccgtagacataaaatcagcgatgagctgagccgatgacaagcagtgcatgcggagaactaacagcgcatttgatctcaagcacccgcacctcgaacaagagcactcctaacctatacacgtcggaggcgaaagtagcgccgccgcggtcgtcggcctcctcggggctggtgtaccaggtgagctccatcgccagcacgctcctcagcgggaacgtcttcccgccgcggtcctccccaccgctggcgccgtcccgtcgccgccgaggaggcgagggttccggtcggcctcctccgagccgtcggagccggagcaggagcccgagacgtcggagccggaggcggactcgatgaacgcga

SEQ ID NO: 8609 - DNA, 4056 bp, Oryza sativa
aggcaatttcatacacctcccaagaagatccttcgctaaaagctgagataagcacaggacgggatctactttccttgtcacctagacccaactggccatggttgttattgccccaggcataacaaacaaggtcacctcctgtataggtctctccagcactgactgcagctacgacatgctcattaccacaggcaaccttaacaacagtgtgaccatggaaatcccacacaggtagtgggacacagctaggtgctatacaaaactctccagcatcagtctgctgcgggcaatttccccacatccacatagctcccagagtgtctatggcaaatgacatcatgcccccagctttaacagaagacaactgcaacaaaacatacagcaggattggttaagcacaaagatgaacttttaagtagtattacaagtttgcagctttggttgttcttataagaaagggtgatctatttgtaccttcaatgaagactgtgtgctactgttctgtgcttcagactgcagcgtttcaggtgaacccaaatcttgaaaacgctcaaccaaacatgggaaaagagaattctcttccccgtagccaagctgaccatccgttaaatagtcaagaaagaacataacaggcgctgacttggatattagtagaatggtttcaagtcgccaaagctcaaattacataaactttgtgaaggatacagatgttgtaaccccatgaccagagcgaaccttcatctgcaatgttggacaatattcagaacaaagcttatatgtattaattacatataggtaacgcatttgattaacattttggctaagaaaccatttacagttaaaactagtaacctgaaggaaaattatgtattattttttcttactgaactcttagtaacactgatgtctagattttctttaacttccatctagttaaatcaaacagttgagatcattgtttgtaagagttttgctttgatctaaactgaactattcatttgcccattatttgccattgatgtcacaacgacatgtgagctatatgttagtttgttttagataaggccataagggaagtgacaagctcccagcctttgcatcatctaaggatgcacacagccattacatcaccaaatgctaagcaattatataagttagtgaaataatgagtctcgaagggattgggcaaattcaatgctatacagtatgggaaagcgtaataaaatacagtgttctttgcaatgaacaatttgtcgatttcacttattaagcagttcaaccattccaagcaaattcaggggaaaactcataccatatcaaaaaggcccgtagtaacagcacaaaaattcaagggaacggaaatgttcgcatggtctgtgcatattgtacaggaataaccccacataccaaatgctcgtcagggatcaggaccataggagccgcaaagtacagcaccggtgaatctaatctactctctccgtttcaggttataagacgttttgactttggtcaaagtcaaattgttttaagtttgactaagcttgtagaaaaaaataatagcatttttaacccaaaacaaatttattatgaaaatatattcaaatattgatttaataaaactaatttggtattgtaaacattactatatttgtctataaacctagtcaaacttaaattaatttgactttgaccaaaatcaaaacgttttataacctaatttcagagagagtaactaccagtagattgcactagaaaattatgcacgcattgggcatttgggccacagcaactcagtaaactaaaattcaagttaccagtggctagtcggttactcgggtgggcgctctccacaaaccgcaaatcataattctgcaactacttcagtactttcaaactacagttgcctacacagccgcacagaatgctatcacgaagcgaatgaaagcaaaagcactaaccgtccagcgcaaggctgtggtaggcgccggatgcgacggccacgaacctgggccgcggcctcccgccggcggcgaccacggtgggcacgtgctcgtcggcctcgcgcccggtcccgaggcggccgaacatgccccgtccccacgagtacacctcaccgtcacctgcaacgcacgcacgcccagcaaaacccacaaaagccacgctctcagatcccgaatcccgccgatgcctcgataattcgccccgggagcaaagcgagcgccgttaccggtgagggcgagcgtgtgggcctcgccggcggccacggcgaccaccttgggcggcatctgcggcggcagcggggagcagcggtggagtggacgagagggcagatgaggaggagtgggaggaagaggagggcacgagtacaactggaggcattaccgcgagagcaaggcagtaaaatgagcagcggaagcgaaggcgataaggactcgagcgagtcggtgtgcagcacggcaagtcaccgcttgcggaggagctcgtcgacgtcgacattgacttcatcccgcttttcccccaagaatgatccgggagatggctttgggacgcgtgtcgcggcgctgcatcaccggaaaaagaggtggttggaacttagaattggcaggtgtgctgctgatggtgcgagtcgctagtgagatttggacaagtttggggagtacattactcctgtggatgtagagttgtagacactggcaaccaattcagatatctgatgaactactacacattctgcatctaggaaatgttgtgcattgcagcgagaggggattcctttgtacaagcagcaaacgtcatatgttctactaagttctaacacattttgggttcagttgattatctcacatacccacggtgcaagtacatacagcaccctgcaccctgatggttccacaaaggaaaaggaattacgaccttctcaaactctcacatatttgacagccagatgacatcgatcacagcagatgccgcaaggaagatgcaactgagaaaggcacacgcgatggaggccgctgacaagtcgcagaaacgtggcagtggcttgcagaagttggggagcgccgtgtgccggatgccggtgcggttcagattcgcgactgccgccgctgctgatccagcactcatcattgcatatgcgaagatctgcacgcgaatgaaaaacagcagaagttagatgttaatcttgcattccacgggaaatgtcaggccaaagccaaatgttcagctgctatttgttgaactaaagaaagttgtggggttgcaatgggaatggaaagtaaagcagcttaatgacaaagagtttttaatcaactttccatcggatgatgtgagaagtaaaatatccacttgcaagagctttgattttgagacctctctaatcaaggctagtgtggtggagacaggtatgacagaagaggctgttgatgagctagttgctgtttgggtcaaagtatatggcataccaaagattgctaggaatgaggatgctattaagtccattgctgagttggtgggggaatttgaagctctagatggtgctagtatcagaagagatggtccaatcagagtgagagttgcttgtaaggaccctagggaattacacttcgggatgcatgtctatatcaacaaagtgggatacttaatcagatgggagccagaagggtattcgtctattgagaatagaccaattcaccctgatgacgatgacaaagatgacaaagacgagaatgacggcaatgaagacatgaatgttgatgaggattacaagatgcaaagccctactagaggtagacagaaccagaatacaggtgcttcatcaaggggtggacactctgcgccacctgcttacaaaggcaaggaatataagagtggttatgtcaagaagattgcctctaagaaaacctctactatctcatcctcagaactggttttggagaaagaaaaaaagaaagagttagtgtcactacagcaggaaccaaagcacacagagtcacctgagctggtgttgtgggagaaaaagatggagatagtccctatggaacaagaatcccaggaaat

SEQ ID NO: 8610 - DNA, 72784 bp, Oryza sativa
  unsure (1)..(72784): unsure at all n locations
gatccaggaaagtgtgttgtctaaaagctccagactgatgaagaacttcaaaaaacttgaaacagcatactttctcacaagatccaagttggcaaagcaagttgggaatcctgtaagcagttgccatcaagtcgtgaaaaggactactgggtcacctgttgtgactgagggaagttcaatagatgattttgctttggaagggcattatggtacaaggcaaagaggttggatgaactcttttcttgagggattgtgtagttacttatcgttcagtaagttgaaagttaaggcagaactgaagcaatgtgatctgctgaactcatcaaacttagtatgctctgtaggcttcgaccgggataaagagttctttgcaactgctggtgtaaataagaagataaaagtgtttgaatataatatgattgtaaatgaacattgtgatattcactatcctgtggttgagatgtctaatagatcaaaattaagttgtatttgctggaacagctacatgaagagccatatagcatctagcgactttgaaggtattgtacaggtatgctcacttctaaggaacatttttcagatttgcatttgatgaaatggccattattaaatatcccccttttttcaggtttgggatgttactaggagccaagtttttgttgaaatgagggaacatgagaggcgtgtgtggtcggtggacttctcacttgcggacccaacaaaattggttagcgggagtgatgatggttcagtgaagctgtggaatatgaatcaggcaattttattcttgcacctggtgtatgtcagcttttgaactaccgataacatggttatcgagcttatgtctgcaatagtagactaacttgcctctgctatggtaacactttttcatgaactttgcaggctgggagtgttggcactatcagaacaagagcaaatgtatgctctgtgcagtttcaacctgattctgctcgttccattgcaattggatcagcagatcacaaaatttactgctatgatcttcgaaacatacgagctccttattgtacgttagttggccacacaaaaacagttagctatgttaagtatgtggatgcatcaactatagtgtccgcatctactgacaactccttgaagctctgggacttgtccatgagtcaggcaaggataattgacagtccgcttcggacatttacaggtcatacaaacactaaggttagaatatcctgcataccttttttgttacggtgcataaacctttctcggggtattgttctggatatggttcttttttatctaatataacaatcatcctgtgtaaatgtagcttttgcacaaccctaaattgttattcattttgtcagttttctgtgcacctagttaccacctttttccctcagcatgttgttgttatatatgttcagtctttgaattacatgtcataaagcttcagtgtaatccctaattagttcttgtgcacctgcacaaaatttgctctccaacttcggtagtattaaaaatttcaacatgccttataggtggtagtaccccaagcaaaatgtgtttaccaaggtactaggtggtagttgagggagcagcagggcatcctctagtgcctaatcattgataagtggccaaatggttaggcgggcgggttcaccgagcacctaaacactgtctgggctggctagaaagatatgattaaggccacttgcctgcttttttgagaatgacacttgattttcgagattaagattctagtatagccctttcttcatattcctttagttgctttcaggcaaaagaatactttgttttatgcttaatttagttatttcttgaacctgttgaacagaattttgttggactttctatatctgatggttacattgctactggctcagagacaaatgaggtatgttttctaagtttccaccaaattctctgccgactatttgaaggttaatttcaatgtcatacagcgacaccagcttttgtgcaaagctaatcattggagttgccctaatgcagtaaactttgttgcaagcatgctgctgtttattattgatagatagtttggccatttctttgcatgcctttgtgcttaaatttcaatccatgcatctctcagaaaccaatattgagatgaaagaaatcaggtattaagatgagagcgtcatggaaaatgatttttttttttgttttgtaacctgcattttctatgtaacagttgaattaatgtttgccgaattcatgtgaaggaatattttggctcacttaccttagtgcgcaaggtattttgtgccgtaagatgaaatttggtattgaaaacataggcatagaaattattttttataccatacgtgcctgtatattcttgcttggggtttaatattaattcaaatatctaactttcctttccatctcgttttacttcaggtttttgtctaccacaaagcatttccaatgccagtcttggcatataaattcagtgtcacagacccaatatcaggccaggagattgacgatccatcacagttcatttcatgcgtgtgttggagagggcagtcctcaacgcttctttctgctaattccagcgggaacattaaaatcttagaaatggactgaccgtgcacaaatgggcagcttgtgcgcgtccagtttccaatagaaatgaactgacttgacacccaagggaatgcgcgtgcccggggctagcatagtgcattggaagtttgccttcaaatgcagagaggtctatagggcgcgatgtaactttattagagttggagttaggaggttgataggacagagtggtagctgtaccagagttagcataggattagatagaaaacgtagcataaatagggaaagtatttgtgacgcaggggatccaagaggggttttgtacatcattggtttgaggtatacttatataggcaatcaatccaagcttcagtcattgctattcttgttttgaaatatgaacttttagtgccctttcaattgatcgtttcccttatttctttttaagaaccacattggttattttcgtacacatttaatgttccctgcatatattgaaacatttgatacgatgaaatttttgaaagtttgaaaggaactaaacacaacacactaggtctggggctacgtccaacacttttttatcatcattatttgctggatgcggaaatgcacgtccacgtcgatccaccgggcacacgccacacacaaactgtgaccaagttgtagaattcgaagtgcacagccacaccacccccagccccaaagtcccaaacacgttaccgctaatcagaaagtcagcatttcttggggtctcgcgggccgaagacgaagttgccggcggagtagcgcccttgcagcccgtcggggagcgccacgaacctgcggaacttgagcggcgaacccgtcttccgcccaggctggagcgccacgccgcacgccgcacgcgacggcgaccgcggcacgtacaccctgcagtccttgctcgtgaacgccgccacctgcgtccccgtctggatcaggaagtagccgcgcgcgtcgtcgcgccccacaccgacagcgcccacttcccccgcctgcaccgcagcagcgccgccgcatctgcgcacgcacgcagcaaaaagcacacgttatttttcagcggccaaaacgaggccatcgagcgcaggtgggtggtggtggtggtggtggtacgagtactatacttgggaggggcgaggcgtccttggacttgacgtagccggcgtagcggcaggtcttgcaccagacagcgccctcgacgccgatggtgaagttcacgttgggtggcggccgggggagccccatggcagagcctcctccaagctgggtgaggatcacgagcaggacggagaggcagtacagctgaagggatcccgcgaacctagccattgttgtttgtcaaatgatgaagctctatacttatattaaattagtacgtcgcaatgataatggaaaggatgagcaaagatggcgcaatttataggctttgtaggtgggccgatcagctagctaggctagataccgttttgtacggatgatgatgatgatgatgatgatgcgtgtatcgcttatatgggggaaacggagctcatcacgtgcatgtacgtggccttttcggtgttgcaagctacctgcgcgcatccggattccgggtagcgccgcttgcactcgttaaaatggataatgttgatcgaattacttgttttgataggcacagagtacatccacttgttcaaaatgttagcataatctagaggccggcccaggttaatcatgttgtggactggttagtacgacctggtcgatcgattggccgatgcatcaagtggtgtggaacatgatgcattaaccattttcgacaaattaattaccaggcaaatttgcagcctgcaaattaaccatgcatgaacagaccaaacaaaagagttttttttttcttttgacaaaatgagaacagtttgagccccatacaagtaacagattatcgtaacattaagtgttgagtgaacgttcgttcgaaaaaataaaatgttgagtgaaccactgcaattaagcaagctaggagaagccatgcatgctatctatgtcaatgcaataaatctagactagcttctttaaaaaaaatctgggtgctccaaagaggttttctaattaagtcatttcttgaactccgcacggatttgtttgttcagaattcaagctgatgcttaaacatcagagaaccacctagagcacaaaatcggcaggcacggcatctagcaacgcagctacggttcatcatgcacgcatgatgaattcgcttccgcttttgctccagctagcataaaaggggcgcggatactttaatttgcatgcaaagggatgtctttcttcttcttgatttgtttgatggatggcgtcctcacggtacatctatcatcgatcgccgccccacgacacacgcacgcacgcaacgcaggtcaaaacccaaacaatttcagccgcgcgcgacatcgtatacacggaaacttcgtcatgtgtgcgcgcgtatccctgccggccaacagtttgtcatggatggaaaggattaaccaacaaaacaccggcatgttccattcctgaagattcacgttgcataaccgttctgccaaagttcgaaactgctttcttggttttcttgggctgtgatgggcgtttgcttgggccggtaatgacaagaccaaagcaaaccgtccgtccagtggcccagttcccacgcctcctgcccttgtccatggcccatcaaagccatggacaaggacatcagcaagttagcaactacttggccctaagtgctctgttatcacttatcagtgaaactcttttgtttaatggtgagagaatactaagacgatttaattattactccctccgtttcagattataagactttttagcatttatttatatttatatagatattaataaatctagacacggtactgttcatgggagggtggtagtacttattaactattcacgctactctcagtactctgtatctcaacatccaagggcggctctgactcttgtattctgaagagtgattagtggctatagtaaacaggccaaaatgcagacggagcataaaggtgctggaaaattccgaatatacttactagtcagtcgtcacaaaatgcatgcttaagtagagtattcgacctcatttggtatgtgttggaatttaattcaattaattaattgaatcttagcctaaacatgatcaccttctgctcatgtggaaattaattgatatagctgacctgagatgaagccattgcttttctttttttcttcttctgttacgaatcccttccagtgtctaatcgatcgggcgattgatttagggtttagggttggagagagttgagtcgtcacgcagcctccatccttctctttctttatatagcgacactggtggggctcgggggtttatctcaatctaaaattcgaatctattttgtaccgatcacacaaaacagatttatctcttagtttgtttcttgttaggatagaaaaaccggtgggattttaaccttatcctaactaaccggcattagccgataaaatcaaccaacattctccccttgattttgagactaactgacgagtttatcacataaactagctccccaaggcaatgtgtcttcaacaacattatgcgtcaccgagacaacaagacctatagtttactatagtacccaaataaactcaagcttaacttagtgggtgttgattgaaaaattaagtccccctcatccaggatcttagtgaggctattatttatgcatgtactggctagaacatatcttaattaatcttaactttatgagcctttagagtatggatccatgagcaaaagcttagtttagtaataattcgatcctgggacatatctttcacaactatatcaatgtgttaggcagaaaacacataacatgttgctactacaatagaaaactgtgtgtaatcagtgcacaacttataacacagtatattttgggtggtttacaccttttgagtggtttatgagcgctatttaccacttttagttctgggaaatattcttatgattaattataacatgctttaaaatctaaactgcatcgtcgattatgcagtaagagattatttttggagcttttccatggttattgctcccctatgtgtggacatagcttaatcttagttaacttaataatctttatatatatccacacatctcacaaaataagtgtccaaatgtctctaaacttctgagatcattggactttagaaatatgagcatgttacttaagattgctttgtaaataatacaaaacattcttaataccagtggtctagtctggatttaattaatactgtcaagattcccagtaaaatgtatgccaaatctgtatgcatccagatttgagctaatctcaagcttctatcagctgaatcataaatgattatctttataacttaacttcagcttgactaatctttaactgaattctctgaaattatttctttatgtcaatatatgacttactgatataagcccagtactccttcagaccaaaataattcatggaaaaatttcctttaatttctaacagcaatatgtattgcttgacaataaaatgtcattagtatggagtaccggtgtgaaatttccacctttaatttccatacagctatccacctcacttgaattattcgaaattttcatcagtcgggcttaatttcattaacccacttaaatggcccactattttgactcatttagaaacttctactaaattctttattttattcatcaatctcaattatccttacatggttcgaaaaccatttagatgaacactttaatgtcttattttgttcatccatatcaatttattcttacatggttcgaaaaccatttggataaatgcttatttttaatgtcttataaggtgaacaagctttatttagtgtttaccaccataatccgatctcataacttcatttgattttagcattagtgtcttaaatttcttaaaggaaatcggaggtcgcttatgggtaaacatagccataaaaaatcatttgttggctaatctcttaacttcgtgaaattttcacttaaagctaaacaacaccattaaaatctaagggaaataatatctctatctcatgagacgttccaaactcccctaggtatgtgacataagcgacaatgacacaatttcaatgacgtcttacttccatcattatagaataattattctcctcattcttatttaagcttagttcactaatgacgcagcggaatttaaaacatcatcaatgtttgattaagtccacaaatggatttcttaagtctgtaccctatatatgacttgtatttccataacaaaaccctcaagttatgttatgtatatttaattgtgtaagtcacaaattaagagatacaaatttctagcatccacataatggagctatgagtcataaatgaggtagaataatcttctcttattagagctcttgatgagctcccactgattgtattatttatttaatggaagcataatatcttatttttcataaacttaaatcacttaattttacttagtgaattatcatctaagtaataatagatgtcagaaatttctaagggtgaagtgtctcgaccttaatgagacgtccattctcccctagaaatgtggccgaataataaggccatagtttcgacaacgtctcataatgattcaacccaaaataatgcccttaatcttcttatttaactactttattgaatcaggacattaagcatgtccctatttcttgcaaagaacttacacaagaaaatttcaagagtagcatacatacgacatagaggcaactttatttccccttgcgaggaaagtgagctttattattattaaatttggagttgctacaaccccatagtatagcttcatcttttccatcaaatgacaagattaaaaggatcttacttagtttgcctcttagtcttctatatttcttattgatttgcggaatgatgaaccaagtcaattatggtccacttggtcttagtattacaactctgaaaatgaccgtagtctaatgggagaagaatcatatgaaatggacaagtggcgcatataaaatgtgcgatatccatctcacaaagtttgcacgccatgtgatttatttcttgtgctaccttttaaattatggcggcaaatgtgcataggcactaaaattgtactaagcatttgttttgacaaacttctaaagttcatctcaacgtttgctagatacagtttcacaatgtcatgctcaaaattctcccctaacactaacagggatgataatctcaatatttgtgagtgacatgcgaaacatagcattatattggccttctcccaggctaaagatgcctcttgagtttaggaaacattagtgacattagctgcgggagccacaagggatcctttgttaatgctaagtcatactcaaataggccttaggctccgttaagtcaatgaggaaaaataataataatttcatagactttaactgataataaaattaagtggcactattattgtggttgcttgtgcaaattacgtacaatagtacattaacttacacaataataacttaatctttatttcgctttgtatcaccgttgggcagagacaaaatgaaggaattacttataatccaaaatcaagtcaccgttgggcagaaatgattagggaataaacattaatgtcacatcaccaaaaggtagaagtgataaagtaaataatttaaaatcccaaatcaaatcaccatacggtagaaatgattaggaaatgacgccattagtgatgctatagaattaaaattaaaatccttagccatatcaccgttgggcagaaatggtaaaggaattaagattactgatagattatatcctcgatcacatcaccgtaaggtagaagtgataaaaggaattaatgcactaatggcataaataaaattctaagtcatatcaccattaaggccaaaatgacagagaaaattaaaataatgattgacaatacttagatttcttcccttaattacatcaccgttgggcataaaataattaaggaaataacaatcttaatgaaatcatctttctttgtagataaacttcccgttggttccatttatctagaaataatttactcattatttcaactgatcttaaataataagaattgttgattgcatataattagtttaccatagcttaatcaatcgtatgcaaaataaacttagaatttcatagtcaaagcaccattggtcataaataattatgaataatcttaaaattaattccttaattatatcaccatttggtagaaaataaataaggaataaaaattataattgtcatgcaattataataacgtgggttaaatataacttcagatcttaatactttctagtcgaatttctcgttggttccattcgactataaataattaagttactaaggcaatgaccatcataatgatgttgacatgaaatcataaatattttctagttaaatttccatttaactagggataaattaaatggcttaaggaaataataaccttaataaatattgacatgaaatcatattaacgttggtcaaatataatatcatatcattaatttctttatgagtgaccaaataattgatcataatttccagaaattttaaatggctaagaaagcacataaatgaatttctgaaaataaataagacattaaattcgcgggcttaagattaaaattaataagagcccactcttattggtgaggccggcccaaaacggaccggctcacttatgcgcgcgcggcgctgaggtggccgcagcccagatcggctcggcccattaacggcgatggcccgacgcgggagcgaggacggccgtccgatcaaacagacggccaagatttcgcccgcgccgaagaaatcgcgtgccacggggaatgggtgtaaaccctaaccctagctcattcttgtccccttctcttcctgattcggcgtccggcgagcgagcgagcgaatcggcagcgatgttgtgacggcggtccggcgaggcagcgcgcgcgtgcggcagcgagcgccgtagcggctccacctcggctggctggggggcgcacccaagggcggcgccaagccgtgtgctacggcgtcggcggtccggcgaggcggcgcactagcgacggcaagcgtctatgcggccggacctcgtcagcgggggtgcggagcccgaaggcagccgccaagccgacgcttcccgtccccggtgagggacggtggagagacaagctccaaggcggcgcgcgcacggcggtcaaccggcgcggccccgaggagaccggagagctccggcaagcttagggggtctaaatccggtaattaacccgaactcaaacctaattttgacttgaatttggatttaattctggtatttgtgacttagggttcttccccccaaaaattagggttcctcatttggggattttaggccgattggatccggcttattggggattccgggaaatttcaatcttgtttattcccttttgcttaacagtggggaatttcaatctagtttatcccctgttttccccaatttacttcttaatccactgttcttatatgataagaacctagggtttatgagttgggaacaatgagagtttcaatctggtttatctcattcgttctccgcttagtaaaattcgagagaaaaaaaaatctctctctgattgaatttctccttcccttactgatttctagccgaagctatgatttacttaagcatgaaccctaattcgatctaattaacttaaatatgacataatgctcaacacaaagcaactttaagaactaataaacagaataaggggcttaacagattaatcatggcatcatgccgggcttaacagattagggttcatcacttcattggcacagtgccttcaatcagggatgatgggatcaagtggctaagattagtatctgataccacaatgttggaatttaatccaattaattaattgaatcttagcctaaacatgatcaccttctgctcatgcagaaattaattgatctaactgacctgagatgaagccattgcttttcttttttcttcttctgttgtgagatacctcacgaaccccttccagtgtctaatcgatcgggcgattgatttagagtttagggttggagagaattgagtcgtcacgcagcctccatccttctctttctttatatagcgacactggtggggctcggggtttatctcaatctaaaattcgaatctattttttaccgatcacacaaaacagatttatctcttagtttgtttcttgttaggttagaaaaatcggtcgaattttaaccttatcctaactaaccggcattagccgataaaatcaaccaacaggatgcaagactattttccaattcttgcaagaactgaattggtcaatgtgaacatactataatgctctctttgctgtgaattactcgttctttttgcttttttttttgcacagcacccaatatttagcgtcaaagccggacgtaaaactggacatctatactgcagcgttccaaagtgtactctgttttggttttgttactgaacctggcgttgccacctctctctgttctaaataaacagtgacgaaataattacattcacataggatattactgatacattccggaaggtgtatagtagtagtactatctgcaactgtgattaagatcaagtggtcagaggctgcattatatagtccatttggcagagtaaccatttccctccaggctctagcaatgtgtgcaatcagaggcttacagatccatggacgacgacttgtaagattcctactttccagagttccagtggccagtgtttggaactttggatcgagtgaaccagatggcctagatttcaacgtcttaaaaaatttgcaaaatttgcaagcggacaaatcatacaagtttgaacagagaaccaatggagaaaccaccaatgctacactgacaacaagcgatcgaaacatcacagccgcgctacctctcaaactagaactgaacgtacacacacagtctcgctacctagtcgctactgcaagtggaacaccatgacacacgttgacaatacgtatgtctagttgcctactttaattattccttccttgatcgatcgatcgatcccgcgcagtcacgcacctcggcgcgcgtgccgcatgcccggtcgccggcgtaacggccggccatgagctgccggagtagctagagccagctggttagccggaggggcactggccggcgttggcggggccgtagaagaggacgctggtggggcagtagatggcctgcaggccgacgggcgggacggtcctggtctccttgaggagcgagaggccgatccacttgtttggcgggtagacgggcttgtcgcacagcgacgtcggcgacgagcccaggaacaccttgcaggtgcgcgggttgaagttgcgcaggtcgtagaacatcaccaggaagtagccgttcgcgtccgtcaccgtccccgtcacgttcaccaccttcttcccgtagcacaccagctgcgccgtcgcgcctgcaccgcaccacgacacggtcagaaaaaaagaaaagaaatgtgtagcaatgggggacagagggagaagaggatcctggatgcgcacctgggagaggtgacgcgtccatgtcgctgctgtagcccctcgacttgcacgttttgcagtagaccacgccctccacgatgatgaacggcagcggcggcggggccaccggctctacggccgtgtcgttggaggacgacggggccggcgccatggccgtgtcggtgtagggcgacggtgccggcgccgtggccgtagcagcggacggcgaagatgacggcgccctggccgtgttgtctctgctcgagacgacgtcctcggccatcgcatggtgcgctgggagcagcaatgcagcggcaagcacgagcagtgccgagcagactacggctgtgtggctcctcatctttgctgaactccttgactttcttttgcttggcgctaattttagttaagttgcagtgtgtgatcagcgttgctccggcaccggctaatttatagggcgatctgggtctcgacttggccttttactaatttgcagtttgaccaaacaaacagcccggctaaatcagattccgttcacagttaatgcgtttcccgtctacgagagtagcctggggagcccggtgatgtattacaggggacgagtgcattgggaaagttacagtcctgccttcttggcagctgtacaacaacatactaggaccgtaaaaaagtttccgttcaattggaggcctcagcgtgtgatccaaagttccaaatgaaacgcccaaagagctccaaattgcatcaggtaatataaacgttcttctctgttcacttcatcacttcccttcctagatttgggaagcgtgtcaagatgagttttctgaacaagtgtcgcgttctcggtgaagcgagatcgacccgttcgtgaggatgcgcgcggttacgtggttttgagcggggggcgcgacctggtttgacttcacgggtaatgatgactgcgccttacaccggcggcagcctcgcgtcccggccgattgtttagtcgcgggcgataaatgcaccattagtccaggtaatatgaaatcctgcctgtatggggagctggggttaatctgccgcaacttgctgcatcagattccggtttactgcgtcaggtgatatgtgctattgctaccgatcggatctgcggcggacgagaggcctcaccatcgatcgcggcgctgaccgtttcacggcgcgtactgagatgccctctgcttgtcacttgtcagtctgagtctgacgccggagaactgagcgatagaaggtcttccgcggcagagagccagagatgttccagctgcgtgcagccactctgtatgcagcgtgggaaaatacatttgacaactctcaaactctgcagcttcgcgttttgcctccaccgacaaaggagcgcaacgggattttgcatccagtgcggtgcaggtgcagccgtgcaggtagcgatcatgcgttgcctgccttgtccacatgtagcgcacaccaggaaaggagaccaaattacagaccgaccgtgattaccactcgaccgggagattacggactgataatgcacttcactcttatctcccttccactttcgtactaaacttttccccctcacgtggttaaagaaaaaaagtataattgacaatgcatataacaatatcagagtgcattaacgtctgatggtgcatataaataaatgtacgtttgtacgcacgctatgaaaatgcatgccaataataaaatctaggggttatctattccttggtacaaattcattctttttagagactttttacgatcagattacaccatgagtcatgatcatacaataacattttatcctcttcttccctgtgacacccgctcgcactgtcacactctaacccgatcaccgacttatgctagcggcaccaccaagacctgctcaaactggccttcgccatgcccattttctccccgtcccctgtcacgagtgctcatattccctccggtttgataatactagtcgttttggacaagaacacggttttcaaaaaacaactttgactactatttttcattataatacgtataaaactgttaacaaatatatgattttattaaagtactttttgagactaatctatacatgtagtcaccatatttgaaagataaatattttaaaaatgatcaacccgaagggagtacttgtctaaatggcaacaagatgctcttgctctcatagttatttgcgtacgtcttcaccaatgacgccatcattatccccgcctcctaacccctcacagtaatgcatctctaccagtgacgccgcttactggctttctccaaccccatagctttagtggtgccgcaaccgcctttccagttgccacccttccatgtttgctgccccaccgttggtttgtcatctctcagtcatccatctaagctcaaaccctcggtactagtgttcaaccctagtgtctaatgctcacagcgaaatcctaactattagccctagggcccaaacactagtattgtttggtctcaacttgttgcattgaacaagttgaaaacaaccgccaatcagaaatagcccaaaataaccccaaaacatcaacttggtatgcaacctcagcctatctggaatcaggagagtactggttttcggcccgtcaaagatttaaagtttttcagaggaataagttcatcggaggtccctcaacttaacagtgagattttgagccgtgcactcaaggtcctattgtagtatatatgggtggtttcgctgacatggcatcctagtcagaattttttttaaaaaagtatgtggggcccacatgtcagctacaaattttttttcttctcttttctctcttttctattctcttcttcagtgagagagccgtcgctcgcccgccgtggcgtccttgctatcgccgccgccgccgtagtcaaagtggtggctcaggtagagcgtcactggagagacggagacgatggtgcgagcaaggcggtggtcgggccgcgtcttccgctccgcgtggtgctggcgttaatggtgagcaccggcaaatccgggccgtcggcaccgacagtgctcctgacctccacgatccgtcccccatctccctctgcccagggatctcgagcgcggcggcgtacgacgcctgccccctcagccgccaccgctcccgagggcagggaagccacctccacctccagattgcccgatgcgaagggcgggcggtgcctgccccttcagccgccgccgctcccgagagcggaggagccgcctccacctctgaggcacctccgtacgcctcagccacctccgccccgtcgccacggtgaagggaggtaaagggagcagcgcccgcgagccgtcggtcggtatccacggtgggtctgcatcgtggcgcgcttgtcaccgccgtcgctgccgcacggtgagtcccacctccatgatgcgcatcctcccagccagggacacggacccgaatgcgacgagccataccgcggccgccgtcaacgctttagatggctgcagaagttgggctgcggcgccgtggaaggagcatcctcgtggtagtcggacgagctgtcggaggaagccgatagggacggcgacgtggaggacgcaggcgccggtgtgatcctcttctcacccccaccaccggctatggccgcggcaatgttgttgttgttgttgtgatccccctcgtcggacggagcataggcagcggctccgggcacgggaggagcagaggggcggggtagtgtggcgggcgagcaccggctccctcacttaagaagagaagaaagaaaagagaagagaaggagaagaaaagagaagaaaaaaagaagaccagggtgtcacgtcaacgaaaccacccatatatactgtcatagaaccttaagtgtatggtttgtgtgagtttagggatacacatttattttttggttaagggacctaaaaaagctcgctgttaaattgagggacctctggtgaacttattcctttttcagaggaagccactgaggcctagatttggctattgaagatgggcttggcccagttaaggcttggtgcaaggatacgaaatcttgtccatcaacggttgatcagacggtcatcgattcagcggcctagggttttcgccccgccgtttgtaggattgcggctcttaaaagcccgggggcgactagtgaatccggaagggcattgcgcagcctccccattctctcccgtcgttgtggcgttttttttgtttcctccttttgctttgggatggctctattgcttagcgtgattttacctctcttgccgttttttcagattgatttgcaacgatttggagcaatgatgagatttgagtatgatctctgtgatgtgatttataatctctatatcgctacgttcttgctgagctcctcgttgctgttatcgttttgtttgtcgttgcttctttgagtctgtggagacgagcaattttctgctgagatctctcactgattttccttcggtctggattttttttgttctttttccttttctttttgtctaaagtgaaaacaagattgacgaaggtaatattcagtagtttccgatgtgatgctaatattcgcctaatacatgacgccgtgcagagagttcccatgagatcaggaaacaaaagatgagctcttgccgcaaacacttctagatattgcttaaccccggaaaagttcagcataatctttcataatagaacactggctctaagcagcaataaaggaaatctgaacgtcaagcgtccatctgtttctagttgaaccctgcataataccgaggtttgtaaggtacaaatacaatcggatcacccaattcatacataaggtacatgattcagtcgtatgactaacccagtttaaggtccaagccattgcttagtgaggtggatccacattccacatccttcagagtctgtgcatgagcaatctgtgcaggaaaattacagagcaacatctaaaatactgaagcatttcaaaatctcagaaagaaacaaaaaggagggtttgagaaatcaaacaaaaagttttggtcactttctctacccacgtaacccaatagtaagctactagcggccactgtaggtaggcttcatgagctaccctgcatagtttcatgtaggttgatgcagttgctttcacgaactgaaagctattccacttccatggtaaaggggttccatgaaagggtctatatgttctaggttagtatactttgtgtctctttatgccttgtaatggagcattgctcttgtctagcatcggtctactgtgcctgtgtatgtagtaccatgagtagggcatgcacgcttcctctgaatggtgcttctatagtcctatacttgcgtctatctttatactgtatcctatagtctgaaaaaaagaaccaaatatccaggcacagcaacaaaaggggaataaatttaaaacaaatctaccatggtttttcgatctattttctgtcttatttttatttttggagggaaagctatgtatcttgatccgtcaactaaaataaaccaatgatttctcagctaaccattcttataggctagtatttgcttatttatctctaatttagagatgaattaagatctgaaggcaaaactacaggaccaagaacaccaaagaacttagctacctgtttggatcaatgtctttctttgcacttgtgggttcaatacttatatgaaattgctgccaagtgctatgtttctcacgagtgtttgcctatcatctgtcaacatttgcctatgaagaacatttacacaagatttctttttgaccatttgaaagggaaaattgatgatgacgatgataatgaactgactaacaaacgaagatagtacaacttgataaatagccagaatgattatattctttaccttgtcgcacagcccgtaccgctcctcttgtcgccccctaatctgcacgcagataatcgaaaaacacatgtatattactagtgatgtttggtctcggttcacaacgcaatctgtaaatctgtacaagtgtcctgacggcacaggtatgaatcgtatcagaagtgggccgtgtttacgaaagacgtacaatgttctggaggtagcagatctcgcctccgatcttgcggtccttctcggagcgcaccttgcgcatggcggcctccagattgtgctccagcgcctccagcgacggcaccgtgtactcctcgccgtcgtccaccgtcatgaacctgccaaaaacacaaaagcacacacgatatcatgacgagtgacatcgatcagctcgcatcgagttgcttacctcagctgtttctccaggaggtcgcacatgctgcccaccttctccagctcggcgcgcctctcctacatgcatgcgcggtgccaaggaagagaaaaaaaaaacggcgcacgtttatttactggtgagaaaacgctcaaacaactgattactacgcgcgttgcgttgtactacgtgctacgtacctgcctgatatctgcccaaaccttggtgtgcgtggtggcctcgtacctctcgacaaactccctcacgctgcgccaagaaagaagcagcaacgaaacgtggattaaccaacaatgtcaggagacagcgcgcgcgcatatacatacgtgacggatcgacaagcggatgtgtggcagggcagcttacgaggggacggtgggggagaggaagtggtagagcttgccggaggcggagaagaggaggaggaggaggtcggcgtcgcagaggacggcgagctccctggccttcttgaacaggccgtccctgcgcttgtagaaggtggactgccgctgcgtggggttctctatcctctttatctcgctgcgccccctccccattctggccgatcgaatcctccctctcctccccgcgactccggccgccttcccgaactcgcaaccgcggcgcggagcaggcgctgcccgttaccgaggcgttgcgagaataaggaaaggttcgccgctgtagtgtatgtatgggagagattttgcccaggggatgcacggttatttttactgttttaaagaggcagatggaggaagaggagaggagggggtgcgggaaatgaacaagatggtctagtcctgttacatgtcaggcgccgcgtgcgtggcttttgcttcgctgcaggggtggtagggagcatggctgagagcctgagacggtaatatgtacgtgacatttgccaaagcgacggagacgcgtcgagggcacaggcacagtgggttgcagggggggagtctgttgctcccgcttacgttgtactactactgtactcctgcggggcagcacgtcgcgactatagctcgagagtacttctactgcattttgttggtttcgaaactatctatcggctcaaagcccctcaagcgcgctgaagagccatcccagtatggccttgtttaggcaccgtttagttttcaaaaacttttcacaaaaacatcacatcgaatttttggatacatgtatgaagcattaaaaatagataaaaaaaaactaaatgcacggtttgcatgtaaatcgtgagacgaatcttttgagcataattagtccatgattagccataagtgctacagtaacccatatgtgctaatgacagcttaattaggctcaaaagattcgtctcgcggtttccaggcgagttatgaaattactttttttattcgtgtccgaaaacccctttcaacatccgatcaaacgtctgatgtgacatccaaaagttttaattgaggaaaattttaagtttgtttgtcacatcaaacatacggacacacatttaaaatattaaatttagtctaataataaaataaattacggatttcgccagattacggatttcgccagaaaactgcgagatgaatttattaagcctaattaatccatcattaacaaatatttactgtagtaccacattttcaaatcatggcgcaagtaagcgtaaaaaattcatcttgcaattttacacgcaatctatgtaattggtttttttttctaaatttaatactatatgcatgtgtccaaacattcgatgtgacaacgtgaaaatttttattttggtaactaaacagagctatgccactgtacgtgtagaccgttacattttcacatagaacataaatacgtttttcagttcctaagcacactcagtattaagtatagtcgtatactatttgctatactccgtttcggtaggtctgagggggtgaataattgagcacacctgggtgcaaaattgataagagcatcctcaacagctcatctaaattccatcttctatactcttatttagatagtcatccaaaaagattcctactctatattacttttcactccaacagatcatccatattacatactatattttactaatttttacaactaccacatatgtatcaccactctaacaaaatttcccacctttatctcttcactccccacctttctctcttctccaccgctgatctccccgcctttctctcttctctaccgccggcgccgagaggacggggaggacgagggccgaccggaggggcggccggcgggtccatctccctcctcctcccgccgatggcccgtcgccaccaccacccagtctctgtgaaggggcggcgcgagcggcggaggggtggcggccggcggggcagaggggcggcagggtcagaggagtggtgcgggcagcggaggggcaacagaggagcggtggggcagaggggcagtggggtcagaagagcggcagcgccggcggagaccctgagcgacggggacggcggcgacctcactaccagatctgctgcctctccacctctactctggtgatctccacctccaaatccggtatgcacctcctctctcctacggtatgcagtccatatggtggcgcgaggtcggcagttgaggatggcgtgaggggagagaacctccatatttagcttgggaaggacgcggtttggaggtcctctaaaaatggcgtgtgtgatggaaggtctgctggagcgttgtttttcacctccatgcgccaaaaaggggatggaggaccggatagaggagctgctggggatgctctaaaggacagatatccgcgcgcactgcccccacgcggctcagccgcatgacacgcgtggaaaggggacggcggaagggcgcggggaaagagggcacgtggcggtttttcctcttttttctccttttttttagtatttttcgtttttacacattaaaaggtatagacacacacgtataaaaaaacatatttttgtctactgttagtattataataccaatattattaagtgtaaattagtaatttactaatacaatgattagaagttaatttgttatttatgtttttttctaactaaatcgatctacgatcatccattacattgggatctctcaatattcatcgaaaaagcaaaaaaaaaagagaaaagaagatttagttactgttaaatgatgattatactctctgcacctattttgacagtaatatccctccacatttctattaccgttaatagtgtgataatataaactagctgggtgacccgcgcaattgcgcggctagtagccaaacaaaatcatataattttcagtatgattttacttaagatttattaaatagctatcctcgtatttctaattatataatttttaaaagtcacaccagctgctaccccttacttctctcatatccttctttatttatttgctcggtctatcactatttctattcattctcctttaaacctctaaaaattggatcttatatatagttttttgagtttattatctcgttgagtttcgtttttataatttctagaagtcccgtcaaacgctgccattatactcctttacatcctgtctactctcttttctctttattgtcattgggattttataaattgaacataattattgttcgggtaccatcagcggctttaccattgtaatcctttatggctcgtccgttgcctcccttctttattatcattgagattttaaagtcgatcatgattatcattgtcttttttactttttagaagttccgaacctttaaaaattggaccttgtagtttttagagtttattgtattgttgggtttcatttttttataatttttagaagacccatcaaacaatgccactatacacctctacggcccatccaccacctatttttcattgggattctaaaaatcgaacataactatcgttgtaatttattttgtattttatacaagtcccgtcaaccgtcggtgcctctgcaactgtactcctatacaccccacacgctgcttcttctttttattctcattgagattttaaaaatcaaatatgattatcaatgggttttttttttactttctaggagtcccggcaaccgtcttgctatttggtgttttaatcatcattaggattctatttggtgttttactaacagtttttatatgtcgtatcaattgctaccactctaatcttttataggcctgttacttaatttatctcgtcacgtgttttagatggtctttttttaatagtctttattttttatcatcattttttttatttataaattatattcctaattgaaatcttttttcctttttctaatttcagaatttatttttttttcaaattttaattaataccgtatagtgttcttttaatattttgtttttttttattttttgaattttagttgtttcaaaattatattcctactttaacttttcttttctttttgctaatttcggtttttttatttttattccgaacattaactaatcttgtattgggttcttatatggactcttctctcaatattccttatttttaattccgaatttcagctatttgtaaattgtattcctacttgaactcttcttttattttctaatttcagattttattttatttttattttgaatttgtattaatctcgtattgggttcttatatggaaacttctttcaatatagcttatttttaattccgaattttagctatttttagattgtatttctacttggactcaccttttctttttttttctttttctccgattaatgtgggaatttctagcccccacagcgaacgtggtgcctcctttcaaagctgttttaatactataactagctgggtggcccgcgcaattgcgcggctagcacccaaacaaaatcatatcttttagtacgattttacttaaaatttatcattgttttttttttactttttagaagttctaaacctttaaaaattggacttatagtttcatttttttataatttttagaagtgccatcaaatgatgccactatgcccctctacaacccatctgtcacctactctttattgtcattgtgattctaaaaatcgaacataactatcgttggaattcattttttattttcaagaagtcccgtcaaccgccggcggctctacaactatactcttatacaccccgcccgctgcttctcctttttattgtcattgagattttaaaaatcgaatatgattatcaatgggtttttttttttactttgtagaagtcccagtaactgtcttacttgtttgcttcacggtctgcctgaagtccccccttttaatcgtcattaggattctatttggtgttttattaacaacttttatatgttgtatcaaccgccaccactctacttctttataggcatgttacttaatttatctcgttatgcattttagatggtcttttctttcaatagtctttatttttattataaattttagttatttataaattgtattcctaattgaaatattatttttctttttctattttcagaatttattttttaaaaaaaatagttaataccgtattgtgttcttttaatgttttaattttttattttcaatttcagttgtttcaaaattgtatttctacttgaactctctttttatttttctaattttcgatattactttatttttttgatttttctaatttttgatattattttattttatttatctcgtattgggttcttatatggattcttctttccatattgcttatttttaattccgaatttcaggtaattttaaattgtattcctacttgagctcttcttttattttcttttgctaattttggatttatttttatttttattccgaattttaattaatctcgtattgggtttttatatggactcttcttttaatattcctttttttttaattccgaatttcaggtatttttaaattgtattcctacttggactctcctttccttttctaattttggattttattttatttttatttcgaattttgattaatctcgtattgagttcttatatggaaacttctttcaatattgcttatttttaattctgaatttcagctatttttaaattgtattacgctctaatgtgggaatttctaacccccacaacaaacgtgatgcctccttttggcccgcgcaattgcgcggctagcacccaaacaaaatcatatatttttcagtatgattttacttaagatttattaaatagctatcctcgtatgtctaattatatagttttgaaaagtcacaccagctgctaccccttacttctgtcatatccttcttttgtttcctcggtctaccactatttctattcattctccttgaaacctcttaaaattagatcttatagctttttgagtttattatctcgttgggtttcgtttttataatttctagaagtcccgtcaaacgctgccattatactcctctaaggcccgtccactctcttttctctttattgtcattgggattttacaaatcgaacataattatcgtccgggttcattttttttactttctataagtcccgccaaaccgttagcggctttgccattgtacttctttatggctcgcccgctgcctcctttgagattttaaaatgcatcatgattatcattgttttatttttactttttagaagttccgaacctttaaaaattggaccttgtagtttttagagtttattgtcttgttgggtttcattttttatagtttcagaagtcccgtcaaacgatgccactatacacctctatgacccttccgccgcctattctttattttcattgggattctaaaatcaaacataactatcgttggaatttattttttattttctaaaagtccgctaaccgtcggcggctctgcaactatactcctatacaccccgcacgctgcttctcctttttattctcattgagattttaaaaatcgaatatgtttatcaattggggttttttttactttttagaagccccggcaaccgtcttgctcatccctccttttaatcatcattaggattttatttggtgttttactaacaatttttatatatcgtattaactgccaccactattcctacttgaaatattttatttctttttctaatttattttttaattaataccgtatagtgttttttaatacttttattttttttattttttgaatttcagttgaactctcttttatttttttactaattttgaatattttttattctgaattttaattaatctcatattggtttcttatatggattcttctttcactattacttaattttaatttcgtatttcagttgattttaaattgtattcctattttaacttttttttctttttgctaatttcgatttttttcctatttttattccgaatattaactaatctcgtattgggttcttatatggactcttctctcaatatttcttatttttaattccgaatttcagctattttaaattgtattcttacttggactctccttttattttataatttcggattttattttatttttatttcgaattggtattaatctcgtattgggttgttatatggaaacttctttcaatattacttatttttaattccgtatttcagctatttttagattgtatttatacttggactcttctttttttttctttttctccaattaatgtgggaatttctagcccccacagcgaacgtggtgtctcttttcaaagttgttttaataatataatagatagatagatagatcgatccaaactttacaattaaatgagatgaacggtttaaataagagcacaaaggaggctgatgagagaggagagactagaggaccgaaaactgatggtgcgaccttccgctgatcaacgccccccacgggtgtctttccatgggattttgtaggattcggccgggttacccgggcatgggtggtgagtactgagtagtaccggtgagaagccagccagaagcggcgtcatggtgggctggtggctcctttcctcacaggctagctacctactgtagcttcctgccgtggcccttgctagcactagctttacaggggaaagaccggaagacgacgacgagtcgagctctctcagctgtgcaggtgcagcactggttctggctagctcctagctcccggccactactgtgactgatggcgacgcgaggactgcacctgacacgacctatcctccctgcatcttgtggacggacggctccggctcatctctatcccaggctctcagcccataacgtcggactaggataactagctactcaaggatcatggttctggtccggggggcactgtagagcgtagagttgtagacatcgtcacctacgtggaataattgagttgttttctgatagcggtgtagcggagtagtagtagtgttcatctgtctcaaaatattattatcaggataggatgtcacttattctaagacaactagtctgcagggtggatccggtaaaatatagtagtggaggcggaacaaaatacgcagcaatccaacataaatcaaaacatgtatcacgtgtaaattggctaaatacctagtttaaagatcacatacattgaattaatgatacgtcgataattttgtccataccaaaccaatgtcgattagatgacatgtcatgcccaatcgcctattattcttcatgagtagtaatctatacaaagaaaaaggcaaattaatgaatgattgaaacagacttattttcaattcaaataatttagactaaactctgcccgaggtctctttggttgaattaaacactcgttactaggtgcaggatcactgacttttttgttgcttgaactagaattagaataactagctgggtggcccgtgcaattgcgcggctagcacccatacaaaattatctatttttaatatgattttacttataatttattcaatagatatttcattgtcttaagactttgaaagaccaaaccatatcatccccgtatttctaatgttgtaacttttataaaagtcacatcagttgttaccccttactttttttttgtcaccctttctttatttgtttgttcgatctaccatggcttatattcattatccttttaacctttaaaaattggatcttatagtttttttagtttattgtctcattgggtttcatttttttatttttagaagtcccgttaaaagctgccaatatacttctctatggctcatccgctgcttcctctctttattgtcattgggattttaataatcgaacataattattgtttgagtttaatttttactttctagagtcccaccaaaccgtttgtactcttctacggctcgcccgcttcttcccactatttattatatttgagattttaaaatcgaatgtgattatcattgaggtttattttttaattttttggaaatcccgccaaccgtcgtgaccattctgcttaacggcatgtccgtcgtcactccttttaattgtcattgggattctatatgggattttgttaatagtttttagatgtctcatcaactgtcaccactctactcctttacaaccctttacaaccatgttacttcttcgatatttattatcatttatcatcgttgtgttctagatgatttttttttgaaatttccatatttttcgttccgatagattttatttataaattatattcctagttgttttactctattttcagaatttattctattaattatttggaattttaattaatctcgttatgtattctagatggtgtattctttaaatagtctttattttttattacgaatttcagttccttttaaattgcattccaagttgaactcttctttttattttcttatttctaatttcggattttattttattttttattttaaattttaattaatctcgtattgggttcttatatatggacttgtatgaaatgagggcactgtattttttttctactgctgcagcctaagcgtgctggcctggtatttccaccctatatatgtgcgggaatgtatgttggtttagaactctataatgtatagttctgcaattgatttttctaaacggacaaggactcctagtacggatggtatgatccataattagattaatatgattatcttttgtacagtaaatctatttagtaattttaaatttgtattcctactcgaactctctttttttcttttcttctaatttcagaaatttatttatttattattctgaattttaattaatcacgtattgggttcttatatggactcctctttcaatattgcttatttttaattccgaatttcagttattttttagattgtatttctacttggactctttttttttctccgattaatgtgggaatttctagcctccacagcgaacgtggtgccttcttttcgagctgtcttaataatataatagatacgcgagtaatgttctttttgacatgttagacaatctaaagatgtatagatatagaaaacaattataagtatcaatcacaacctcattgaacttgaactattgagacacaatcttatacttgtcttttagtattagagtttcaatcacaatcacaaccagtttttggcttgctgcctgcctgccttgccaccttgcgccctcgcagcgcctcgttggagagcggcacgccacctccccggcagcgtggcagcgcaggcgctggaccaccgcgtctcaaggcccccccgggcgccctccaatccgcccctgctagtctggatgcactgtccagatttattatttagtatgaacaaaatcctatcctaaacaacaaaattttgggaggtagtactacgaagccactgccagcaatttctccaaataaaactagctgggtgccattgacacggctagtgtgtgaatgacaaatgggtcccataaatatttattttaattctaatattatataagcgccacgtgggatgaagactaggtcaacgccaccacgtcatccaaacagtcctccaaaatctccgagggagttaaattgtactggtttcaatagttcagggagtcatcctttccaattttgtggttgagagtcatggattagattcccgtcactttaagggagttgaagtggacttatttctatattctatagtactccaatatcgcatttgggctacttggttgggctcgttgctacgttgcatttgggccgtgggagtacgttttgcattgggccggtgagttccttcttctcggcgtgtgtattcgatttgggcgatatgattcgtttcgtggacaggtttggcgctctttttggttgtggatattagggcatgtataatggtgtttaatagtaggccctctttgttatcacgtaagtaaatttggtgacgtgaaagaaaaagagagaagaaaggagaaacatcgttgctacgcatgacaacggctcagaatcgactcttagcatttattaacggaaaatttattgcatgaaggtggagaaaagaaaagaaatataataaaaaatatttatgcattaatggtttagaaatcttattgtctctactattgtaggaggatactccctccggttttattttaattgacgctttggacaatgacacgctctacaagatatatctttgaccttatttttctattacaatatatacaataaataaatgcatgtttacttttattatagtgttttgaaagacaaatatatatatatatatatatatatatatatatatatatatatatatatatatatatatgtttttctagtttctttaaactaaatatttttaaagttattgatgggcaaagttataaaagtttaatctcaaccttgttcaaaacgtcaattaatatagaatcagagggagtagtctctagtggcattaattaatatagagagctcatattaggttctacctttttgtacgtgcgtttaaccggcatgattgtgtttaccattgatgactatagtagtctcatttattaacctgttcaagactgtctaatcgtggttcttgaacaatcgctatgtgagacatgacgagtatttgaggactgtaagcaacagcgtactgctgaaactgaaagtatgaaagagcggtgcagtttgaagcacaattctttgtacaggactggatttaaccatcgtcagtactgttttgtattttacagtgtggtaattctacatcttttcacctggtatatcggttcttgtatcctgaagtttcggggtatattaaatttctttcgtgtgatcaatctggatagagtattgacaatgccgactaactgacacatgttaatatagcgaccaagctagtagcaaaaatacaatcaggtcagtaggtcagcaagtatttcagggaaaaaaaactttgttacccaatgaaataccaactggcctgagagcatcaccaacagattatctataatctttcctcaaaaaattgtttttggtttcctaaactgaaaaaaggaagggaaaaaactcctccctccaatagatagcctaaattcattccctaaaacttaaaagtttttttcttccacgcgcagaaagatcgctatcttccacgcgcaggaacgggaggagagagaggcgggagtgcgagattgggagcgactttcgcgagaatgcacgcccgcatataaacggagtgaggaatcgagagaagggaactccaaaactcgggtagaagattaggggatttgttagagcagttttttagactaaaatcccttaaaatcagttttaggaatcagatatgtagactgttggtgatgctctcaagtcaagtagcggacgatatgcgattttttttaaaaggaaaattggaaactctaccaatcagttaagaaggaaattaagtgaagtacatgtccacaagatcggtccaccggccaggtcgagcaaatatatactatataatatatacactacatattatggggtacaagaatggatactttcgggaaacaacctctgcgcaacgatcataaatttctaccacaacttgaaatcttgaataatggccagtagccaagtacattgtcggtgtctgccgtctgcgtggcatggcactgctgaacgacgcgtggtcgatccaggtacatgccattcctatgtatgcgaattatgagagcagaccaatggtaggtgaaacaaagaatgcatgaactatagcagatatgaactcagcagatatgaactcacgagccatgacccatgagtgtgttgaagacgagagcctgtacatgtatcggagaagaccaaagcaatgttgctgttcatttaagggaggaagcaggtgaggaaacaacattaacaccactgagcacacactgcgcgtagcaaaaatgagcccatcaccacgtcccagcgtcccgctccgctcttcgcggcgatgggcagcgccgtgccgacacgacgccccgagatggctacctagctgacacgcaacgccggcctccggatcgatcagtaaagagagtgcagtgcagtgcagcctcgtgtcgtcatgcacctggaaggaaaaggttactgtatttctgcttgtgtgcgcgattttcgctgctagctggcaatcgtgggatttgcagcgtactgtgcaggcccagtgtaactcgacgccacgccggcccatcgtatttaatgagctgagtgtaagcaggtacacaggccgcccaactaacctccttcacggcgcatttacgcttgggcatggccggtgtaaccgtgcaagcatcgtagtgccatcgatcgctgctgtaagtttgtaacatgtgcgtgtcctgcggagagttgtgtgccgttgtgcatggaatggaaggcaaagcataacatgggagcttttcatataaaggccaccagcacgcgggctgccacttcaagcttcagctcgtgatcccatcagatcagcaagcagtcgcgaaatggtgccgatggctaaggctctcgcggtcgtgtccgctttctgccttcttgtggcgccggccgccgcggcgcgtagcctcgtcgacgtcatcggcggggcgttcggtggccggaaggactactacacgcccggtcctactggccagcaccactcttctagtcccagtcgttcgtacattacccagtctcttccatatcttatcttgctactgctcggttacgtcaactggtcaaacgtacgacgtaatgttcgtgcgtgtacgtgtttcccatgcagattcgcacaaggctccgccctgcgcgccgacgccgccacagggaggtggtggaggctacaacccaccctcgccgtccattggaacctctccgacaacgccgggaggaggtggaggctacacgccgacgccgagcgacacgccaccctctccgtccagtgacacctcgccgagcactccgggtggcggctgctcgtcctcacccacgccgtgcgacgcaccgccctcaccgtccagtgacacgtccccgacaacgccggggggaggtggaggctactcgccgacaccgagtgacactccgccctcgccgtccagtgacacctctccgacaacgccgggtggaggtggaggctacacgccgacgccgagcgacgcgccgccctcgccttctagtgacacctctccgacaacgccaggtggaggtggaggctacacgccgacgccgagcgacgcgccgccttcgccgtccagtgacacctctccgacaacgccgggtggaggtggaggctacacgccgacgccgagcgacacgccgccctcgccgtccagtggcagctccccgacaacgccgggtggaggtggaggctacacgccgacaccgagcgacacgccgccctcgccgtccagtggcagctctcgcactacaccgggtggatgctccactcccacgccgtgcggcacgccgcccgcgccgtcgagtggcacctctccgaccacaccgggtggaagctactacccgcccacgccgtccattggcgacgtgccaccctcgccgtccagcgacacctctccgaccacaccgggcggaggctccccgtccacgccatgcgacacgccgccctcgccgtccagtggcacgtccccgaccacgccaggtggaggctactacccgcccacgccatccgtcggcgacgtgcctccctcgccggccagtggcacctccccatccacgccaggtagtggaggctactctccgtccacgccatgcagtgcgccgccgtcgccttcaagtggcacctccccaaccacgccgggtggaggctattctccttccacgccgtgcaatgcgccgccctccccttcaagtgacacctccccgacaacacctggtggcggcaactacccgcccgcgcccaccattggcaacgtcccgccatcgccatccagcggcacctccccgagcacaccgggtggtggctgctcatcctcacccacgccatgcgacgcgccgccctcgccatccagtgacacttccccgacaacaccgggtggagggtactacccgcccacgccgtccatcggcacctcgccatccacaccgggcaccggcggaggctactaccctccctccccttccaccggcggctacacgccgactccggacgttccgatcagcaccccgtcgagcccctactccccgctggtgcccacgccgccgtcgagcaccaccccgatgcccttcgaccccaacacggcacccttcccgtgctcgtacgttacttcgtcaaccttagcgccgcgcatatccacacgtacgtcgtgcataatatggagtatatcaggtgcatttactaatctaacgcacgtgtcgtgtgcgttctgtctgattgcagatactggctgtcgcacccgggcgtgatatggggcctgttcgggttctggtgcccgatggcgcggctgttcgggccgaccgccgcggcgccgttcggacacgacctgaccgtgccggaggcgctggcgaacacgcgcgccgacggcgtgggcgagctctaccgcgagggcacggcgtcgcttctcaactccatggtgaacagcaggttccccttcaccacgcagcaggtgaaggacgcgttcagcgccgcgctcagctcaggaggcgaccacgccgccgcggctcaggcgcagctcttcaagaaggccaacgaaggccacgtcatgcgttaggctaggcggcctctcgatcctctgtacttgaacgtactcgccacgtgaggcggattcgatgcgatgtacacgcgagcatgcgtgcaggttcatgtcggggtggggtttggagtaatccggcgtgtttgcaactttgcattatgtttgatctagagcggatggcctctggaataactataggagagttaagtacgtatgttttgttatccttttagagtccatggccgcacggaatgactacaggagtgttctctgtggccttttaattcagtatgtacttgtggcgttaagcatcagacgtgttctagtatttctagttctatgaactactggcatctttcaatttactcagctcttccataggattcaatactcgaaaccatatgcattgagatttgaatactcgaaactatgtagagaatgttgagaatgagcagttatgtgcatttgagcaactcctaaccacatgatcacaatctaacggtttagattacatcgctacactaccaaaagagtttggttgtttagggtgtgtttagattcagaggtgaaaatttttggcgtgtcacatcggatacaccaacacacatttaaagtattaaacgtaggctaataataaaataaattacataatccgcatgtaaactgcgagacgaatttattaagcctcattaattcgtcattagcaaatgtttactgtagcaccatattgtcaaatcatggcgtaattagacttaaaagattcgtctcgtaatttacacgtaaactatgtaattggttttttccgtccacatttaatactacatgcatacgtctaaacgttcgatgtggcagggtaaaaattttttggtgggatttaaaccgggcctagttcccaacttttcctttaaacttccaacttttccatcacatcaaaactttcttacacacacaaacttccaacttttccatcacatcgtttcaattttaatcaaacttttaattttgacgtgaactaaacacacacaaaatctctgtattgacaggaattgtactactgtgccatgcagtagttactgtagcagactcataatgccgttcacacaggatcagctctgtcctgtgctgcaaatgatcaacatccgagaggagacggtgaaaagtgagaacttgtaacggcgatgtcttctgcaagcctcggtaggcttccttcatattaggattgaggtttcaaggctagagacggtgaaaagactaccatagaacacggaacgagatcctacgtcagagggacgtccaatacgggatcactgttcgtagcgcatctgacggcaccaatcgttcgtagcgccagttcgttctccatcttcgacccagaagaccattcagtcgtcgtcgccgccgccgcctccgcctgcttggtcttatcgccgaggacgccgcctgccaagtccaacaaccacaccatgctagtcactcttcaacatggtcggcaagaaagtgtagtttccaccattgatgttggtgagctacacacctatgcagggaacgaatcgacggcagcttcatgcctggtgcagaagccagacgcacgcacaagtgttgatgaacctgcaatttgtagagcagccaggagtggccatggccgggcacgatggcggactgcggtgcccaaacagcagcggcaagctagagagacgctgtagccgacagcgtgatgaatggcaacgagagaggagtagtagtcggcgacgcggtggacggtgacgagcgagtagtggctccgcgacacccatttttcccttcgcgagcgaacaaagccagtgacgtggtggacgatggcgagcaagtagcggcacccggcgtcgccgatatttccccctcacgagcaaacgagagcagttgcaaatgaggaccacattgcgctattcatcaggagcgttggatgcttgggggcctgtggatcgaagagctactgccctctggcctctgacgtagttttcccaacgtcaaagatccggttccgtagaacacctaatacatgtcggctctataggtatcggaagtggtgaaatcaacacctacagtgcccttgccaccgacacgagtgcatgttagcacgaaccggcacctttctaaagaaataagtgccgttctaaagaaaaaccatcatcaatactataaataccagtttttataaaaaaaaacccgacatctttagtttagtttattgtaggtgctggttataaaacaccaacacctataataaattatatgtccagggttttttagaaagccaacatccgaaaaaatcgagccgagccaactgcgtcttatccagtcacacctgtccttatctcctcacccgtgactctctctccccctctcttgcgactctctctctttcttcctctcctccccacccgcgagccggtagcggtgtcctccacacccgcggtagcgcccttccctaacaccctcttccgcggtagcaacaggatggaggtggcagcagcgtgcggcagctagactggaggcggtagcacgaatatggcagttgtgggtggatctggtagtggcgacggctccctccaacccctctcgccaccctcccacggcggattaagcgctggtggtagccgcgagtggatctggtggctgttgcggtggtggtagccgccatgggtggatccgtcagcggtgacggcggccgagggcagatccaacgccggcgggagtgaagttcttggaagttctttgatgttgtgattccatgattccttttgtgattatgtgatgatgattgtggtttattttaggggtgcaaagtgtgattgattcgattccaagtggaatcggtatgtgactattgacttagtgttcttgaatgtttttggatttcttggattgatcggggtgaagggaagctactcggctcggtgcatcagctcgcgtcgagccgatgcatcgaaccagcttttttttattcgtggaacctcaaaggtgtcggttctaaactaacaccagatccggcacctatttgattttcacatcagtaccgccctcgtgatgccggttgggaaaaccgacacctaaggggatttctgtagtagtgaaaggggtagaggcctgttaaatatgtgatctgaattttagacttgcaatatattcaaataagtttcctaatagaacttgactattatgattagttccctagtatgacttttaagtctttcctcactaggacttctagatttctcctatatatatcctgagaaattgtaattattgaatttaaaaaataaattagaagctagctttctccgttttttagatttatagaaacttgttatcaaaccactggttcttaggctgcgttcaacaaatgcagtcagagattagttttcgtagcacgtgaaaagagacagaccattagcagataattaatcaataattattattataaacttaaaaaatgatttatttttatttttttaaagcaacttctataaaaaaatttcttgcaaaaaaacaacccctttggtagtttgggaagtctactaacgaaaaacgtggaagttataatttaaagttgaaagatagaatggggcttagaattttaagctattctaaaaagggcatgaagtcttttcctgctgaagcggaaggaataggtagcagcgctagcgaagatagagatgctaggccaggcctagctatagatggccaaatgggccgcccgacccggcacagcccaggcatgactgtgcctggccgaggccatttgggccggcacggcccaacatacacgtcgggtcatgccgcgctagcccacgggctgcacatacgatttaggcatggcccaataagactttggtcgtgccgggccaacccaaaggcacgacagcccatcgtgcttctccacagaataggtatattgttcatccctcaactatttgggctttgtctatattgctggaaaattagtctattttgtattcctcttctctttgggccttgccttatatggttgattaagtatattttgggtccctctattatttttcttccatcgtgccgggctatgccggcctatcgtgccgagggaacaggcccaggcacggcacgattgtcgggctaggccggcacgggcacaaccctagtcgggccgtgccgtgcttggaccagaccaaattaccgtgccttgggccgggccgtcgggcctcgggccatatggacatctgtaggcccagctagacgcctcggctagactacttatggcttgctttgcttcttgacaagacataaatactcaggacactaatgattttttgctaattacactacttaatatgcttagaactaataaatcactcttagaattaagcatttgcaccatggtatgtgaagagtggcccaatgatattttttttctagctccgcccacaactcgtatctatatactctatagatggccataaggcccgaggcccgaaggcccggcccatggcatgactttttggcccggcccaagcacagcatggcccgacttgggtcgggcccgtgccagcccggcccgatcgctgggccgtgtctgggcctccccgccggcacgctgtcgggccggcccggcacaatgggccggcaggccaggcccggcacacaaagtatagggactaaaaatagacatataaatgtaactgtccaaagaatagggatcttaaatagacttattagctatttatataccacagcccaaagaagagggaggtaaaatagacttttttagctatatatatatgtcacaacccaataggagggagggaaattagacttattccgaggcgtgttgggccctgcctgtgtcgtgagtgcggcacgtgggctggcacggcacggcccagtgtgtcggttgggccgtgccggcccgacaagcctcagcccaggccgtgcagtgccgggcggccccacatggccatctatatactccctccattccatccctccattccattttaagtgcaaccataaattttcgttcccaattttgataatccgtcttatttgaaaatttttttagtatttttattattatgagatgataaaacataaagtaggacttaatacgaaacttatgttttaatttttttaaaaaaaaattttcaaattagacagacggtcaaagttgtgcacggaaaattatagctgcacctaaattggaacggagagtgtatttgatatttcttggagcccagaagccagatatatcagtctcctaccaaacaattttttcgccggtttcctggcaaacagtatcaaaattttttggctgagggaaaaactagcgcgttgtttaccgtatcaaaatacaacaatcaatagcatagtgcacgtactgcaagtttgcaacagccaatggttcgataacaggctgatagcactgcggaaatcaaaatgacaagcataaaggccacaacagccaacagcgatcaactcaaatgctcaattagattgtactagatttgttttgaaaaaaaaatgtgcatactacacagtcccaccactcgcgtggtaagttcgaagaatctgtagcaacaaataaccaaaagtaacgagcgccggccgaggcaatggatagagctgggaatgaaccagagcagatcccaaaaccatataacgttgcaaacacaaaactgagacatttctttgcagggaacaaacaaggtatcaacgtaactataaaaaaactagctggacataacaccttatgcataaacatagcactattctagcgaagggtaacaattacagtgcaagctgacactagagaggaatctagtctattctattctattctattctattatatactaaaagtccattaaacttcctacaaacgctcctaagccgccacatggcgctcctacaaacactcctaaaccgccacgtggcactatctaatctcattgttgattttcacttagattggtgcaccgttaatttagaccattagattagatctattattaaaaaggtgatagtttttctaaaaaaatatgcaactggtggctgggaaaaggaaagaaaactaaatgtccatacgcaagtataattgagaaaaaaacaaataaagcttcctactgttaggcggaagaaaaagaaataaacatctacgtacgataaaaaatgataaagccaaaaaaatgtgtagttagtaccggtggaaaaaaccacggtctaatgtacgattttgtataatataaaatataatattacataatatacagaagtacatgcatgtaaactagatctataatataaatatcaaatatcaaatcaacggtctctaaatattatcttttaatttatttttaattgtatatccaatttatgatccattgtattcatttaattatataaagtaatgatgtataaaagtaatattatggtcttaaatacatcatgacacattgggtcgacatacaatatgtaactttagacactaaaaatctattaaacttcctacaaacgcttctaaatagccatttggcgcttctatgaacggttctacgccaccacgtggtgctctaataaattatagaaaaccttacaaattgtgagaaaaaaaaaatcatgcaatcatttttattggttgacctactattttaaaatattagattagatttatttaaaatacatctaatctgctcaaataataaaaaacacgtgaatagttatacgtatatatatacatacttccgtactttgctagcttaaaaaaaagaggaaaaaatgtaattaggattgaaaaaagaaggattagccatgccacggtcccacctaattgttacgagttacacgtacataggtacctttcacccaaaaaagtgaaaaaaaatctcaaatgtacaatgcatactactattcaccagattgagaaaaaaaattctcctgggtatgtacaaaccctgtcatcggctttcacttaaatcatttagaaaaattagaaaaataaaatctccatctcctcctcactctcacatctacgcaacactgtcgtcccctccctattgttttatctattaaattaaaagagaaacaataaataaagtttgatattttttaatacaaagtagaaacgtgggcactcacaacgcgcgtacactcacatctatgaacgcgcacatgcacatactcctatgagtactttcgagagactaggctgatatatattgagattgacaaagtcactatatatgtctcgctgtcgacgggtacgtcacctactactgaaagaatttgtcaagtctgggatatgaacctgagtgggtaaattccatcactacgaacctaaccggttgagctacgttcacttcacaataatgttggatattaaatcgaccataatttgtaagctacatttctagaatacttatatgccttttaaaccagtggaatcattatttctaacagttagatctatcttatataagaaaaaccagatgtgtatatatggtacatcacatttcaaaaatattattgtgcaattatatttcgatttcacattagcttgcatggaacttctgacccactctacatgaaatgttcatacatggatcggctctcaaattacattaatcatattagcctatataaatccatatatttaatggagcatcatgtcccacccaattaatcgttgaataaactatgataatatatatgcaattaaaaatgaaaaatagcttagttttactttacacttacttttcgttgacatgttttctaaagaaaataagtctaccttcttttcaagtgatgtagaagattataaataattgcttatagatattacttaaatatgatataatataaaactaataggttagaaaattataaaagaaattaatgtcgacaaaaacaatttatggaaaaatcgtggtagatgttcaccggttaatattttgctcttataagtgtctcaaacttagcatatgacacatgcccgcgcattcgcgcgggctaccttcctagttctttatagaactcaaacttctattatggcgcactactaaaaagccataatataggacttgtaggactagtcgggcaccttaatagagaaggtgccctttctactgtacagtgccccttgtttgatggatttacacatttccagattgtagattgctgccatctctaccagctgcagggtgcgatgcaaacctttccatggagacgtctcttaaatatggtattgtctttagcatcagtatgtaggaaggcgtgataaagatggttgttccaacagctgcccagaccgacgacatacccttgaaacaaatgattacaagaacaatatacactgccaatattatcaccatgctaattttctgcaaaaacaaatatcaaccagaaaaaggttagtaagtggaaataagtttcagcgggtgaaaaaaatgatattatggtgtaatggctggattcaatagctgtttgtagtggataaacaaaaaaaaccaatacatttgatttgttttgtagaaataaggctgagtagttgagtgacatgaaagtaaagttctatgtatacctaggaatttgctgcattggtggtgaaaattttcagcatggtgagcaataagacatcggtaactaagactcaaaattgggttgatttatacaaaataggtttctgaaacaaacctagacagaatcagtggttccgttatggtaatactgattgacttctgtcagatacgaatacaaatattatatactatagaagcacgacactggcacactgctaaaacaaaatagctatttggtttgatgtccaaacgagaccaaatttggcttgtttctctatttgaaatggccaaaacttagcagatcttgccgcatggatttggcaatgcaaagttcagcttgaattttatgtgattattagtttggaaaataagaaaggtccaaattttaaccgactgttggaaagattgctcggtgccaaactgcccgcagtcagtttgtattgaatcgaacagttttaccagatagggacaccaaaaaattcgtgctgggtgagacacatcagacagggattgaaataaaaagcgggccgtagccttcgatccaaaaacatcagtcagggaggcaggattacagctagaaattaggaagggggatctgaagcttgacttacactgagcacgttcgccaatatttgattcttggtgtcagtttccccctgcttcgtctcgcatccatcaatatcctggcctttctcaagatcgacgaattcggttggttttgtttctccccctttctcaaaatcgacgggcttgggaagctccatctaatccttgtgagattgcctagagattccctgtcttgctctcctaggtaaggcggcgagagcttcttgcagatcttacaaatgcgcgctacggcggcttcgttggggaatatgtgagatggagaactctccgattccgaacactaacgaagaattacgcgcacgcctctccgattccaagtctgtctccaacaccttcacggattcacttacgaagcgcgggttcaaggtgaccgcgtagaatcacattccctcctctgctcccgtcgccgctgctcccggagtagctgaccatggagtggctggcgtctcgctggcgtacgccgacgtcagctcctcggactcctcccctcccatcgccgctgctcccgccgtagcggaccatggattggccgcgcgccgtcgtgctgtcggacgccggagggtcccagcaatgctctggtctccatcgattcgcgcctgagatgctaaaaatgctgtgataaaccctagtgtccgacagtccgaggtacggtggcggcggcggcggaggagctaataagctctatcagccttcccccgttccccgtcgtccggtggacaggttagtgaacaatggatgtcggatcaatgcaaatgtcacataatcctcttgataagggctcttttggaataaaagatttttaaaggattgaattcctataaaaaaaactttaaagctttcttgaaaaatcattaggattgtaccaaatagagattttagagaaaacttagcaagagttccaacctcttaaaaaaatttatgaatctatctcttgaaaaaaaatattatgcaatactctaatatttgtttgaatcaaataaataccatgtatttaaacaagtaaacaaacaaacaatactaataagaaatatttttctatctatgacaaatcgttatatattttcttttacctatagcagagcatgggtattttactgtgtagtagtaggtagtgtgatataattaacggcaaacatagctagcatgtcgactattccaattttctaaaaaagatttcaagtaaaaaaatatagataattttatatcatacttcctccgtttaatattacaagatgttttgcctttttttatagtcaaatttctttatattcgatcaaatctatagaaaacatagtaacatttcaaacacaaaataaacatactatagaaacatatttaatggaactagttttttgtggatgttgttttttttctatagatttgattgagtaaacttgtccaatttaatagtgggatcaatatatttttataaatgatacgaattagattacacctacatttcgagggaataaaagtggacttattatgcatgagtttacgcgggcctgtgtagcccaaacccaattccactcttgggctggttagctttctagcccaatattacacgatgcagcaaagtgccgcgcgtgcagccagtaagaatgtactccatccattcacttcagctagatttcttgacagccactttggttgacgccttgacggtaccaaactgttgaaccggccaggcgcactactagagttctcatacaggtcatatccatctttgatctttattgaagcccaacggccagagatgtaaatctccttcctgccaaacattgtttttcctccgggcctcctgccaaacaattaggccattcgtgcatgcgtgcgacttaaggggaaaactagcacgtagtttagtgtttaccatatcaaaatgcatccgtcagtagtgaaagtttacaagttgcaacagccaatggttcgattgaagactatacgtagtccccattcagcttacaggcgtcgtagttgggttgcggtggcaattcaatacggctatacggccggccggtgcgagagccctcgcgcaacaaccgtataaatcgtctgcatttattcgtcagaagctcaagctcagctcagatatggatcgcacgcatttgtgtccccctggtttgacattcggttgattcacgacctcgaatgaaagagcccacttgctggactggatgtacgacgcactgaaaatctgaggcatccttgtttctcatcgatctgttggcaattcgttcccattagctttgacaaaagcttctcctttcgcagctcaggacagttcagagagcgggaccatagacgtactgtacctcctatagtccatagatcgacacttccgagttcagactttggaggaaggctagagattgaggtacggctaatgagctaagataatgaaacaaccaaaaaaattataggtaattttttatatgtatttgaattgtttgtggcttaataactaaatatagctagtaatgaaaaatacactaatactctcaaggttccagaataattttatttttggtcctcctatttatcctaaaacaagttgacttttaaataatcctagattattatattctgaaatggagagagtaatactaatgtaggcatagattagacttttactagtactacaaatctaaatatggagttgattcattgaactatggctgtgtttagtttcaaagtttggggagaagtttggtagtttggaaaaaaagttaggagtttatgtgaataggaaagttttggatgtgatgtgatctgatggaaagtttagagattgggggaagtttggtgtgaactaaacagggcatatggcatgtctaatactccatccgtcccataatatgataagggtttggaggaatgtgacacagtactatgaatcgatatgttatatttgggacagagggcgtatgtgactagattattatattttaggacggagagggtaatttcatcgggattgataaagtggtgatattctagtttttttaatgtgtaggatatgtgaaaaataaattatttaagacaaagagaatataactctaaacttaaatttaaaaaattatttttttctacggctacaagcaggcgataattcaaaaatcaagtgttacagatgcaactgacctgcagacagaaccagctgaggttcaaaagaaaagacaagtgtcaaccgacgagctgcatcctgtattgggttttccctgttcgaaagaactgaagaatgtactactagcgtcattacaaaccagtcgtccccttgtagtttgttgctcacgcaatcatcaatgcgcgcaagcgcaaccatcgaaaagctccggtgccgaatcagatcagtggatgattttttacttggatttccttttggcaaattgacccccatcagaatgtcaaaccgtggttgttatcttttgatgtactccacctgtattgcgcgcatgcatgcgttgtcaccgccggcccatttcatgggcgcgccacgacaacatctgctgcaggtttgtggagctctggcctcactctcgtacaagtgcggtgaggtaacagatcaccaagtaatgtgcacgccaaagtcatcgtttgaggtgtcgaaaaaggagcgattcatgaattcaatacagtactactgtactagtatcaatttattacaggaacagactctgtttgtgagctacgtgtactcatcatcttaaattacgggagtacagactacagagctccgcacttccgctacaaaaaagccacagatatcctttacatctgctccatcctttccttcatcacggcataagtttgcggatgctgtcaaggagtatatggtactcctaggtactcctactaacacaactacacaagcgaggatgtttaggtgttaggacattaggtgcactgttaaaagtggagaaaagtaccgagtcctgcttgaagtactagcaagctgaaacgacatgactactagagcaaagtcaataatgcagctaacaacggacggtaaaacggcccatgtcagatagtgcagctaatactaaaagctcagtttttactagatcagtccatcatgtgattgggtggtgttaggttggccccacaaaatgtgtgaaaagctacgctgtaaccggacagtaaaataagcgttggcttatttctctctcctaagttctctctcctccatatagaaattaaatgatgtgtcatattttgaagcctgactagtcagcttattgtacctgctctactgatcttcccatcagctgttattcactgttgacgctggccccggctagtgatgtccacactccacagatcgtcaccgttatccattgatatcggtgggggcagtttggtaacaggctaggctagatgcacgggtacgcttggcagcattttgcccacattggtccctggtacggtaaaaatccaagttcagtctccattaaatcctacaggaccagcaacggagcctatagttacatacacacgaaccacactcttagctactatctctatcttaaaataagtttatttttagcttctttcaaaaaaaaaaaaactaaatatcacctactgtatcataataagtttattttttagcttattttatttgttccaaaatatgtttttaaaataactattgtatcaatgttcgtgaaagtaaaaaaacagtagtattaagagtagataaagcaaaaaatatttgcattagtatttgataaagtaggtggattatagttttttttttgtttttattgttatgtgtgagataggtgaaatttttttaagggaaaacaacactagaatagtttactgaaaataaatttgtactccctccgtttcaaaatgtttgacaccgttgactttttaacacatgtttgatcgttcgtcttattaaaaaaaattgtgaaatatgtaaaactatatgtgtacataaaagtatatttaataatgaatcaagttatatgaaaagaataaataattacttaaattttatgaataagacgaatggtcaaacacgtactaaaaagtcaacggtgtcaaacattttgaaacggagggagtagtattttagaacggaggtaacgtagcaaacattttaggacaggtgaagtaagttacatcatgtagtggcattagacaatttaatagtttactgacactagcaatacggtagggaggggacaaaaattgagttgctgctgcgaggtgcaaagagcagcgatgtgcggcgccatttcgcgttgaatcttcagtactattattcactaatccgattaagcagacgaccctagtacagtacaggtatgggtaggagtttacgcgcggttacgccgtgcaagtgcgaaagctcagcggtgggcgatcgctgccaagtcggttgataccagcagaagtgctcgtcccaggagccaatgataagagccaaaaccgacgggctcattctccagcttaactctcacaggtggtactaactgctggcctctggcataactccgactggccgcctgccaccacccccacgcttagtagcattcaaacaagatgcacgccatgcctgggtcagccagcatccaaatccaactcactcgagcgcgagctagcccagccgtcacatgggagatatcgtgcgtacgcttaactaacgagacaaagggccacataattatgcgggggctcatgaccaattaattaacggtgttttgcatgcgagtgcgacgccgcagcgctgcactgcactccactccactccacggcagtctgcagacgcggataagcgtttcgaccgatcgggccgcggcgcgagggaggggatcggtgcgcgcgtcgcagtcacgcccgtgtcggtggtctccctccccctcgcgagcgattcaggtcgctttccgtggtcgaacccggcaaatcccatcgtcccattcattcgctcactcatcgacccgccctccccctccgccgctgccagattcgccgcgccccctaccaggctaccacctttgccacaccctcccagacctcgcatcgcacactgatgcggtgatgcccgcaccgtgccatctctctctcttttttacttctcgggctttccttagtttccttcgttttcccacacgcccacgcgcggacgccgcgtacttagctagcaaggctagctagaagctcccatacttgcacgtacgctttcccattctcttttgcttaaaccgagctagagctttgctagctcagttcgtccatgagagcagcagcggcgggtcggcagcctcgcttgtagctagcgataatgaaggtctacatcacgtcggcggcgccgctggctggcgaggcaacgaaggcgatggcgtcgccgccgtcgccgccgccgcaccagcaccagcaagcggcaacaaggcgcgggtgccggtcggctgtcgtgacggggctcctcgccggcgtgctcctcttccgcgccgcgctcctcaccatcgaggccggcgcatccctctgcccttccaccaccggtaagttttcacttcgcacgcaccgaggccaccggcggctgcttggtgaattgcccattttcgtttgcgatatgatcatctctgacgcgattggccaatgctccaggatgcttggactggagggccggtctcggggactggctgtacggcggcagcggcgacgcgatggaggtgagtctttactggtcactggtggtgtgctagtgttaggccggcgcgtgcactgactgcaccttcgatcgtgcgactaacacagtcagagtgcgttaggaaacaggggtgacttttatgcgccggggttttgacatttgttttactacttttgcgcgcggcggggcaaagctgtagtacgggacgaaacacgccgttgggcacggagctcctcacgcggttggggcgatttttttttccgcatggttcggctcgctagcagtaagcgccattcacgggaaggggaatggaatgtcagggccgcgtcggcaacacgtcgcggcgttcctaccacgtgccccgcggccgcccacgctgacaggtggggccagtcgatccgatccagagtgctgcatgctctggattctcaattttttgttaaccactgtcacagtcggccgttgtcagctctcgcctctcggtcattggtcaatccattccgcccccagctacggctcaccggctgaattcaaatgcagaccagtaagccaagtaccacccactagtgttgttttgctcttggagaagtaccccaagttgaattacacaaaaaaatcgtgaaattagtagtactccagtacctttctcagtcaacttgtaccagaaaaacggcctaatccgacgaggagttatctatgcactggttggcgatttgcgcgacccttgccattggcatcattcctcgagggccctaccatagttggtggcggcttgggatattgtgttgccagccgctacggtgcccggcacttgtgacgtgctcgtgaggattctctcgcgctggtggcctgcgctccagctaggacatgctcgtaaagatggcgcccttgcgtttggagctacgtggccttttcagttccgactatacagcggcccttttggcccgtgaccgtgagcctgagccactagctattcatgaacgcgtacggtaggcataacccctgtggtttttagtgctctcgtgtcacattgtacatggactggacgcctaatgtacgggatccaatcaacgatgagctaatcagtactctagtactaatgaccattttaagcaagaccatgtactgtgacagtttgtgtttttcttcactgggtgtgactagttatatactatatccatgtttttctttttctttttttgagaacatactatatccatcttgattgagtttatgaatataagaatgctgattttcgatcgatgcgtggaatggtcaggaattcatgaaggagtggaggagaggtcgcagggaggccagcctgttggatcccgtggtggtggaggcggcaccggattcgctggacggcctcatggcggagatggacaccatgctggcgtcctacgatcggctggacatggaagccgtggtgctcaagattatggccatggtataaaacttatcagcccatattccgacgcgctttctctattacgaactttgctaatctttactgaactttttattagtcttgtatcatgcttgcatgttactggcacctttgctgaaacgagtgctttccacgcctaaagaccacacatcatatggtccatgtgtcttgcatcctgccttgaaattagagaagcggaacgtatggtcatgcatgctctccactaaatctccggttaaacatgcaaacgtcacttttttaggcgtgtccagttgaaatgactgcaacttgaagcgttctttggctgtgtttacttcctgaaattagaaagaagtttggggaaaattgttagtttggaaaaaaagttaagagtttatatgtgtaggaaagttttggatgtgatgtgatataatggaaagttgggggttggggggaagtttggtgtgaactaaacagggtctcatttgtaggagtaggattagattcttttgtagctagggttaggattagaccgtgttgacacttgacactacaatccaaaaatgaattatcgagctttgatccattaatagtactcctatattgcaagttgcaacaactatattcgtcgattttttattggggataatcttgaagcagctgctgaaaatggatcggaaggttaagtcgtccaggatcagagccctgttcaaccggcacctggcctcgctgggcatcccaaagagcatgcactgcctcacactgcggcttgccgaggagttcgcggtgaactccgcggcccgctcgccggtgccgctgccggagcacgcgcctcgcctggccgacgcctcgtacctccacgtcaccatcgtgacagacaacgtgctcgccgccgccgtcgccgtggcttccgccgtcaggagctcggccgagccagcgaggctggtgttccacgtcgtcaccgacaagaagagctacgtgccgatgcactcgtggttcgcgctgcacccggtttccccggcggtggtcgaggtcaagggcctccaccagttcgactggcgcgacggcggtgccatcgcctctgtcatgaggacgatcgaagaggttcagaggagctcaatggagtatcaccagtgtgacgcgtcagttgtcagggaatacaggaggctcgaagcctccaagccaagcacgttctctcttctcaactacctcaagatccacctcccagaggtataaatcaaggcaacaattggacaaagatcacgcctacatgcctacatttgcctgacattaatttgacgtctggagatatatctgatgcgttttgcttgagcagttcttcccggagctcgggagggtgatacttcttgacgacgacgtcgtggtgcgaaaggacctgaccgggctgtgggagcagcacctcggcgagaacatcataggcgccgtcggcgggcacaaccccggcgaagacggggtcgtctgcatcgagaagacgctcggtgatcacctgaatttcactgaccccgaagtgtcaaacgtactcgaaagtgcgagatgcgcgtggtcgtggggtgtcaacgtcgtcaacctcgacgcatggcgaagaacaaatgtcaccgacacgtaccagctctggctagagaaggcaattagctctctgattctcttgaacatggatgccgttttcttggttacagtactaatgacaaaacatttttttcccctgtgactgtcgcgtgcaatgcagaaccgggagtcgggattcaggctgtggaagatgggctcgctgccgccggcgctgatagcgttcgacggccgggtgcaggcggtggagccgcggtggcatctgcggggcctcggctggcacacgccggacggcgagcagctgcagcgctcagccgtgctgcatttcagcgggccgaggaagccctggctggaggtcgcgttcccggagctccgggaactatggctcggccacctcaacagatcagacagctttctacaaggatgcggcgtagtcgagtaacacagtaaacgacacagcagcaattgagctgggaaagagtatataagtatagacgatttggttcgagatctccatgtggcgcagagctgggttcatgtcttcatgaggagagggaagtaggtgctgccttcagtctctcctcgctctggctctacgtgcaacatgttcagtgacacagtgtagaattgtatagtgacgatgtatataagggctgttatctatttcttggttatagaactaaatgaaaaactagatgcaaccacacgcatttatagaataactatgtcactgaatgaaaaactaaatgaaaaatgatgctagacatggtagaataactatgctaaacatattagaacaatactaaaattgaatatcaagcacagtgtagtgctggtgcatttgtttggtaacttagcagatgtacaatatgaatgtgctagtatatgattagtgattacactgtaatataaaactacttttctgagaacaaaacacaatcaattaatcacgctctctcagaaagactccacttgagtagtagaatagatcattcttaatattttccgatacggtcagacatatataattatggggaaaaaaggcttgaaatttacagccaaatgttaagaactgacagaaaaaatggtagctttggaaccttgatcgattgctactccatccgcttgagattataagtcgttgtgactttgatcaaagtcaaactacgcaaagtttgacttacacaaagtttatagacaaatatagtaatatttacaacaccaaattagtttcgtcaaatcaataatctattatattattaaaggaatagaaaaagaagcctccacgttcactctaatggcctagaaattctcacattaatcgcagaaaaagaaacaaacagagtccatataggaatacaatttaataatagctgaaattcggaattaagaataagaaataggaaggtaagactagagtccatatcggtatacaatagaactaatagaaattcggaattaaaaaataagaaaaaataaatgtagaggttagagtccatctagaaatataatttagaaattaaaaaattcaaaatttaaaaaatattggatgaagactatagagttcagatagaaatagaatttaaaaataattaaaattcggaatttaaaaatattgaaagataagtttagaatccatatatagaaatataatttagaaataataaaaattaggaattaaaataaggaatattggaagaagagtatagaatccatacaagaatttaaaattcagaataaaactaataaaattaaagtagaatttggagtactaaaattagaaatttaaaaaaggaatattggaagttcgctctcatgagacacgcaaaattatgttgtcattttaatatatttgaataatacattgagaaaacatatatattattataagacagaaaatataatatgatgtgtcggtgacatgggaccgggagtatcatgacttagagacttgaggcagacacgatcacccacgtggcctaaccccctcggggggtcgggcccgagggtgatacggccgcccttctctttgtctccccgaggggtcggaccgctcccgtctcggccccgagggccgaggcgccccgaccccttgtggattttgcgcngngnatatggnnangnnagnnnancngcgctcacctaaccgcatttattgcggtttggacgagcgcgtcacgccgcatgtaacgcagtgcagcgcgctcgttcgtccggtctgtgatcagtcacagaccggtcagatcgtgggctaggtggcgacaggcggtctgacgcacgcctcgccccatcccgtcaggacgagagcctccaagcactcgtccctagccggagccggcgtgttagctcctggagatggcacgttggttccggtcagatatatgccaggcttcatcctaaccattacaggcaagatattgtatgaagaagagcgaacatgcagattgttaaactgacacgtggtggacaagaatgaccgatttgtgactggtctgacaatggtcatgtcgtcagcagacagccatgttcccacgtcgcgcctgcttccggcggaagtggaggtaggtatgtgccgtcccatcagaaggtcattcggacggcagccatacaaatctccgtccattaatgaagagaagtcaagttggagggaagagaggatgagtccccacacaaaagaaagagagggagagatggtgcatgtggtatccccttgagatataaaaggaggaccttgcccacttagagaaagggaggagaggagaaacgatcccagaacgatcgggggctggctcgcactttgtagcttcttcatacacagatccaccaaaacacaggagtagggttttacgcttctcagcggcccgaacctgtatacatcgcccgtgtcttgtgctttttccattctcgcgaaccttccacacacagactaggagcttagaatctcacccagggcccccggccgaaccggcaaaggggggcctgcgcggtctcccggtgaggagccccacgctccgtcatgatgctagccacgcaatctgcgcgggccaccatgctaattaaatatattttaacaatatagttgtcttggattaaaaatgttactacctttttttacaagctcaattaaacttagagcagtttgactttgattaaagttaaaatgacttataatctgaaatggagggagtacttcttagaatcagtagcacaagtaaggttgatgtagcaggaaaaaaaatgactgtttgagttgctgaataatgccacatgattcttgtattttacctgttaagataaattgttttaacaggtaaaatacaaataagttcctgatgttagctccaacggccgagatagcaaaatattagagaatatactttctgcattctagtatcacatggcaaaccaaatgttggcatgttgccaaataattgaagtgatggtggtaatactgaaaaagaagttgtatcatctgattcaacgtattagctcatcgcaggatattttttagataaaatttgctataagacattcaaagattatggtctttgctatgagacacccgaagaacgtgaatcttttcatggacactgtaaaaatgtggtaattagctgctggacactccttttattattttattatttctagttgaaacggagagggaaatatttgtaaaaggcaactttgcccttgggtcaatagtgtttagcccgctgtagttggtttgaacagacccattccccattcagtctgatgatcccctatcctccaaaccctagggttaggtgcggcggcgatctgcggcaacggcggcgagctccggtgactacggtggcagattgaggtggccggcgagctgggccgctagcagattcgagcagagaagtacgatggaggggagcagcggtggaagcggtggaatcgagcggttgattcgagcagcaggggaagaatcaagaagcgagatggatcaatcattgtacatgggctcatcgtcaacgcgtaacccagtcacaggcgaggccgcggaggcagatgcagcaacgtgaggatgggcggcggcggtggaggccgcgggctgtgcctacgtctgctcaggctccggtggctccgccgcgctgtggcgctgtgtggcggctcgcggagctctgcgtcgtggcgctgtctggcccgctcgtggccggggcggcggcggcgcccgacgcgccagtaccgtgcgccgtcgtcgccgttgactcctacgccttcgccgcgccgttcgtcccggccgtgctgctgaagcgcgcgagaaaaggctactaattacacaacgcctaagtacatatacgtgacagtttattaacaccaattatatgaaagctatgaacgctataaattctgtccaattctgtacttctgtgtgtatacaagccagccgattgttgatccatcattgaaccgatttggtgcctgaaagttgtgacgttaaatcatgtcgaccagcgtttacaagcaaatcggcgcagggggcattttggtactttcatcattctttctctctccgcttcagccaaaaataataaaataatgagaggagtgtccagcagctaattatcacatttttatagtgtcaacggaaagattcacgttcttcgggtgtctcacagcaaagaccacaatctttaagtgtcctgtagcaaattttgcctatttcttatactgaggctaagccaaaacttgaagttttttttaatagctactcctctcctctctcccaccgccgcaccgcgtgctgctcctctcggccactgagcttgcgcgctccatggccgacaacagccttggtgcgactatcattgccggatccgacagagaactcgatagctcttcttctttgcacgtggagagggaaaaaggtggcggggggcagtggccaacccttctcgccatcgaggggagtgggaagggaggaggcagggaggctggcgagcgggcggaaaagaaatgaggccagcgagtggggcatggagggcgggagacgaggagaccggactaccccgcgaccgtcgccttcagacatcgatcttggcgagcaggcatcagggaagcccggaagggcacggggatcgtcgtcgggccaaaggtggtcgtcgcagcagcaggggaggttgggctcgttgtacttcggcgggagcggctcggacgactgtggcaacaacggggatgactccgatgactctcctggcctcgccgcctccttcctctccacacgctcgtctagttttgactcaccgaccattgcccttctccctctccgtttctccgtgtgctctcgcacgtggagatagagaggagagtgggacccactaacatgtgggtcctatttttatttttccttttgtctggctggcatgtgggcccatattttaaaaataatttatactcctactttatattttgcttacaatgccacatcacagccaccacgtaggataatgaccaagtcaaaccagctatgtagatgccacgtcagtcagaaccgccatccaaaccgccgagattgctcatccacaccggtttatctgtattgcagttaagggatgaaaattgaactcgcgtcaagtaaagggcccacggggatttcggcccgcccgaaatgaacaagccctcggcgtcggcgctctcctcctcctcgtgagttcgcccgccgcctgcgccgatccccatccatcccgtgagctagcagaggcgccgtcgtggtcgccgtcgttcgtcctgctgcttccgccgcatcccggtgagcatccatcagttacgcgcatcctcttgctcatctctccctacccacgcgctttttcctccaatttgaacaccctttgtttctcttctagacctggaagctcttctcttaatttgccttaaacctcaatactaatagcagtttgtttgttcccccagatccgccactgctgaacggggtgctttcgccatgtcgaggctgcgggcgctgtggcaagcctccgttaacgccaccaggcgaggtagctgcctgccgcaaacctaattttgccgcgctagtcgtatgctgggtttatttcctcaaacgaaactcctttacctgcgtttgctcatttttaaggccatttgaaatgtttactggaaaggccatatgagatcctcaaatgatgaataactatggcataaggattttagacacgggatgggaattcaagtgtgtaacagctcagtactagttatgttgatgtttattcagacagttggaggtttcttctagcattttgatttatttaaaatggatgctgctggatcgcaagttggcttcagttgttagctatgacattctaagatgcttttaatcttcatttagagtaataactcattatgtttgtctatgtcataattctttcatcctacatacgaaatttgcagccattgtgtggaattcagaagacctaatcccaccaagtgaaaagtacatcttcaattttaattcaaaagatgagctgaaaaggtggcacttgtattcagattccgagtatggaggtaatgcctcactttcaagtttttctttgcacgaatattagttttcgtgattgtcctgaataactgaacggtagaatagactaacttatattgtatatgttgtgattgtgaggtactcatggaatattcatgttctaagactttgcctggcactggaaatgttcctttgtttttattctcagaatacatgggaaaaatatgcaaattcccaagggctcaatttttatatgtatatgttacgattcaaagtttcattgtgattctaattctatgcatagaacaaaaatgaataaagctaggaaagttctctttcagagaacatcagaaaaaaaagttttctcttgaattcttgtagctcttgcagctttctaacatagttcctggatattctgacatagttactggattagtcgatcacttttagctccattcttgtcaagaggcttcactgtatacttctctcagacgatacatttcactatttcagtgtaaatattgcatgccaataactcattgatttaatgagttttcccttcgtttttcacctacatttggtcttttactttgtattaccaagaatgttccacaaagggctatatctaatacaaatatatgtggcttactatctgctatagtgatccaaatgggaatctgcctgctccttgtgctttcattccctggatgttctacaacggatacatcagtgtagtatcaattggtagttgctaaaccagtggattagatagtctgggatgtaaacctccttcaatatgatgggtagatcgttaatgcttcagtgtgttgtgatatgctggtgccttagcctcacaatagtacctggaataaacaaatgtttatttctttgtgtcttttgggtgggtgacctttctggcatgttcattaaacttcactaatatttgttggcacattttgtaactgataggcaagctctttattcacatctatggaatgatttgattgaaaggaattgttatccaggtttatcatctgcatcattggagataactgatggtggtgctggtggggatacttcatcaactggtactctgatgttttgacgtcccctttttcagggtttccttagagtgcattttcagtacaaagagggaaaactggaaaatagtttatttatctgctgttatatatagcttatgagtacaaattaacctgttgaactatggagtgtcttctagtgttgttattctcatgaatctcatatgtccttgccaacttaccagataataccagcttgctgtcttggcttttgtaattggaaagaaagcggcctttttttcatggttttgttagatttcatgcctgattcacttaatttaatttttataagctttgacagttttgcaactatttttccaacatatgcattctggaaggtctcttttctggcaatctctctttggatatgtctgagggatcaacatggaagataaggcgtagtggtttctgtggaatgagatcaaagaaggtaaagtgatattgacttggtcattgctcaatatctgtagatgctattatgctgataaacccttatttctttctccgtttcagtttaatggtttcattgatcttgatgcatatgatactatagcgatgaaactcagaggggatggaagatgctacatatctactgtatgtatcctcatcctgagacagtattgaatgtgcgatatcaagttaatacgttgctatataatctgaatcttaattaaacagatatacacagagaactgggtgaattcacctggacaacaggaagataattcgtggcaagcctttgtgtacttaccccaggacagatggcaaatcatgaaggtaatttcaattcgaagttgaaagatatggtttttgatgatacgacagcacttgtcctttctttcagatccctcttgattcgtatctacccacatggagaggaaatgtgatcgaagcaaagatggaaatgaaccctgctcgtgttgtgggaatgtctctatccgtaaatgctgagggcggtgtacctggtgcaaagactggaccaggtgattttaggctagaggttgattggatcaaggcattgaggacactctgaatttgtggtttccacaaatcggtctttttgtaggatttctcagggctggaaatttcttaccggcactttttcatgtgataattgctgaatatcacgaggcatggagatgcgtcatgcagtttgtattactcctagtcaatacaatgggacatcgaaaggaggcaactgttcagcgcagatgaataatgaggtctcttttgcttttgggggaaatgaatatacaaatgtatcacctgtttcttatggctgtctgaacatacgttacttccttgctactgtgtccgatgaatttttatccattccgcatcaactgatacctgcaggagacggtttgtacttggcttcccattttgcggtggaactggcgagctcgtgcttggtggcggctttgcccgcctgctaaatttgcacgttttggtcaaacaacacatgcattcattttcaggtttccgtagcagcaaaaacaccatgataaattggcagtgcacagccgcaacggaaacttctcagtgcaatcgtgcgtggataaacaaacaacggtggatatttcaaaaacgatctttcaaacaaaaaggtcgatatttcaaaatgcattttcaggaactgtacacaagacacacttgaattagtccataatcagaatcctaactcaggcacacatggcgaagcttcctttcctacaagagcaatatttgctcatggaccacacgtccacaccatgacaccgcaactaattaaggggaacgaacaaaaatgggagcacccagtgcaagccgagaggacgacggacgggtgtttggcgaccagtcgtcgtccactcctctgcatgcatgtgtgcacaaacgacgggtcagccgtgccgggtcatccttcaatgaacccggtcatccgcagcacggagttgcgcaggtggctgaggtcgcggcgcgcccgcccggtccccgtccgcagcgagaacgcctgatccccctcctccgtcgaccgcctccgcgacaccatcacgtggggcggcaccatcgtccccccgccgcagtcgtcgccctggtcgccgccgctccaccgctgcgcggccctgggaatgtccaccggccgagagctcgccgtggagcagtggcgcgtgatctgctgctggccccgccgagccggcgtcggcgcggtcgccgtcgccgtcgccgtcggcgggacgacgtcgtgtggcgactggtgatccggccacagcacgtcggactcgtacagctcctctcccatcgtcgccatgcgcgcgcacgcacgcacaaaccaagctacctgtgaagcgtcgatgcgtttggggtttggacgtttgggccttggtagtttggtttagcttttctctctgtgcgacgacgagcgcccgcggggcgtatatataggcgtggtgcggctggcgccacctacgtgtcgagtagcttgcgacgtacgactagccgcccgccgagccgcgcgaggaaggaagagatgcgcccacggaaagggatccgggttctatcgggtccggtcgttcggatcggatcagatgacgaattcaattacggagtcaacaaaaggctcgtgtcggtcaatacaaccaaaataaacgtggctcgtctctttgccagagcggccgcctccttcttttactgcccgacatgatgatgaaacggaaattggtcgtacgtgcatgcgaggtaaggaaggtgcatgcttgccacctgcactgtacagctagtacataacacagcgggcacgggcaatgtgcttattactcgtgtgggtaagttctgacgggattaaagatttcatttgtgattacagacttgaacccaggttaaatcgaagactaacctcgggtgcctcagggtcatcatcgcggagcgtccacgcgtcctctgccacgcatgtactcctactcgcgtaatctcttgcatgccttccgctgggaagcaagaggaatctaggggttagcattcttaattccagctttacctttctcttaagcatctatatcaccgctaaatattgcaaatttattcgtggttccttgctagcaacgcacgatcgcgatctctgtttcgtcgtttgcgtgcggccaccgagtccgcacgcaccacacgcggatatgcgtacgcggcgcccggacggaagaagcatcaggctacaggctgggaaggcttccacgtacgctgcactcaacgcgtcctgtgccgaattttttatttataatactaagtaatatttaaattaaataattagtaattctctaggaggattaaccaaaataggatggacgatcattcaaacagcgtccagacatggatgctactataaacaacgtccacctttctggtgcagtcagaccatcactacgccaccaatacgctaagagaagtatctatctatctatcttctattatatactaaaagtccattaaactttctacaaaagctctcaagccgccacgtggcgctcctacaaacgctcctagatcagcacgaggagcttaaacatccaaccatcggttttcatttaatctggtggacccattatttttaaccactagatttttattttaagaaaaaaacaaatcaatctatctaaaaaaaatcccacgttactcggccgtgtcccggatctgtacgtccgtatgtccgatgtacgtacatatcccctctatgtccttttctttttctttcttatatacttagattagatgaaaaaataaaaagttcatgttaaccatatattttaagttgtaaaaatatatgttattttaagttttattctaaataacgcatctcattgaaacatccataaaaaatattaataattaacattatagactatatgattgtatatcacaattaaattggacttataattaaaaaacaatttaaattttgagtagcattttaaaaatttactcactccctattgtgtaatactgatatatccaaataacattattaaatttatcaagaatgtattttcatatattctatgtttctgtattcatattttttttggaaaattaacaaccatatatattttttacaccatgtggatgcccttttatctcttaagcttcattcggtctatctcattggataagcttatttaggacacgcgaaacaaagcatgccatcagcgtaagattaattaagtatcaaatattgcatatcctgtgcttatctaagaaaaaatatatagaaaaatggttctatacacccaggagtacgtactgtatatatataagggtcatcctatatataaaaaataaaatctagctacttatttatacataacccgtggatatattattttcaaccattattttatatctatatctacgcaagagatgtcataaaggaaaaaaaagaagaatgtgtacaagatcagctccatcgagtagttttttctttctttctttgtggctctgagattttcctcaaattgtgcatatgagtagcaaccacccttggcgagtttgtcaaagaattcacgcggccgcagcaccgcttcacgccatctcgctaaattttttggaagtatttttttactaatgatttataaggcaatcacgtttccttaaaaaaagcaatcacgagcgcatatataaacgtgtgctcacccatcatataaatacacatacacacacctaccctaagagaaaaaatatttgtctccaaaaaagggaaaaagtatgtgcttagtatttgctagaaaaaaacatatacacatatcatcgaaaatgctgcatagaaccacattatatctttttaattatgtcattctcatctatataatgttaataattaggacaaataattttgacaatatagattattccatcgtatattacccatgaacatacataggtaaatcagatgtataataaaagaaaaaacaaaacaaaaaatatattagtttatatgtttgcgaatgatggtgagagatcagattatatataaccgggacaattcgtaccgttcttattatttaagggtgtaatttagactttttccttaaaagtcttccacataaggatttataataaaaaaaattaatcaacactaaacttcctacaaacgcttttaagcctccacgtggcatcctataaatattcctaagccgccacgtggcatcctataaattagagaaattcttaaaaggacacaacgtataaccgttgatttttattaaattttgtagaccattatttgtaaccattagatttattagaaaaaacatacttatccctaggcccacctcggccttggcaattgcatgtacgtacttacgtacgtctgctcaaccccccccccccccctaattctttcaccccttttttcacctattttttctcctatttttaatcttttagaaaagaaaaaattgtatgccaaataattaagcaaatgcagcatctaaattataatgctaatatttgatctgcttatgtctttagatattttatattttaaaactcatgtcctctttaattcaactgtaaagagataaatgtcatattaattggggctacattttctgacttttgcgtgtcatttaagcaattttaaaactaaaaaaattaatgatatatatttttgtcatcgtatataacttgataataattaaattatatctaataaaagtaaaatgaacagatctatgagtaatattaaaaaaatagcccccgccccaacgttgtaacacagtaaaaagtacacatcttataattacttctaagatattatgtctttctcttaaatcagagaaaatacactcttaagatattacgtcgttcttttaaataagagaaaatcgtaaaaattctgacaagaaaacaaaacattcgaccatcagcttcgacttaaacatctgacacataattttagtttgttagattaatcatttagaaaaagaacatccgaaatctcccttcctccctgctcgcgtacaacgtgcgccattcttttctctctattttttatctccttatcaactgaaattaaaattatctatatgtaaaaaagacacaaatagacctccatctattacttgtatcttgtcaggcgtctaacgactttctactaacttaattaatttctcttaacatgcctatgagggctatgtacctatacaaattgaccttgatacttttaaaacgatcttattaggagataaataaatatttataagaaagatgatcatagcatcccaattacacatatgatctatgaagtcactaatcataataggtattcatctagcaatatagacaataggttaaaaataaatgtgtggccagttgaacatcataccaataagtatgtgggttacacctaggaatcttaacagtgaaacaaccttgaggcggcctttacaattggaaattgagcaaatgttgctagatttaaaacccactgtaaatagaaaaattcaaacattttctgagttctgtttgaatgaaaaaatatataaaataaaatacaatcaatcaaaaaattgatattattggatttttttgggttgtaagatatcctactggggagttaaatgtcctgaattttcttataggaaccacctcctttgtttcgacacaatattttctcatcaattgaaaaccgcatgttctcaagtaattttattttagaatttaaatgttacaagggtaattataagaaaataatcagcgctcaaatcacacaaaatacatttaactttataatataataaaaaatattttaataaaaaacacccacacttaaatattcataataaaatttcactcatcatataagaaggtgcccgcgcatgtgtgcgggctatctttctagttgaaacaaaagttgttcaacctagctagggtcagggatcaccggtgtcgtcgtattcgccttcgatcggggggccgtattccgtacgcttcaccctgcaaaccacgtcgccactgttactgtccttgttgacgccggcgccttggatttgtccattactcagcgccatcaatccagccacggcgtcttgagcggcaagttcgttggctgctcgccggcaacaggtgaactgcaagacatgcatgtatttcacattgatctacttatgtctttcggtgggaggcaacaggtgcccatgcatacgttagctaattaccattgatcagctgctgtatacattgtgttcatatgtactttatcaggataatggaattcaacggtctcccaggagtcgagcagatagcagcagcagcctccggggaggacaacaaccttcggcctccccaattgaaagccgccaatggcagcctcctctggaatcgatgcgggcggtcgtgagggcctcccgggggcgggcgtctgctacagcctctcgatgttgaggcaaacggtggaaggaggcaacggcggcggcggcaacctaccctagcgccgctgtaatttttcttccttttttttctttcgcttggttcgctgcatttgaagtggctacaccggtctggacgtcgtttggattagcgtccatccgcggacgctgtttacaggagcgtcctgatgcggaagctgtttagaatagcgtccttcttattttggtaaatactcacaaggaattactaattatttaatttaaatattattaattattataaataaaaaattcggcgtcctgtgacaaggaaaggggaaaaagggggacaaaaactaaacgagaagaaagcaaaagctattagctgtgcgagacatggccaaatgggagggtttaacttagcgtacgtgaggcttggagagtagccagatgtccagatagacgctctctatcaggcattttaattctccagtttccgtttcccttgaagcaatggttttgctctgcacttcggtagtggagtagtactttcagtttcagattctaaagatgatgaattgatgaattacgatatatgatggatggtgttcaatgctgatgcaggtcaagttatgaagttaatgttttacatttatctttaagctagacatgcgccagagtctgatggagcaaagcatttcagattttcagtaacaacttgggttttcttcagtcgcatttccaagccgaaaatggagatggttgacagtgacaccataaaagaaaaagaggtacttcatccgttttttaataaataataacactgttgacattttaacacatgtttgaccattcatcttattcaaaattttttatataaatatacaaggtataaatcatacttaaagtattttaaatgataaaataactcataaaaataaattataatatattatatactaaaagtccattaaacttactgtaaacgctctcaaaccgccacgtggtactactacaaatgctcctgggttgccatgtggctatctaataaattggtggatccactattttaaactattagatttatcttaataaacttttaaaacctcacgatccatctctctcctttccctaatcggccgatgtctacgtacgtaggtttttctccggttctatgccggtggacccaaaaggaaaagggccgggaaaaaaaaacggaaagaacagatttgtacgtacatacccggggagccaaaaacaagcaccactattcgatgggaaaaaaaaacgtgcataggcaccaacgatcgagtaaaacaaacgatcaataatttcaataaatcagtgaacccactatttttaccccaacaaaacaagtacactattcgttatttgacaaaaacaacacgaagaagaattgtacgtacacatgcgtatactatctggaataacaacgatcaatccaactatatgactatttaaaacatggcatatttattttatctataataaagaaaaatatatattacatcacttctacaaacacacctaaactatcacgtgacactctaataaattagataaaccttacaaattctgagaaaaaaatccaatcatcgatttttatttaagaaaaaaggaaataaaacgtaattatgatttagagaaggattagccctgccacagtcccacctaattgctacgagagaaacgtactgttcaccaaaaaaaaatgaaaaatacgtacatactacgcactgtctttccctacttgaatctttatgcatgcaagtaacatccaattgtccctaataaacttatctaaattagatgtgtatagtgaaaaatattatgactatatttgatattaactatatttcaatttaaaaattatcacatggaagcatatttagctctttgtccattaaacatcctataaacgctctcaagccgccacgtaatacttctacaaacgctcgtacaccactacttggcattttaataaattagaaaaataaaaaattatgagaataaacaaaacatctcgcagtcaattttcactaatatacggtggacccattgtgcttacgtacctccccacgtatttcctttctctcctattttcctctcttaattagatggaaaaaatattttacgataaagaattttaaacaactatattatctaaatcatatatagctaactttttaattagtgtacaccattatattatctactataaaacttaaaattgaagatccaagttaactatattattataaaaaaattcattacttcgagtcatatatattctgtggactagctattgttcaccgatccatacatttttaagaaaaaatcaaataaatttttaaaccttctgattaataacatacacttaaattagaacaatttaaaacattttaagtagtttaattaaaatacaatacccaaagtattttctaatagatctaagataaatgtatttataaaaatagaaagctcaaaactatgacatattcaatctatcttaaaaacaataatctcctcccatcctcctgctttacttacacctctaccctccccctatgactctcacatcctctcctctccaattccattatctctatttctattttttttaactaacataatgcagaaatagtcataactattgttttatttataactaaataataaatcaagatcacactagctatattttactatataaaagttaaaatacatcatttgagggtagaccctaccatttaccttacaaataaataacaacaaaaattaattgaacatatgtattatgttatactaaatcactgtacataataaaaatcaattaaatgcccccaaagcgctcataaaacacaatatattatgtcttaagattctaagaaaaaccaaataaattgacgtatccattattttaactattagatctatttttaaaagaagtcttaagtcgccatgtgtcacgtcatataaaaaacagaaaaaccttagaaattcttagaaaaaaatgaaacaccctttcatcggctttcacttaaatcatttaggaaaattagaaaaataaaatctcctacaccccctccttgccttcgcacgcacacaacattgtccgtcccctccctattttttatctattaaattaaaagagaaacgatca

SEQ ID NO: 8611 - DNA, 3277 bp, Oryza sativa
tcctgcagcccaacatagaagcccatgcaaaaaataaaaggagaatacatgtgtacacttcccggcgaaaaaaaattccccagcgagaatacatgtgtacacagcattccttgtatgaaagaagacaagtcataaaaacaaaaacagttttatttgcttggcaatgtctagatgttaaatcagttttttttaaaaaaaaaaatcatgatacgcatatgaaacccaacctatcatatgatcattgtataaaaactaggtaacccaatttggaccattcgtgaaggaaaaggtattttaaacggttatatggtcaggacataaggcggggaggctctttgtgtagttcactagttcaggttgtaaaatatgtcaaattatttgcaggcatcaataatactagacacaagtggcatgaactacaattacatatgactttatgtgacattaattagttggttcacaaaattcaaaaatagcataatcaaaatggaagttgccaggaacatagtagcaaaattaggcatgaaaagtaacataaagaggcataaatggcaatgaaacactagctatcaaatgcataagaaaacattactaaccaataaaaacattccattcatctgtcaataattcctaagcaagaaggcatgttgtctaactggtagaagctgcccttcagataaaaaaaatactttacagtatgtttggataaaaatcctaaagaaatgttatccacgtttgcttcgctgccccaggttaataaaggtaaaaagaacaacaatgtatttctttttgcagaatatcatgatccaatataaaattaaagatgtgattacaaccttggagaaaaaagatccacacagctctggtgctcggtaccaccttgttgcaatataatcctaaaaacagaaaaatcaattagctgatgatataaatcttaagagtaatgagctgcatagtgtgtagtgggcgtgaaatgacgtaccgtccagaagatggcggttggagtatcactaaaagctacccttgcaaggccgaaatcacatattttgagcttacaatcagcattcgccaagatattttttggtttgagatctcgatgaaatacatttgctgcaaaaagctatcaaaagatgcatcagtcaggaattagagtcacaaataggatggactgataaataggaatcacacaaacatagaacactgagtacagaaaaaagattaatctgttagtagtcctcgtcttattattcctttcctgaatggtgcgtttgtatttttcagcctttcatataacaaaagtactaaattggtcaaactgacttcttagaataatttagaaaaaaagaggggatgggggatgagcacatgcattatttacagcatcattagaagcaaagcaagatagatgtttctatcatggtataaaatgaatagggaaatcctattcaatcacaatcaggttaataaaaaaacctaaagaacagaactaacttagtcacaaaagggtgcttcatgtgaagggtatgtctatcaggaacaacgaatgctggaatgtgtcaaatatatgtaaacacttgtgcttgcctttgttcttctgcttttgaaaacaaactaagttgtctgaccaaagccaacaaacaaccagggtaagaagatgaagaaaccagagaatatgaaattccttgtttattacagcccaaacctcggtttgcaccatggcagatgtgtatcagataacaaatccagttcaattggaagatgttagctagttgttcgacttttcacaaagggcagcaagcatagcctcttccctaggaaaagtatttgttatattgtattgccagaaggtaagaaccatggtcaatagcatgtacagatagaagatgaggttgcagttacatgcattatactttcaggatgccatgaataattttttggatggttaaactacccaatgcctcaggctgtaccatcctggcacaaattcagtgtatccacaacttgggaagcaaaggaagacaacaagattctgttgatgcccgctatggaagcttgctaacacttcagattttataaactctacatcaaagggcgccagggggcatctagtcatcccacaagaatgatccacatttcaggagaattttggggtactgctggtttatttgtactaaagcaaccacagttccataagattgttttcattatatagtttgtgcagataaactgtaggttcccaaaaaagcacaaatgctgaaggaacaatcccagaataatctgctagtagaaaaatagtttggttgttatctggcaacagttataacatggtggcaattgtccttagcaaatttatttatttaaatagaacattcttcacagcaggctactgaaagaaatgcaaaagaaccatctttcatgtgaaaataaatcaattacctgtgtgtatatatttcagtcctcggagcaactgatacaagaaaaactggtagtgttcaggagtcaagtcatcgttggcctttataacttggtgcaaatcagactccatgagttcaaaaacaacgtagatatccttgaattctctccttgatggaggaagtagaatatgcttaatttccacgatatccggatgtcgcaggagtctaagcaacttgatctcgcgaagtatccgtgttgcatcggacacatgctcaaagatgtcattgattttcttgatagcaactttatcaccggtgtgagtgtccaaagcagagcaaaccacaccataactcccttttcctataacctcttctatcttgtacctgtttccctcaccgtactcggtgaaaaaatccatctcagaaggtgtctgaatcataaaaagacaaaatggatcagaatcagactagttcttttagtatgacaaaagaatttttttagtatgagaaaaaaaatcctttgttcaattaggtcaaccatcctaaaggcattagctaaatcatactgtatgaaagcggtttcatcggaaacaacataccatgtcaatcatgtatgatgcaaaacagcaagcgttactttttttatggggataaataacatcaagtgatattcttttttatttcaaaaactgcttaggggtcagaaccgcatgattcaacgatgtgtatggatgggggccatacgtacgcatatctccaagtccaggataacaagatgcaaatttatgtactgcataaatcagataaaaatatgaacatacaagacaataacttgaggtcaattaacagtcgccaaggaaagt

SEQ ID NO: 8612 - DNA, 5810 bp, Oryza sativa
acctccgccaccccgaacgccgtcgcgctccgcgccagcgtccccacgttgtgccgcttcgccacgttgtgcaccaccaccacgctctccaccgccgccgccgccgccgccgccatggccgccactcttttctcctttattttccttttttttttgcttttaattcgctctttttttctcgctgtgatgtgaagaagggtggaaatggactagggaaaatactacgcgtgagccattccactgacatgtggggttcacctggagggtccatggaaaggaagacaccgtgccttcgtcgtaggccagagatcgtctgaaaattgaagacaatgaagctcttgatgctgctgcgttgagtgtttatgatgcaaactctcatttgcaacgcaggaaatttcacagtatttcatataagaaatttcataggaatctgtttgtttatttaccaccaaaattgggagaagagctcttggaacacaatgaggtcaatggcgaatcagacaaagccacatagtacaaccagacttattaacatcatccatgaaccgaaacctcagttcagtgaggattccaggataaatggaatagctcagaagcatcaaaattcaaacacattttgatactcttacctgacaagaactagttctgattgcctgcaatgctcagcgaaaaaaagataaaccaaaaggaaaagcattcagaagacaacgctctgtacatcatgtataaccaacacccatcccattatccattatctctgcggggttttgattgatgtgcgaccaaccatgtatattattctcaaagtttaaccactctcaccaccactcattattccatccaatcttccatccatccatccaaggcaagctcagcaaatcaatcaaaaaaaacaaataaaaagagaaaacaaaatggtgtatatgaagaagtctagcaaccggcgaggcgggcgcacaccctgcgctggatgggggtccggcacgatgggcactccttcatcccttgcttgtcatggaggtcattgcatttcgcgcagaccacctggtgcgcgcaagggaggaagacgaccgacatctcctcgctcaggcacatgacgcactcccggtcacgctgtatgtcgtcaaaatcgaaatcctggggtaccgctgctatattggccaaaatttgagcgctgccattctttctcccttcagaaaggcgcaacgcgttggttctgttgtctgctccccacttgggaggggcaccaaccctcaacgagtccaaggataccttcagctgcgaaatctgctgctcgagagcacgtatctggctcttgtatctttgcgtatcgttctccgctttgagatgcaggaagttctcttccgacctcagtgatgtctcaatctgatccctctctttcttctctaagcttacacgggcaattgcctcaatctttccagcctcttcttgcctccaccttgcctggaagtattgaagatcatagaaagaccaaagatatacaagtttagtgaagacagcaatgtaaagggatgaatgaatgaatgatgttgtagagagccgcggcacaagaaggagggacgcattaaaaaaagcaaaattataatatttacagaacagtcttacctaacccacaatattaatcatcactgagcttctacttcagcaaaaacatggtatttgcaatcaactcaatatgaattcatgaaagtaatgaaatgtagactgcaagcgcataagttccatttttatgaatcctctagcagaaactaacaacatagccaaatgacagattttgtccaaaaaccatgatagtgcactcaagacagtttaaagcagtctactctatccaaagcaacaattcctatcattgatcattgccacgactcacttacaaaatatttttcatgatttccgccttaagcagaaatatgtacctggcgtctgaaagacagtgaagataaggaaggttatcattgcatggcatattcgacaaatttaagattggcaaagtgcagatgtgccagtgaataaatagcattgtttttgtacattcaagctttggaacttattgaataccatttataaagatatatcatcacatgaaatctttatttaacattgtcaacatttgacaaatcactaactagtacttgactggaaggataaaatgcaataccatgtaaagttcacaattagtatttccttaaaaagttgtgtaaaacattgcaacgtattcatgatatacaaagcatgctagagttgtcttaattaggacatccaatttagctaccaaaatttctaccttttgggcatccccaaccccttaggagtgagattcaggaaagtaaattaaaaaaaaatgtcacatgaagcttaactaacaataaaaccatgacatgtgcatatctgttaattgcccagaaacatcaccatatattaaagaaaatactgcataaatggagacatcaccgtctattaacttctttgacaagctctaagcactgttaaaaatactgttatccatatattttacaagcttctcactctctcagtgccaccttacatcagatttattcaaagagctactacacccaaaagagtaagaactaggtcaactgtttatctatacacaattaaagtcaactattctaagtggcaatgcaattctaacaactcaagattgttcagatatttcaattttacagaaaccacatgaattaaaggttgatcatatataactaatatgattcaattgtataaacttcccttcaaaagattatgaagaggtaaagataaaggctaaaccaataaatacctggatttgatccttctgctctttagcatgatgaagttgctggtggacctgagatagcttgttcctttgagcagcaagatcctcttgcaacagggctctttcagattcccaatgctgagaccttttatgactgttctcatccttctttgaaagctccaaaatatttgttgcagacactagtgcatgccgctttgcagcttccatctgtatcctgagctgttcattctcggcttcacgtctacgagcagaagattctgccttttccagctgggtgttcgccctagaaatcgcagattccatctctaaaagcttcttccgagtgctctcttccagattgtgcctctcttcttggaggcggtccgcttcttccttctctttcctaagtgaatgaagctcttccttctccttggcaagtcgacgagtgacttgcatcaccttctgctgagcccagtctgtccaatccctcatatgtgcttgcaactctttctgccgctggacaagaatcaagaccatttcatccttcttatcttgtgggatccaaaccttctgatcctcatcatatgataaattgattttgctgctagagtccataccctctgtattggcatcatgattcgaagatggagcaggactgtcatttgaggacggcaatggcaacgacaatgagagatctgtgctagcagctggtaatgggttcaagttactactcagcttggcatcaaatgatggattggagggaagggcagcaccagtaaaagaaaggtcaggtggtacttccggtcccttcatgcttgcagaaaaccctttgcctactttggatgaggccttcaaactgctagtagtagaatctgaaaacgacctgcacttcctgtccagcactgcgctacccaaagagctatgcttgcttgacctaagagatcctttagaacccagtgctcgggaactcttatcaaaactcatcaacttctgccgatgcaaggaatcccgcttagaactccccctcttactagggattggcttatcatctttcacaggttgtgtcgcagcagcaacgaatggttgctcctctgaatgatcaggcacaggatttgagttttcttttggcttaagattcgggatttcactctgcgccttacctgagacagagggtttactgctcggtacattcaggtttgctggtgttgcggatgaatcagccttggcagtattgtaagaattgggtggcactggggtaagttttccacgaaaagtgacgccagtctgtgggttggtaatagatactgataaatccgaacttggattattaggttcatagtttccaacaactggctgggcaatcacttgcgtatccactgctgggagggaagccggattgtagtccatggcacaggcattggccacattcatatccgacataagcaagcagaacatcacatcacctgtagtgtagaacggctgagcctgattgaccaacgcaatcatgccaccgagcactgcctgctcaatcttcctcatgtcttcctcggaggcgccctcactcaacatgtccccctcggtcttgagcacctcgaccgccgcctcgccgaacccagcaaggctctccctccaattgtactgcgtggcagcccgcaggacggcggcacgcgcggtgggctcggagtaacccatcgcgatgatcacacctacggcattgtcgaacgtcgcgtccaggcccttgagaaggatctcctcgagcagcgcctcgttggggtcattccaattcacatatctctggcactccagtagctcctccgccgtggggtgaatatccttgcaatcgcacgagcccgggatgaggtccaggttgacgccctcggcggccaccgcggcggcggccgccgccgccgcgatggctgccttctccggcgacatgaactcgaagcccacgcagtcggccgtcagtgggtactccagcccgaatgaccccagctcggcggacggcggctcggcgcggtacttgcgcttgttccggctcgccgccttctcctgcgccgccgccgctggccccaacggtggatgcgccgcgagagtggacatcacgatagatagctgctgcaaaaaaaaaaaaatccccccgacccaacaacaaattcatcagagaaatcacaccgcgcaatctcaatatagcacaagaaaacaaacaaaaaaattccccggatacggagaatttgcgactcacctctggttccttcctgcgcgtgcgtgcaccgaatcagggaagagagagagatagaaaaaaaaataaaccctgaaaaaacaaagagaggggaaaaatgattcagtaacaatcgggaagcaccaccgaatcaagaaccaggagaaactccccggcgcgcccccaccgcccagtgcccaggatcagatggggggaggaggggctgttcttgatccgatcgggtgtgggcggggggaggtgcgacccgggagacgggggcagcggatcgaggcgcgtacccgggggggggggggtcgtcggcggggatcgaagcggagtcgatcagaggagtggagaagagagagagagagtatggctagagagagagaggaggaggaggaagaagaagaagggggaaggaggaggaaggagatgaggagaaggaggcgcttgtctctcctcttctctaggcctgatggatggagagagagagagcacacacagcacagcagttacggttgaattttttttttaccatttcttttctctcgttttctgctgggtgctgaccccaccaatggttaggtgccacgtgtaccgtgttcttcgggtgagggctgacgtggccggtggcggtcgatgtggaataaaccagggaagggagatatgtgttgttcttggttatggaatgcgagatgtttggagatggttaggttggttttgctttgtttggtgaatggattgttgtttttatttagcatgggttttactagtgatagattagcattcagtgattac

SEQ ID NO: 8613 - DNA, 20212 bp, Oryza sativa
ctcgccgggcggatcacgctccctcatcattggtatcaggggcggagacgcgagcggtgagcctccccgccgttgggagagatcttcacttgccaaactcaattctcagcatgtcgtggaggcggctggagctcgccgcgctctgcgcctacgcgctggggttctacctcgtcgtgatccggaagtcgcttcgcctctctcatggtatccaatcgtctcagattccaaaatcttccattgctgttaattttggaactgcttcgcatcacattatcgcttggtttgtgcagattactctgggaggttgtacggcctacgagcaggctcactcgctggccatctgaacgtgtgttaaattcctcccattcctttatcagtgttctagttttatctgaagattgaggagctacgcatctgatttccttgcattctgtcgttgcaggacttgtccgatgcacaatggagaaatttccgggggaacttacctgttcttaccattgtgatgggtgcatttctgatgttggcgaatatgcttcgctactgctacagcttgaagggaagaggggcctctttggtgtggcttctcctgtctgtcacctatttatgctatctacatggtgcttggtaggaaactgaccaatgcttttcgcttgttcttctccaatatttgtaaagtttctgacatatctatctctatggcagtgttagtttcattctcctaatagcattgattaactactccatagtgaaggtcagtgctagcatctttgatcaaaactactgttgatttcagttgtcttagtcgttgtttttctgttttccttttttttttgcataaatatatagataggcaatgccacaaacaaaagtacatggagcaaaacagaatgcttttttgttcatattcttgttataggtattagaggtagcatatttgtcaatcgagcatatgtttgtggatgtgcacaatgtatgtgtatgtttaacggatgcaactttctcaacgtgatatagaaaactgaagactactccacaggtgcatatgatatcaagcacataaaagataagaaacatagtacacatcaactaaagaagagacactgtgataacaggaatgccagatcaatggattttttaagtcattattcaagggaaaactaagactctatgttggtaaaattcatttgggatgaattttcggtttatgtattgattccaaatgtttcattcatcaactagaactggtcaacacaactattacaatattgttggactgagtggttaaacatctagtcaggttggttgaaaatggtgtcctcagttaaggaattcaagttaacatgctgtttattatgtgattattgtcaacctgtaagtggtaccttagttgtaagcaatcattccgactgtagtgttgacatcactgttcgattttctctgttctaattgattatgggtttaagttttgcttttgaccatagtattctctcttgcagctattttctcgatataaatattgtgttgggctcatttggagcttcaacttagctgtccttatacttaaccgagtctatgaaggctattcattctcattgtttgggtgagctgttctgaagctgctctatctgtatgatgcaattcctttcagtgaggttccttttctttttaatttttgtgacgtttgattttcttatcgaaataggcaacagcttgcttttctagacaatcatcggggtacatttcggtggcacatttgcttcaattttggtatagttctccttttgtcatcttgatttggttgaaatcatgtttatacgaatagcttttgatgtttactatgtagaaatctataaacgtgttctccttatgccccatttgatttgtctggcagttgtattacgaatgataagctttggatgcgattactgctggtcactccggtcttctcagtttgatcataaggtattatatttcctgatgacttgtctttttgtaccacattatctgtacttcattattggaacatcagatgctttaaatcacagaaacatagttttaaaagcacacattacatccctgttggtccataagatctgacactcttaacaaatctgatcttgtgttttcttattcatcttggtacattttcaaaacaatatgtctacttgtcttgttttaaatgttattggataaattataaagttatatctgatatatgttgtgtacctcatgggaaactgataagtttatgaacaactcttgtagagatctgtacctgtaaattagtaaatttatttttgaccatacctctgtcttgtcagtactgcactgtactgaaatgagttgccttggtacagaagcatatgcagcgatgccaagtttgttattctggcaaaacatgctactttgctttgcaggtacttatattttcatacttcccttgtcccaataaaaatactgttgttgatagtgctgctctaatgtggtactgattcatggtagtgtcttacagccattgttggttttaccattttggaagcattacgacggtatccctttagtttccagcaaaataagtgttgacacagcacagaatgaaactagtggttttgttgaaagatgttgataattactaagcgtaaatgaatggttaacatttctgctgataccaggttgaactgttctgagttgttagttgcaatataaatattttctgagttacttgtaatgtaggtcttgagtcttgacattagtgtatcttatttacctttgtttatggtattatcatttgaaatttgcagctttgatagtgactcttgtatcctacaagaccttcctttacaaagcatactatattcactcttatatttgttgatagaattttgcattgttcttggcaggagagagcgctcattggtgacaaatacacattactaacatatttatgctacttgacatatgctccactctacatcgctggacctattgtaagctacaatgcatttgcagcccaggttggtctgtttcttatagataatgattcaatgcagctgaatcggttagatgaacttcaagctaaaagcagcagaaataaatattaattttaagaaaatgaaaggaagaaggggagagaactaccatttaaattaaaagatgtcaaaattgaacagaaacaaatattgctttcatgaatgtttctctctatttttcatttacaggtcgtgctttatgaaatgaagatgatatcaaatttgacatgattctttggctatagtagagctaaaacaatactttcataaaagctgaacatgtgacaatgacatcatatattaatgcatttttgacctgtgcgcctgtcaattttatgtacaatgcattgccgtgacttagggatttatttcatgcgaagggttagcgtgggggacttgatcctgatccaaactctgaccttggcttaggtgtagacttaactttgagctaatttctttctttcccttcttatactcattaattgacaagtgacatcctttatgcactgtgaggttctgtaaacaaatcttgactagaaatgaactggtgtatttccaaacaattttttaactaggatagcgagtgattataacaacttgtctctaagttgatgtggttgagggaccagcctttccctacatcaggcactaatctatttttaacgtctaattagatcagggccctttgccactgccatcttagtctaatctacaaaaatagacacaacatttacatccttctttaatatatttggaagtcattaaaaggaatttctgaatggtccttaacaggttaatctattatctgccatagttgttaacaacgaatttcagctctgaaaggtaataatataaaagatattagcaatttatgtgtagtgaacagtaaaagggcactagctattatgaatttgctttccctgtctataaatgagtaatgcctttgtttcttccttttttgttttgcaaaaatatctttgagcttgttataaacgatcttaaatggtactgaccattgggtgactttaggaactatataaggtagtaagttttattagttggatatagtgtagaaatatcttgacaaatactaacctgttcttgttgtagcgatcttgcagttagatgcaccccagaaaaattattcagttgcacaaatatcttggtatggggtgaggtggatcctaagtttccttcttatggaagctatgacacattttttccactacaacgcctttgtagttaggtacatgcttatctttatatagtataatcaatccattctttttttactatattctgattaattattcttttgacagccgattatggcagcaattatcgccatttgagatcttcatcattagttatggggtaagattatgttgtacatactgcattttctagtatatactccggtttttccttcagagttgtcagttatggaatttttcttgcatcattttcaacaatatgtagcagttgatattaccattttattacttattatgtttttattcaagattgaatacaagttttcgtgatctcctgtatgaatacgtgtcctgacttgcaatactgtatatttgtttccaaagttgtctgcctaggttgttttctactttaatgcgttaacttgcatgcttaccatatccacggtcctgttgctattcttaactaacatactgtagcttcttttttcaacttggtataccttgttgttggggttaataatcatcaataagcattgactatcaaaactttcttatgcaggtgctgaactttatgtggttgaaattcttcctgatttggcgctacttcaggttttggtcactggtaatttgaacatttaaaatcaatattgattcatcatgcaccctgcatgctttaccttttgatacaagggaacattgtcaataaaacaactgtgttctcatatccgcactgttttatgtaatgttttttgtgttttatgctgagtgtttcattgcaggtaggaggagttgagacgcctgaaaatatgccaaggtgtataaataattgtcatgatctggagagtttctggaaaagctggcatgcttcttttaacagatggttggtcaggtttgtgttaaagtagctgctttaagtactaatttatgaattcatctgtgctaccatgcatatatttcattttgaagttttggggttaaaactttattctgttcatagcctcacttctttaacatatgctcaagaaacgcatgcaaaaaactgtcatatgtccgcttagacagagtttaggcctatcaacattattacataacccatgcttacacagagttggtatgtgtgcataccaatgtgcatctgtagtcaatccataagtattaatagtcgataaaattaagtttaactttctttgacatatgtctttcttgttgcaggtatctgtacattcctcttgggggtgctcaaagaaaactacttagtatctgggtggtattcacgtttgtagcagtttggcatgacctggaatggtaagttctgtaaaatttataattgttatttttgtttggcaacagctaggttttatgatgacttacgatgtcaatttgattgcattctcataaacaggaaacttatttcatgggcatggttaacatgcttatttttcgtccctgaaatattggtcaagtctctatccaacaagttccaggtaaagttcccttgtgtgatttgataagacttcataacctaaaggataaagcagcatttctttttctgttgttgcattcatttgcttagttgcaagaaacaaacttaagtattttttgtatggaaatttgtgagatggtaaagttgttttactaccatgttaagttactccctttgtttggaaaaataaaccagtctgtacagcttgagtttggaaaggaatactagatacttctaatttaaggtacaaacaagaacaacagcatggcaaccatatatactccaaactaataagtttttgttttctcatgcattgatggattcttcatcatgcttgtttgatgtcgatggaaatttcatatgattagtagctaatgtatttaaaaatgtagccaagaagtgcccttgggttgttcattcaccgggagttaagtgcaattgctggtgctgtgacaataagctgccttatggtacgtcttttttttgggggggtatttgaattcatatttaaatgtattcaaccgattattctcttacttcgctactggtttactacaattaaagattcctggcaccaaatctcctaggaaaaagtatgcatgcaacagcatttgttgtcaacaaagattcttttagagtaattcatatatcattaaatctaggattttcagtcttacactagatgggtcacatccttgttccgcattgatactgatatgctccactcatgcaggtggcaaaccttgtcggttatgttgtaggaccctccggcattaaacttctcatgtcacgaatgcttgggaaggatggtgagttgcgaattcacatccattatttcatagtgaatttcattcagtcatacggcctcttcagctgacgcctgtgtctattttgcagcccttcctgtccttgccttcatatttatctcattctatgtgggagttaaggtgattcctttgctaattactttctttttgacgctacaaaataaaggtgattccttgtctcacagctggtaaacttttgcagcttatgtttcatatacgtgacgcacatgagaatcaagggtgataactgataagtcgacggggaagaactcccactgtaaaatgtagacaagcagctgcgatgagacgctgtcaagactcaagacaaataggcttacctcttcttttatgggatttgtttgacacgaacgaaaagctcctctgaccgccgagctttggctcttctgtaatgtagggcttattgattggggtagtgaagataatagagcacaaatggaaatggtactacgagctctgtttttaagagtggaaatgcagggcacactccattggattgaaggaatttcaattctcagacaattttcctatgagctcttttggaacaaagcaatatcactggcaaaaatcctatggagatttgcttcctatggctcaattccataacagtctaagcatgagctcatacctcacgttttcgttttccttcgagaagtcgtatgcattctcttcctttctttctctagcatctctctcccacaaaacaatttcttctaaaattcatatgttttgttttctacaagccatccacacacaaactcttaaattcctatattttggagcgtataagattttattcctacgttttatttgttcttgtgttttatagaaatcgtactttccaaaggagccataagaggctcgtgttcaaattactcttttaggccttatgaaattcctatcattcccaatggggcatctaggtaaagtaacaatagttcaactggttaggttactggatgaagcatgttcatttttgttcaagctatatacttaatatgggtgtttgtatttatggctttattcttttattggtagaaataaagtgacagaaaaaggagacatctctttcgctctcatcgtttagagatccaaacattaattgaagaaaagggaaaaaaataagtccaagtagaaataggatttaaaatacctgaaatcctctctcaaaagattaaaaagagttttccaatttcaatcttccacatcaatgcttgacaccaaaaagattcaagagcgatgatttgctctatgattgataaaccttcataaatggtagaaaaataaaaaaaaaatcattcttaactacttgaaagccaatgacgaaaatttatcaatgataaaagccttaaaacctagtttaaaattgagttttaaaattcaaattccgatttcaactgataagctaacaagcaaaaggtagagcctaatttagctataaaacaatatcgtaaaatggtactctctccgtttcataatataagactttctagcattgcctatattcatatagatgttaatgaatctagacatgtggacaatgctaaaaagtcttacattatgaaacgggggaagtagtacatactaattggatagttttcgttgaatagcaaatgatttggcaattctgtcttttttggcctttcaaaatacctgtctacagaaaccagaaacaagaactagtgatcactacctctaaaaatacccagatacttagcctttaaacctgatgaaaaatcatgaggccggttcagctactgggcggtttgattcgtacggcaaaagcggctcgggttggctatttaattcttctcgcagatcaagaaattgtggatcagaatcctctacctttttaagtcacgtgactttatcactgacatgtgagccagatagatctagacccacgtgtcaataacaaaggcatggtgaggatagatgatctacatctgaaatggttcgccatcgctaactcagaaaactcaagtcatccccttcgacgagacatcgccgacatcccgtgaggttgccatctgcaggccacgtcagctcgccacgccacgccatgccgtcgcctgcgccaaccttgggagtcgagccgcgtggacagccaagagccgacgccgccgtcctcaagaaaaagcaacctcggcgcatcgtggcaccgcgccgatgtgcaagaatgtcggtcgcgacatcagtacggttagctgctgaggtcatagactccgaggaacgccaacagcaacccaccccattgtggcctgcgggcgccacacgccgccgacgtcttcaagaaacaatagccgcaaactcggcgcgctgtggcaccgcaccggtgtgtaagaacatcgacctcccccgccgaggctttcaactccgaggaacgctgagcgccgccacagccgctgacaggccggcgtgcgccagttaccaccccgctgaggacgctgaactaccattgaatcaaaaaaggacgtttgagattcattcacatcaccatgagtagcatttttactcatggtgatgtgaatgaatctcagacgtccatttttcgatccatcggtagtttataagttttcactgcatatgtggtttgcactatatatttttcccatcttttcttctctatctctatatgaccatgcaaaaatatgtttttaattcttttttgcaatgtgactgacatgtgggtcccactgcaatgcatgtgccatcataccatgtcacatcagcggatgaagggaattagagcctatttgaacctatatgacaccaatgacaagtttgaagaaaaaaaaatacatttttggagtttacagaattacatgacacatccacactagtttttaaataccgtctgtatactttaatctatttttttcatcagtggtcctgttcttttctccaataagagttggatgaagattaaaattttcgtggcacgcttttcaaactgctaaatggtgtgttttgtgcgaaaactttctatatgaaagttgctctaaaatatcatattaatctattttttaagtttgtaatacttaaaaaatcaatcaatcatacgctaataccatctcattttatgtaaaaaaacttaatcttcatctttagaagaaaagaacacaatatatattatcagaaaaactacctaatggcatcccgtggagacggaatagtagtactgccttatctcctcttcccctctctctgtgtctcttcccctccactcgctctctctctctctcttcccctccactcgatctctctgtgactatcacccatgagcacggaggcggcgacggcgacgatggcgacagcaacgacggtgatggcggcaacaacgacgacgatggcggcggtgccgtcaccactagcccccgcggatgacctggacgacagccggcggggctcccgaccaccacgggcgacggctgtcgtcgagaagcctccccatcaatctcctcaagccgctcctcctcttcgtcgttcttgtcgctggcttcctcgccgttgccgccctcctcttccttggcggtgctagcgcctcctacggtcggggagcggtggacgcggccaccgggggcgagcgcttgcacaacatgagcgacgaggagctgctctaggcggcgtcgatggagccacgatttcggcggtttggagcgaggcacgacgacgagcgacggaatggcacaaggtaggcaccagatctatcgcctcctcttcctcttcctcttcctccgccgccgccccgctgctcgacctccccgacccgcgactcctcctcctcctcctcctctctcttgggatatcacgctgatacccaggtaccaaggcatgatacctaggtaccagctcgatacccagggtaccaggtatcagtcgataccaaggtatcaaggcctgatacccaggtaccaagccctgatacctaggtatcagctcgatatccagggtaccaggtatcagtcaatacccaggtaccaaggcctgatacctaggtatcagctcgatacccaaggtactaggtatcagtcgataccagggtaccagctaataccagtgtattagataccacctcgataccttacccaaggtaccagggaggattggataaggtggaatcacatgatagcgtgggtctccccacgaaattgacgatgcatattaaatctctcaggattttagttgtcccgtgactaacaagagtaacggaatcccgtggggtagcagccctcatatattattctgtctggggaagctatgtgagaaaaatttataacttcgcaagccacctaatatgcaccactccactagtttttacaaaaccagctaatttcgagctgcaccacctccgggttgaccaacccagccgcccgccaatggcgaccgccgccgccgacgagctcgcgctgcggcggctggacgacgccacccgcgacgcccggaggcttcagctcgagaccctccgcgccatcctcgccgagaatgccggcgccgcctacctccgccggtacatcccctccgacggcggcgcccaccacctcctccgctccaccgacctcgccgcggcggccgacgaattccgcctcctcgtccccgtcacctcctacgacgactacgccgagtccatccgccgcgtcgcggatggcgacgctgcccccgacgagctctcgccgcgccccctcctctgcttcttcctcaggtgatccacctctcctcctttccactcttcacttccatcagaatttctccaccaatccatggctgatccgatcgacgtgcagctctgggacgagctcgctgcggccgaagctgataccctacttggattcgccgggggcgagggccgccaccgccgccgtgatgcaggccaactccgccctcgtcagaaggtgttcgacgccgacctcctcagccttcaccatgtttcacactgatcagggctctgatctgatctgattctttcaggctgttccctccacggccggcggtgagcaaggcgctgtggttcttgtacgccggcgaggtcaggaagacgaagggtggatacgaggccatggcggcgacggcgtggggcatccggagcagcggcatccggggagcctcgccggtgatgtccgcctgcgtcagccccgccgaggtcatcctcggcgccgaccaccagcagcagatgtactgccacctcctctgcggcctccgccgatgggacgccgtcgactgcatccgcgcgccgtacgccgccgccctggcgcgcgccctccgcctcctccagtccaagtggcgtcaactctgcgatgacctcgagtgcgggacagtctgcgccgacgtcgtcaccgacgcggcgatgagaggcgccgtccaggacggagtgctcgccgggccatgccccgagctcgccggccgcgtccgccgaatctgcgagagggatgactggcgcggcgtgctgcgccaactgtggccggacgcgaggtacatctcctgcgtcacgacggggaccatggagcagtacttcccggcgatcaagcacttcgccggcgaggcgttgccggtgctcggaacggactacctcgcctccgagtgcgccatcggcatcaacctggagcgcacgtcgccgcctgaggaaaccacctacgtgctcctccccagggcggcatacttcgagttcatcccgttcgacatggacgccgccggccgcggcgccgccgcggcagagccggtggacatcgccggcgtggaggccggcaagacgtacgagttggtggccaccacgttccgtgggctgtaccggtacaaagtcggcgacgtcgtgaagatcgccggcttccaccactcctcccctcggcttcagttcgtgacccgcgcgccgccgccgcaagaacacggcgaggtgctcaccgagagggacgtcatggccgccatggacaccttccagctcatgctaaaggacggcggcgaggttatcgaatttgcggcgttcatcattgacggcgacggaggccagcggcggcggcgatgcgcgacgatcgccgtcgaggtgagcaatggaagcaagctgctcgaccatgagaggtcagccgccttcctcaggcgatgcaccgcgccgctcgagggctgcctcggcggagcgtacaggctgagcagagccaccggcgacgtcgcgccgctggaggtcgccgtggtgaggcccggcacgttcgacaggctcgccgaggccgcgatccgcggcggcgctccggcgaaccagtacaagccgcccaagatcgtcaggcaccggcacctcgtcgatgtgctgcaatcctccgtggtgtgcagcagcagctcaatcactgaaccagctgctcactagcatctgtctcattgtgtcactgaaccagcggcagtttcttgatcgtgagtccaattccggcactgacaaggtgttcatctccgattcgattctgaattttcagcactggggaggtttcagtctccgattcgatctacaagaagaatccctcaccctttataaggatcacccaagctagagggaatcgtcggtcggttgctctcgtttggtcagcgctgatttcagaaattcagacttgcgtccccgcaaaaaaaaaaaaaaagaaaagaaattcagacttgtgcagttcagaagcagaagagatggaagctgcatcatcatcgggagctctgccattgccgttgccattgctcgtccatgatcttggaacccgtagcgatgactcgcagacgcaattcagcatctgcaaccaagcactcagcactgcagccatcgagctactgagagatttcaggtgcttcgagactccacaaggctgggtactcactctgaatcctgcgtcactgcaaaccttcctatggcgacctcaggacagcaagaagatcgatctcccaacggcgaaacagaacttccctagaagcggcaagtgcctcctctccggcaacccaatctcgtcgtcgtcagattgcgccgtgttggtactagatcttgacaccccagcgatgctagtctgcaagatcggaggcagtgaatgggattctttcagctacgagctctccatggtcagcaagaacaacaagaccctggaggttcacatggccaagcttcagggcatcgatgctgttgccggcaaggtgtactacacattctcaggagacgctctcggagtaatcgagttcagcctggaggtaaaactctctaccatggatgtcgacatggttgaattgcctgccagtatgccaaacttctcgacagtcatgcggcgagctgtttcttgtggtcgtcttcttcctcggccacaacctgcacaggatcgcggaggtggcggtgtacaagatggatttctcggggccatcagagtggtgcaaggtggacgggatcggtgacagtgtgtttcttctcggtggagatttcatcggagcttctaattttggagcgtcgtgctcggctagtgaccatggtttgtccgggaattgcatcaattttgtgaacaatattgccgctgaggagaattttgttcatgtcatcgacttggagaaagggactgaagaagtgcttcggcctttcagacacaaaggatacccgctgccgctgcgtccacccttctggctattaaccacccatgattgatatcttttccttgtagaatttgcacctcacttgtcatatttgttaaagtaggtttacagttaaatttgtcatttttgttacgaattatagaaatcgaatttaaatttatgtctgtggagttatatattttatataaatctattttattttttttaagaaaataataactatgtagttggcaatttggcatacaaggaaaaaaaaacaatttcacctcctaagtaacaacaaaaattcgtaccatagggacatagggtcactgacattgaacaacaatataaaagtttatcttaaatcataattaacaggtgaggatatgtttagtagaacttcaactctcagatctacctaaagctcaaccaaacggttcagcttaaaaaaactagagagctagatggaacgttctgaaaaaatgtactagcgtcgtggtgaagcggggaaaggcagcttaaatttctgaggaaatttctgttgatcagacgagttctgcaacaggagccaaggaaatagtcctcaacaatattcagataaaactagaagactgacagaagagagaacgcatgcaacaacaagtaaatcatctgcgtcgtcacgtcacgggtgcacgtagacgccgacggcgtcgagcagccacccagaccgcgcgaagaagccgacgacgcggccgccgcccttcaccggcacgcggaacgccgcgccgccgacctcctcgccgaacggcccgtgcgtcttcccggcgctggtgacgaacgccagcgacctgacgacgcacgcgtgggggccccacggcccgagcgtcccggagacctccgtgacgcgctccgcctcgccgagcttcaccttgtgcttctccccgccggagccgccccacggcccggcggcgtgcttcgcgccgtcgatggcagcgtaggtgaaggacagcgcgtcgatggcgccgccgctcctgacctcgatgctcaccaggcggtgcggcgccgcgccggcgccgagggcgatgtcctgcgggtcgccgccgtcgccgccccatggaccgatcttggcgagcccctccatctccctcctgcacgacgcggacgaacaccttgcaacacacctatctactcctatatactactcacgtacacagcgcacgaacaccccttggtatctccgaggcgattaatggattgaatttttcagtaaatgcattgaattcaaaccaaatcgtactattggttatcgagcaccagaggccggtttgaatgaattaatgcggaattttgaacggcgccttcagttttcgatgtgacttttgagctgccacgttactccctcattcccaaattaatcatcatataataaatttaaaatttcttaaattgatcatcatataaccgcatagatatggattttatcataatacaattagtacagcatgggagaatgtgtgaatgtgtgcatgctaaggtatactccctccattccataatgatcagcatatttcattgtggcatcaagaccaaggagagatcctctacccgttttctatttaatccttgtaattaatctccatattaatcggcttggagaaacgaaacgacgttactgccgctgcatgattgcacaggcaaggaatgttccatgctgcatgcagctcgaaaatcgcatggcctactcgatctccgtgataactagttaatccatccaacatgcacatgctaccagcgataatatgctgatcaaatcggaatatctccactttcgttatgtgctgattattatggaatggagggagtaattggtatggtgttttaatttatgcatgcactgtgagagaatgtgtacatggtgtcttggttgatgtgatttagacaaattatccttggtctcggtagataaacatactccctctgtccataattatagaggattttggtctttagatttgtctaaaattatggacgactttgcttctcccaataggatgagtacaaccgtcattagtaatcgaactcccatcctttgtagtatgcttatgctaaattaaattattgattggaatccaataaaccattttaatattaattggttgcatgcatgtatatgattcctttcttttgtcacatagtggataagttaattcttcctctatcttgatgaaaaacaagtcttagacatttaaatggaagaagtactatgtttaagcaggtagattataaaaactaaatgtagaaatgaattgttttgtttcacttgatagaaagtaaaacaaacaattttatctctaggtacataatctttccgtcccaaaataaactaatttttagagtttaaattttatctctaaataagctaatttatgtatttttttatatatacctttagtccacaaaatcaataggtttattccttcagtatgtcttgctgcacctacctactccctccataaaaaaaaatcaaactagtattagatggagcctttcctaatacaactaatttgaacatactcatatctaaattcattgtactagaaaatatctcgtccgatattaggttagccattttgggacaaatggagtacgtactaatgctatacttgtacttcaaccatttcaaaatataaggcataatttttttttaagatgtttcataatataaggcatgcgtgcatgcatgtaattaactagcgtctactattaaattttaacctattcattctcaagatctctaattttattgtattaggatgattcaaacaataaggtaataataattattatttttttgtctttaggtaaaaatgtgattatgccttattctttgaaatagaaaaaaaattatattttatgcattgaaaagcgagcagtcgagtctttaatgtgacaaagcaagtacaaataacgaacaccagaacaccagagaatgcaatagaggatcagcaccagcttggctaggttgaatgatagtgcgaggctagctagggtcaacgccaacgccaacgccaacgccaatggttcagggcaggtaattgcactgcaaacatagtactgtactgctcgtttcaaaatgtaataattttcaactataaacttagtcagttgtttgtctaaattcataactataaatgattatattttagaatagagatagtactattttaaccatataatggtcctagaaacataaaactagtgatgttaaactgtatgaatttatagaagagtatagtagatgggcctggtgtgtcattaggtccctgaactcctaaaatgcatttttaggtcccttgctatgtatgtcatataggtccaaacgagttctaacccgttccatgcgctgacgtggcaatgccacggtgacgtctacgtgtcagtggaatccacatgtcaaacatatataaaaattaaaattaaaaaccatattttctcctcttaggtagacagaaaaaagataaaaattataaggtagagaggagaaaatatgtttttctaattatattttattctatgtgactagcacgtgagtccaactaacacgtatacactatcgtggcatgccacgtcagcgcatgaaggggttggagctcgtttggacctatataacacccaaaaaaagtttaaggacccaaaaatacattttgagagtttagggacctaaatgacacacccgtttagacctatatgacaccaaaacaagtttaaggacccaaaaatacattttgagagtttagggatctagatgacacacccgcacaagtttgaggaccgctcgtgcacttcactctttatagaaattaattgtcaaagatataaatttttgacttagaacaaagcttgaacaccaaagtaatttgaaacatagtagttcaaatactagagctgaattacaggctaaaggagggaaaatacttgaaatgcaattaagttttacaagttacagcaatgtcagatagtagtacatagttgcagctcctagctctgcaaagggaacaatgttcctgagaacgaaatactaaagcaatgtccaacattgtgctgtttacatgatccttcttcggatttacttggaaaataaattgaatagcagcatcagtcaggtcagtaaagagtcccttgttttctcagcaagaaaatgttacagtccacttgttgcttccagtttccactatacccccttcgaactgaatcatgtgatgtccaattccatgagatcttgtttgtgtaccagatcattcagaggttgagctatgaagaaatgaagaaacaggcagcctaatccactagggcttgcagtacaattctactgtttttatcatggaaaagcccccaagaaacaatacaagtctgtacagaatgacatgttttaaatgtctaagaatttactacatagaacaataaacccatgctgatgctgtggtaataactagcgttttcgctggtgcgctgcagaaatttaccagtggccactccgaccatcgacggtagcaggcagtttgttcgccacatatggcttcggtggaccggtttggctggaatcgatcctttcaacatcacctgtttcactcttgcaggtctggtttcttctggggtatgagctccccagaggaacactgctgtttggagcaattgctgggttccgaacaacccttcgctgctcatattgttgctcagcagcggatgtcgaacagttaccgtatactcaacaccgaaccaactgctatacacaggtcttgcagcagcacctggaagataggtaacgtgcaaaatctatcttgagtcacacaatgtatgaaagatataatggaggatacaagtttaattgcaggttaaagtcaaatggtaaggacagatgctaaccttgagggattctgcttgcaccgactgaagcagaatcgtgtgattttagattgttgtttatgattaaacacctggaaagatccttagtgacactggatgtgctttgtggccggtaatatgaatagacaacacaaggcctgtcgatacaatagtagatagtcaagaatcaagtatatattcaactggagctacaagttccatcggttaatccatgtcatataaaataaaataaaataaatatcttaccttggtaatgagttatgttgtctctcaggtggagctgctgttgatcccttggcataatgttcttcaaggtatgcaaactgttttttaaaatggtctactgcactgtaaacataatagagtaattgatcttagttctttgaattatctcaagtttttgtcgtgcctaatcgatttcgagcaacaaatagagcaattaaaataagtaatcactacttaatacggtgcatcaacaaaacagtcaattcgcataaatatttgttatttaattgttaacctggacatatagcatgttcaacaacatacaactggcctggcagttcaacaataagatcactaaattgtctcagaaattataataggaacaactcagttgaagattttaaagcaatggaataaaaataaacttggcatgactacacaccttgggtacatgaaaccagtggactcagttccctcaaggaactccctcagcatctttggatgatactccagaatttctctatatatgagttcccttatatcttccttagtaattctccgcctctcgaactcaaactctagctttgtgataggttgagcagaaggctctctatcaacattggctatgttcttgaaataaggatcagcaagcgcctgaaaatgtggctgctacattagctgctgacacttgagataacacaccaaaaaaaaaaaaagatgcaaggttgatgctaatactgacaatacctcctcagcacttggccgatcttttggatcaaaagctaacattctctctaacaaccgcattgcaagtggatctgcatttgggaacttctgtgtaaatggtataggttttttccgcctcatactgttcaagtaacgtcttgccttctcatttctaatctgttgcataagtgaatgtagatataagcattataggatttt

SEQ ID NO: 8614 - DNA, 6353 bp, Oryza sativa
  unsure (1)..(6353): unsure at all n locations
agtcgatttcagtgagaggaggaaaaggcataaatctctagtgaacattgcagatgatgccagcattccaatgtggacaccagaaaaagtaagggctggggtttcttcatatagcaaggatgagaatgaagacgatgccgaagatgaatccacacaagtgttttgcaggggggcagttttacatggaagacccttagaaggaaaaggtcaagccacttctccaattcctcagattcaaaagggcgctcggcattctaatcttgggattcaggaatgttgttgccctgatgcatttgtttgaatcctctcctttgagaaaggagtgctcctggatagaaattaacagggggtatttagggtacatttaagcttacaaattttaggattagtggtattgtatggatttcttggtattaaattgtgtccatcagaactaaaacatcgtagttggctttctggtataaagtagatgtactgttcgtctcgccgtgatatatccagtggcagagtggctttctggtgtgaagaattatactgttggtcgtgttttgggagtggtgtttattggtaatctatcgagcgatcggtgttaatctagctaggtttctgcaatggatcatatccatggttgtgcgctctgtgcggccggatgatcgcattaaatattcatcatttttgcgcgagcaatttatacatacgatgaaaccaggaaagttaaataaatttggactataaggtgctccctctacattctggactgaggatatcaaagcaagtttatttgtttatcctatatgaatgtgacatctttctggtttgaaaatcgttggcactctacacgtcctggtgcctaactgcctatgtctaatgcatggaatttagaaatgtcaatagaattattggcattagtttcttgatgattatgttcaagagatacacttacaaataagatataaatgatagtctgtatttatatagttggaaaaaaattagcatcttcaattgaggtgctaaatttggctctccaaatcttcgttccgccgttctcaccaaaatattgttttttttttggtccactccaacagactcttttacgttaattggatttgcatgtcaacttgcatattagcgggacttgtacatgagaggaagggaaagagagagtatgggtagggaaacaaaaatagaatggtcagggtggctaaatttgggcactaaaaaaattgttgttgtttttgtcatgttggctaatactccctctctccgtactcgtaaagtaagtcgttttggacagccacacggtctccaaaactcaaatttgacttcttgtttctataaaaatatttattgaaaagtgatatatgtatatttttatgaaagtatttttcaagacaaatctattcatataatttttacatttccaaactcaacagcttgagagttattcatgattttatattttcaaggtttgacttaaacattgtcctaaacgactttctttacgagtacgaagggagtatttcttaagatagagtgagacggcttgaagcatttattacattcaaataagtaggcacaaaaagtatcttcgatattttgcctactcgaaaattaccgcacatcttaaataaatataaatacagagtaataatttagagggatagatagtgagagggagaagaaattaaaattttactgccccgtttcagactatagttgtttagattttagtcaaaatcaaattgctctaaatttaattaactttgtagacaaattcagtaatataatatttacgacaccaaattaatttcattaaatctataaaatatattttgagtaacttgcatattgggtctatattttttacttggactagaggcaatctaacctttccactatgaaccacctaattttacaatcgatttcagtttggacctccgtttcctcaagcttcctctccctccccacttctccatgttgcaggaacatcaccggtgaaagaccctatccggcaccaccgctgcactcagcatcatccctcacaacctccattcttgacatcgagcctccgtagcaccgacgcggcgttcgacctcaagtcctattggtatcggcgctggcgcaataacatccgtcagccaagctagcaccacctgtgtgccccatggctttggtccttgtcttgagctcgagctccaccggtcggcaccatgctacacctcgagctccgccagcnnnnnnnnnnnnnnnnnnnnnnnctgtccctgcaatggccaaggccaatggagaatttcttttctgctttctttctgaccgcaagtgaaaatctaggtgggggagatatcgagatgccactcaagcttgcaatgctggggagctccggcgtgagtgctgcagcggcggtggactggtggttgctcaacctactcggcaaacctgctcatggtagggaaagctgaaggtagaagaacatgcccatggtgaaccatttggtaatttttcttggtccaagttgaaaatgtcagcttatctctggtccaaagtgcgatagtggtaaaacaatgtgaccctatgtacaatttactcatatatttttataatgtatttgtcttatgttaaatatattactactctttttataaacttggagtagcttaactttgaccaaagtcaaaacgacttatagagtttgtttgggggagtttctagctgctgcagcttctcccagaatcaaaagctcccccaaacggtgcagcttttggttcagattatgagaagctggagttacagaatctagaaaaataaattgaagccagaagttgagaaacctagttttttcagattctcggaagttggctaacaaacaagtgtttatcataatcttaagctccttcaaacaaccccataatctgaaaatagatagaatatatggctctgaattccattatattgttggaatctactactccactacacgcaaattttggattaactgagatcattatttgtgtattgccctttcactagaagctactgacaggtaggcctcgctcttccatggcctggccccacatgtcaaccacctgtaattcctcctctcctaatgaatcaacccaatggcccacttgtcagtgaccctgttcccatcctaaccgcagaaaccctaactccccacaaagccttcctcccaaaccctccgcctccgccttccccttcccgctctctctctctctcccacgtgagcgcgaggcggcggcggcggcggcgcgaggtgagcggggcaccagcggcggcggaggagatggggaaggcctcgaaggggtcgcggagagggaagaaggcgtggcgcgccaacatcagcaccgacgacatcgaggacttcttcgagaagcagacgcgcgacgcgcacgccggggccgccgccatcccgtccctgccctccgactccctcttcttcgtcgacaagccggcctccgccgcgtccacctcctccgccgccgacgccgccgcggcggatgtcgcccccaaaggtaaaatcacaaggcacgtggggtcgagcgtgtggatgttgctgggtgatagactcccgagtcttctacctcgtggttcgggttgtggtagtagtttcgaatcgacgctaaagtttgtgttcttggaatgcttaatgtgaaaaatcgcttcatatagtcgcgtcaagctggttctatcaccatttatctatatatattgttttgatactgtgaagattagttaaccttcagtttgggacctgaggatatgctctgttacttttaaccgctccttttgatatttaattataaagtggttcatatcagcaatgaattatctcacttgcttcaaagtaggcgcaaagtttctaaatgagttaatgtttattgtgtctattccctcgtaacctctgtgtttcctgctaatgtatcccttggtgtgttggcacttttgtttactggctatagatattcctgtccaaaggaagattgagaagaagagagagaaggttctatatcatgagagtgtattgaagcggaatccatatgtacaaccagtcccgtcttctttaacgacaaagaaggataagaagaagtcaaagaagaaggaatcgaaagagacacaggaagcgaaaattgttcccatggtatcaattgcttttatttgagacaaaatgaatttccttttgttcaagtcccaggttgctaaggtggactcatctgttttacaggaagatgattcaggtgataagatccttgacatctggggtgaagatgttaaaggagatcacaaggctaaaaaggtgttgctatgctccgcattctgttaatctgttttcactttctctatttgtattacaaaaagtcgatttttagaactatgcagtcatatttttcaaaatttacaaatctcttctgttgcaatatgctgaatttgtgggttttgtatatcaattttaatttgttagtttctttttttttctttttatcatttttgttgcagaggtctaccgcatctgtgattcctgctgttgaagttgaggccccaggatgttcatttaatcccccattcgaagcacatcaggtatgttttgtaatttatgttccggatttggcaatgttacccatgttttaggaactgatgatccttatattagtggatatcttagcacttatatttaacaacaaaatcctgttgacattgtaggattctcttgctcaagctgttgctgatgagatgcgtaaaatctacacgaaagagttagggcccaaacctgtgccacttattgttcctggtgaagcaatcactgaagaagatgtaagtcttatgcatctctttgccaatagatggttgaaatttctatattctcatgtcttggaaatgttacacgcgctctcaactttttagttactttgcaatgaaaactgcctttttgtgaacttcgttgtgtattatgagttgagtatttttggagttggattccatatacaatgccagtatgttctgtggtatattcatttagaatagcatggcccttcaggccttcaccttactagtggattgtgcttgtgatgtctatgtagcatttttgcgtacaatcttacttataccttttttctgcatgttgcctacagaaattttttcttgatgcggatgatggagatgaagctgttgaagaaggtgatgaagaccaggctgctgatgctttggctgttcagaggttagattcgactgttctattggaagtatagttttaataggttatgcacttatgctgtacgatagacttatgcgtgatgcttaaatttccaaagcttttacatgcttttagggataacatggtcactatgcccttaatatatattttcaaagcttttatgttttaatatatctttttccatttctatatgataataagctaatggggcaaaatatgggttatccctgtttagagtttttatattcctcaattgctatgtggcacttgctaagtaattatattagaattcaggtttactgtatttgtgaaaataaccatgaaagtcacagcttataacttaagaattctggaattaccatgtgctgttcttgatgaacaaaacacactgttctgactcagtaaattttaaatttgtcttgcaaacactattagagtgtacttttgattgtatgatttattattttttcaggaaaactaaaacgaaaagagttacaagagtagaactgaacaaaagagctcgtcgtaaggagaggttaagagcagaagctgaagcaaagaagatggaaaatctttcaaaggaaatagataggtagttctttttatttttgttcactaatctcccaagatctgccatttcagtcaaagttagcttgtattattatattattctttttgcagcctgcctgatataataaatgaaattgctaaagaagatgaggaaaaggagaaaaggcacataaggcgaactgtggctaaacaggaaagactgaagtcagccccgcctcgtctgggcagacacaagtacacctctaaaatcacctactctaagtcactcatattttcttacagcaattcctttaatcttggataaaattgctacactgttttaaagattctgcaaattaacaaaatagtttagtttgcatatttcacatataatgatgccatagtatatcatggagacatttaagttagtaggcaagatgtttcatggacactcaagtagaacaataattttagaataccgtgatgtagtagtcgtattctttttggaagtgaggcagttgagtactccctccgtttcatattagaagactttctagcatttgcctacattcatata

SEQ ID NO: 8615 - DNA, 18865 bp, Oryza sativa
tgttggaaaaagcactcgcgctcacgaatctgtaaaacaacaataccgatttttctgacccccttaatttgaaaacccaaaaaaaaaaagcacatcaactccaaattgaatggatccaactaaaaataaacagccacagcaagaacaagatggatcagccaaaaataaaacacacagcttcaactcaccgagatctcgaaccaagaagacgagctccgaccacacagccgctagcaaatcgaagaagaaatcagcagcagcagcacaggtagaaacaactcctaggagatcccaagaaccatcagagatgtggatctcctctctctctcctccggggaaagtgagcaagaaaggcaggatcttttaaggcagcagcagtccagcaagaacaagaaaagagagccgcacagctcactgatcctcacgcgcacaaggcaaaaagaaagggaagggaagaacaagctagctagctggaagagacctggaagaagaggaggatgcggccaagaaatccagctgtgatctaggcaaagctcatggaggagagaggagaggagaggaggtggtagctggggagtcgagactggagagagagatcgttgtggcctctgcttttccgattgattgatttatgctggtaattgcaggttgatttcgctttcgtttcttggaaaaaaaatttttctcttggtgttgtttggtctggaggtgagagagctcccactagaataagggattggagcacatggagccatctggtttctgacgttctgtccacatcttgtgtttcttttgattatttactcttcttttttctattatattaaaaaatataaaaagaattggtactctactttgtttttctaaaacaagaaatatgtgatataattattatatatatatatattgaaaaatctaaaaacaaccgttgaataaaaatgaacgtctttgtctatatcattaaaagtaaaatttttacgctaagatttaactatgagttttactacgagaagaaaaggtttatgtttgtaacgtagacaaatcatagccgtttatttttatatctatccttatatatgcggtttgcttgacatatttttccggtttcttaagcaaactaatttaagtgtagaacttaaatttaattttatgagaaactaatttggtgttgtttttctataaatgttgtgacttagggcatgttcatattgtagccaaaataaacattaccaagttttggcaatattgctaaaattttggtaagatttcttatgtattgatcaaatttggcaacaaactaaatgtatttttttttgcaattttggcaactttgccaaaaaatggtatggttgaaaatggtatcaaagtgaacagacccttagaaaacttataattacttataatatgtgacagagagagcaatttggcttaatatatttttacgccgaggcaaaaaataatttattcataacaaaaagtccaaaacgggatgtctttatctactagagaaaatacgcgtaggaataatgagaaaggaccatgtccaggcttcctgtttaaggaaaaatggaagagatgaagcaatatgaatttcaacctttcctgaaaagatataaatttctatcattgctgaggtgtgacagcgtttgtgcagcatatagctatagaaagcatctgctcttcaattatttcccgttcctgtgtactgagaatgtaggcaacggaccgcaaattgaatgaacatttgtgtagcccctatagttcctggcaagaattcaagtgaatttactagtatttacatagagacagctaagctggagtgctggactagttatgcaaggaaatatctttatctattttaacgagtattaagcaatgccctctttttgtttatgtgatcaggcaagtagtaattccatgcttgatcattgttttttttttctaaacatgtatccatgtaaagaccattaaagaataattacacgataatattgttcgtggaaaacctaggacctgttcactttgatgccattttcaatcttaccaaatttttataaagttgcaaaaaaaaagtgggtacatttagtttgctaccaaatttttgtaactatataagaaatccttactaaaattttggcaactatgctaaaattttgtcattggcaaagtttgatatggtttttttggcatcaaaatgaacaggctactaataacgtcatataatccgtcagttttgttttttaacaatattatgggtgtcatttattttgctataacttgtttcattattagagaattttaaacgtttcgttcaaaaaaaaattaaacgtgacttatattttctatattttacactaaattttaaataagatgtatgattaaacattatatatcaaaagttaacagtaccctatattaaaaagagagagatagtatctcacgtatattgatgagatgagatttccagatttgaccgtacacgttctaaacaaacatccttttaagaacggatgagagtatcagaccaaattaatgtttgttggcccatgcacagttgcatactccattatcaactttagaaacaagacaaggaaatatcaaccttccaagttccaagtaaagagtgttttgccaggtaagaaacagcaaaaggttgagtaaccaccctttttcctcttggtttcagttgattgcttgattcagttggatgtccaaaagacaaactgttgtgtacaattataaacaggtcaccaaattctgtgcaaatctgatgtctgaggttaacatgacaaaactggtaatcagatgcaacaattagcagtggacagtgtcagccatctcaggttcacaaggcaatattttccaaagcagtgatccatgaaacatcatcaactaattttgcccacttcagcactaagaaacatgtggagcaaataatatcacttttttttgtagaaatggtactttgaagatactctttcatcaaagcaaacactccacttttaagagacttggacaaagttgagtgggattgcatatgatcctgattgctcactaattataaaaatggctacagatgccattgccagccatgtgctgccaactaaggcaaaagagtcgtccaatttataacgatcaccagtgaactagatttctcttgccgaggacgttaataatcttggttcttgaaggaccctgggttaacaagacaactaaaatgatgacaatctagaaaattaacaattttagaacatgtaccgatggttcattctcctaactgattactgttgactacatataataggatgccacataatttcctctttcacaggaatcagcacatcgggtcaccctcacctccatagttgacccacttagagatcacgacaaaaccaaagaagacttgtttctgatacgtctgtcacagagtttgcatcttcagtggtcacttgctagcatttaccttgtgattcgcatcaaataaggtcgatttgcccactctcaacaaggcccttgatggacttgtaccggaggacatacaaatcatcagcaactaagtccacaacctcctcccctctacgtgaaattagagcaccacagtgttaagtagagcttgaaaaggcgcaacagcaaaaaacaagagaacttcggcacttacatatcatctagctggaatgctcctacgtcactcttggttttgcagaagacaaaggtgtcaagctgaggctctggaactgaacaaggcaaaaaaaaaaaaatcgaatcatatagtttctagaggtcaattacagtattacatcactcaaaaatacatatgtcccacatcagcgtatcttcagaaataggaaggaattttgagcaataaaaggcatgtaaataaacagtctataaataattcccaaatcttcttaaaatagaaaagaaccttttgctggaactttctttactcttttaactaaaagtgcagctcaggttcctgttctagtaaaaagcacatggaatgtatttcagctccaagatacataccatatattaaccagttggaccatcctgatcacactatttcattaaaaaaagttatgcaccggattgttagttactacacactgattaattcctaactgtatgcaacacggctctttggtggattgaagattgcaaccactatacaaggtaaaatatatctgcatggatctttggcacaactgatgatcagtaaaaactggtgattatgttagacaaggaacattatcgcgctgtgtacggttgacatttctcactctgtactccctgaaactgtgtatggttgacattcctgcatactgttgtgtcatgcatttccgtttcaaagaactaactataacagcattttactttctattcatctatgcatgcggataaatagtactaactctaggaggacttaaatattttcagggcaaaccagtaagacaccattttctcgtcagttaactgtatcaaagaatataccactttgttagtaaaaattagcagtcattagtactccctaaaaattataataaaaggattgatatatgcgaagctgattcagttctagaactgtttaaattgagcatatccgagactacaagatgaatgagtatacaaagaggtctttattgcatcctgtggttaaataatgttatttatgagtatgatatgaactcaaattttgggtgcaccaaatttgatacttaaaatttgatcatactccaaatttgatcatgctatctgatcaaatctctgccaaatagtgaccaaaactccaaccaacatctatttggcagagattgatcagatagcatgagaaatgtcgtgttttctgctttgaaatggtgaattttgtactcatcatttgcattaagcagattatgtatcgctcaaaactacaaccaccaaaatagtattgcatcccaaataaacgcactaattataggatcaaaaggaatacccatgtcatcctccgtgctcgacaatgattgcctcgtgacggagtcatacccgtatggaagcttcgacagcactgactgctcgagatgcttctccatcatctccgtacaacttgcaacaaatcaaacccaacaaatgatcatcaaaaccacctgaatccagtcaatcaactaaccagcgtaatcacaacgagtagacggtctagtcgcctgaaaaatacctcttcgcaaatcgctgctcctgctgcgacagccggctcaagagatcttcagacttggagatgtgcatcatgtacttctcaatctacatccatccgtcaaagtaacaggcaatgccaatgccaccagttcagttcagtgatcgatccaatgcgggtggagttacagagaatggaaaattgaatttaaccttttgtaggcggaggcggaggtaggatcggaggaggaagagcgtgcgatcgagatccatctggtagagcgacaccaccaggtcgtcgacgccgctctcgccgaagtcatccagcgtctcctcctgaccaaaatcacatcacatgacagtcgataagaattccggaacaatttgagctagaacacgacgaattgggcacgaatcaagaatcgaagggaaggggaggagagggaaaccgacgaggagctggatctgctcgcggacgcgggagacgaggggagagtcgaagcgaaggatctccggagacgccttctcgttgcgccacgctcgcttgagaagctccacgtcagtgctcgccgccgccgccgccgcggcggccgcggccgagtcgtcgtcttcccaggaggacatctgctttcgctaaaccagtaactggcactctcccggatggtggcctcgccggccagcaaggggcggctacgccgtttgtgtcggtcggtcaggtcgacgcggcggtggcggcggcgtcggcggcgaggtcgccggcgggaggggaggaagcggagcgcgacggcgtggtggtgggggggtggtgggccgagccaaggagatggacgtgtttgggccttggtccatttgcagagtacgcctctctgcagcgaaagcgtatttgatactggacttcctcaaagcctgatgtagctgaccggctggctgagctccaaacatgaccagagcatgaataccaagaacccatcaatggctccatccaaacgacatatttacaaataaaaaatagtttataaataatttttttatatatgtgttgttattgatctaaaggcattggctaaaaataaattacgatgaaaaaaaactaaaatcaactccaaatttaaaattgaaaatttaaatcttggcttataagtataagtataagcggaaagatgaggatgcaagatttttttttttttactaaaacatagagattccattaacctatgtactagttacctccgtactcgaataactgcccatattaactgtaagtctaaaatatctcactttaatgatcatattatatggtgagtgcaatttgtatggttatatttaccacgcaacatactccatttaactgaaaaaaaaaacaaatcctagcacatatatactctctttggaacgctttggaacggagggtgtacttcaataatataacatcttttttaagtttttataatttctttataaaacatttaaagtttaaactagaacaatagtagcgctaagagagtatgtgattatgttgtcaggatagagagtttgaaactttggaaactttggatggctagaaagttagacaaggtaaacccaggttgtcattatcctgatccatattttagtatcttacaatactatgaagccaaaatgatactgatcccacctatgatatcctaattttcataatatctcgatcttactattcatttttcacatgatcctataaaatctgaagtagtatcttggtactacgattctaccaaatattatttaaaataaggtggattgaaaataatgtgaataaatatgctcaagtttacataaaaaccaatttttttttcaaaatcaatattacatgctttaatttatacattttactagaaaaaaatgcccgtgtgttacaaagggtgaatgttcttttaattattattatacggtttagttaagttaaaattcaccgtgagaatttgcttggatttgtttatttttacaaaatcatgagcggcaattaggagtatgatcgtctcaagttagcatgcgagtttttttaaagagatttcttatacgactctctttctatattccaaaagcgaacgtccttaaaatctaactcaaacacggatatggatttccaaaagcgagtgaatttaaaaaccgactcaaacatggatgacgtaccaaagtaccggcaaaaacatcttcagtttttataatagtagacatataaaaataatgtactttccaaatctgatagcatcccgatcctacggtagatttcaatactatgatactacaaatcagaaaacgatcctacctagcatctcgatactgattaccttgggtaaaccatgcaatgttggtttcaatgtttcaatgtttctaaagattagctttggaggagtactttagaaacattgaaaccaaccttcaatattttcaatgttaaaatctctaggataatcataaaacttgaatgatctttaaaaataactccatcaaatatagaattacgatggttgcttatcatagtccttctccagtattaggcaatcgctctttaagatgattttgttgattcttagtgagcttgccatgttgatagccgctgcattgcttgaacttccacttgtattgtaactcaagaaactaaatgatttcctcttgcttcttttcaaaattacctcacgaatcttcgcaacgggacaccattgttaacttcaacaaacgcgagcaatggtctggaataagagaaaaaccgatgattttatcatacccagtaactcagatgataaggaaaaaagcttctcttggatggaagtgacaactaaccacagccaaatgttttcaatacttatcctcctcctacaaaatcaaatagaaaaaaaccagggaaaaatcacgtgacacgtattttcatcaatgcttcccattgtttaccaaatctaaaatcagctaaggtcaagatttcaaagtttttcattgaagtttttttctaagcattgacttttaaatcgctaactatatactcctatatatttacacatttaacaacatattattattgttgttactactttgggcagtgtttagctcctttaaacttccaaaaattccgtcacaccaaatgtttaaacacatgtatagagcattaaaatgtggacgaaagaaactaattgcatagtttgcatgtaaattgagagacggatcttttgatcctaattacgccatgatttgacaatgtgatgctacaataaacatttgctaatgacggattaattaggcttaataaattcgcctcgcaatttataggtggaatctgtaatttgttttgttattagtctatgtttaatactttaaatgtgtatctgtatatttaaaaaaattttggcacacgaactggccttgtgctgcgttcgggaggagggggcacgtaaaacggagcacccattattgcatgatcaattaagtattagctatttttttttcaaaaatggattaatttgattttttaagtaacttttgtatagaaactttttataaaaaacataacgtttagcagtttgaaaaacgtgcacgtggaaaacgagctagatgggttgggaagttgagggagatggtcgaggtggcagtgccaagcaagcagccaagttggcaaccgaaaatatcaaaggcttcccgcgaccaccaaccccaccaccacacacatccatcctcacgacgccctccaccgcttcgcgaatcttcctccccaaccacacgaaaaccaaaaaaaactcaccttcaccctcgccgtcgcggcgccccccaaaaaaattcacccctttttccccacgctccggtggctccacgccgccccgcccgccgccgcgaccacccgttccaccggcgaatccgcggatttaatctcccacagctccccgtgagatcacaaagaccgggcgggcgtgggctgtgggctgggatggtgggcgacctctcctccctcctcgccgccgcctcctccgcctcccccgtcgtcctcgcgccatcaaaggtgcgccgcttttcttgctctctgctaccccggttggggctgattgatgattgggggaattcttggttttgtaggagctccatggcgtgcacttgccgatgccgctccaggggaagaggccgccgctgcagccgcaggacgctgccgtccacatcgaggccgccgccgccgccgccgccgccgccttccaggggcaggtgatggtgcccggccacgcgcatgccggcgctcccgccgccttccaggccttcgctgtgcccgacatggccgcgctcatcgacgtccaaggttcgtgttgcctcttcgattcctcttcttccttcgttaagtgcatgcacaagcacaccgttggctaatttgctagagattttgttgttcaattgaatttggaatttgccagtcgcagctatggatccgaattgtgagattaggcatgctttttttcccctaaagttagagacagtaatttgctttgcagaaaggagtagaaacaaaattctttgcttgttcatgcgcgcgccttggcttgtggtttacaaatgagacctgaagccattgctttacacatcggttgctttcttctgtgtgcttgcacatagtacaagattgtgtagtgagctttgcaatggtcttttctagtaggatggtttttcatggtatgttacacataattcaggtcaagattaaaatttcctactctcactaagtggtttgtcccgttcgattcatgatttaatctgtcaaattttcagttttacaagtgtggattagaattcattttcagttttgcattttatgctgattctaacctcgatgtatctgtgcagcagactctcaccctgactcagttcaacttagccttgggattgccgagcaatgctcaaggcaggagaaaatcctgaaatttctaaggtcagggtccgatgtgaaagaacttgatgtatctttactgactgaacttacggggcatcaaactctgccaatcaacttgggtactcaaccatacatccctgatgataagttatcagctcttccaatcagcatggccagtcaaccatatatccctgacgataagttatctatctatgagtttgaattggatgagccccagcagtatctaccagaaaatcaacttgtcatccctgatcctcttgtggagtttttccagtcccatggttctgcccttaccatagatcaaaacaggagaatcctcttcaatggaaatggagatgatatgagatatttactttcgattgtcttggcattcaatatgtctaaacgagaaataagcagttgcaagacagcatatctagttccatattttgaaaggtaatactgtgaagcatcatgctccttgtagaccttctcattcatcttattcatttgttcattgaggtttaatacttgagtgatatgcaaactccgtggtaaccgtgttctcttgagcactgtaaggtagaccaatgattctaattttgccactcaggctgttttccattagataaaagctgtgttaggcacctatggtcatcttttagctgtattagcaaagatgtcgcattaagatcttccttggtctgctggacatgttgacaccgtttcaactggccatgaatagtgcatagcatatttgttcgcggttggaatgaataattccatgtctggatcaatactcccaacagaattctaaagactgctgcatcacttcacgcacaagacgctttccctgtagaaatacagaagaaagatgttaaaattatttcttaacactattgctgttctagacgacatgtttccttgtgcttcacaatgatctgttaaaaggggcattgcattgcctctgtaatcaatgttgaatcatgtgttttttttcttgtcttagtgaccccatcctcattattgatgcctcttttttttggcttttgtctaattgtcttataaatgtcttttttgataaacaggaaaaggcgatcccgagcaagcagccatgcatccaattcaaaattagcaagcacagcagttgatgcttcaaaaaggtacattgcagtcacttgtgtattttctgaacaccaaccattagcataacttctatactgttttcctgccatagtcatgataaaggttaaatactcaatggattgggttgaagtagtgcaattcttattcttcaaactgctagtgtagactttgtagttacttcgaaaagatacacaatcacttgcagcatagactagacacaagtagtggcaggcttttttgtttgaacaaaataaaagatcagacacatagaacagacatgtgggaattactggactaaactacgatgatattgctctttttacctgtttctaaaactgcatccaaggttatttttacatattaatgtgattttttttaaatactcagcactgcaaatgggaagtcaaaatcttcatcaaggaagaagcagaagagtaaaaatattaaagaacgtgacctgtacccgaagaactatttccatgctagtgaagcatttttatctatgctcctggacaaggacaatagcagctcaacaattcattcactgaaaaaagctggtcctgagatcagtgaactgctgacaaaatgctctattggcatcgctggaactggcttggctgttcttctctcagttgtgtgcaagatggctaccggtatgaagagtcctattgctgctacgcggctggtgaacactggtgttggacttgggctcttttggctctcctgggcagtaaacggattgcgagacacaattactagcatatttagaagcccaggtgacatgaacttgaaggacgaagaggttgcagtcagaatacaaaagagcatgaacgacattctcttcagagctatcactatattggcaatcactgcttttaagtttgcgtaagtggttacatactaatttaccttttccccgacccacctgtaatatataatccaccattttggttcaggagtacagcactagtgcttctgtaggattaagtgccaattgagcaaatgatccccggtaattttgtagaaaatgagaaaccgttgtgaactgtacagaattttgctggcagcttggtgtatatgaaagatgggtttttttcttatctgtagatgaacaatccaatgcccaatgatttatctatccagcagacaggttccatattttagctacttatcctcgtttgttcctgatctatcgatgtttgattgaaatgtcagtcctggtgtaattttaagagattcatgcgctaaattttctgatatgttagaaacaccctgatttgcagaatgctcgtaatttgaaatggttaaagcctgctctcttcttaaaaaaaaaaagcttctagctatgaatctggatagagttttttttttaaaaattttttttgggaaggagggtgcccatgcaacatggttgctatagtctttcttcaccaatcacatggaactagcaatgagtacatccgacgttgataattgtcattgataccatttcgaatttatgatcatagtcaactgattacttcaaaaacgaatttatgatcagtcaactactataaaaaaaatgatctgctggagttccaatcagtgtcttaggataataatgtaattttaagtagctgtacacttgatctatcatatgagagcatataaggaagaagactcaaaggagcttcactgttggtaatgttgacaacagacaacttggcatccgcagctgctttgtcaaaacagttgaatgtctcggcattccgaataactgtggctatgtaggcgacaggaacttctgtcgcagcgctactgaattcgttgctggtttcttctttgtttgcgacattattagttcctcgattattcccccttctcaatagcatagaaagcactctaataaggtgcggcacacagaccggatcatatattatatctgcaccaaggctgtcaaaagatatcaaattagtgtttatcgaaacgaaaaagaaacatatgaagggactgatgtaatctggatcatgtgtcagcaggggtgtatcctgtcatcagcttgcaaaggctatttgtatttgttcaaccagatcagttcagtttaatgggcatgaactcaacgacactatgctcaaaaggttttactctctattttccaagtcgcaatagctcgataaattgataattgattcaaacaagtgtttcatggctcccacagtcacatgtccagtgtcagatggataatggtaatggaaaaactaagtgtaaactgctacaataatacaaaaaattattgcccaaggaaatactgtactcacactaagtctggcctgcagtcccatagatcgctttcagatgtttcttcccatgaaagatatttgcattgtacctgcatgccagaatatagtacaatcatattttatccagtagtgcatttgatctaacctcaaaaggacaggtatctgattcaaggtggtgtctggtggttaaagtgcaacaagagtacaagactacaagagagactaattaagctacaacatttactggaaagcacacaactattttttctcaaatgaaatcatactgaaaaatatacacaatgtataatcttgaaagtatattctttatataagaagatagcataccttattcttgttctcttccggaagttgagaaccttcctgctcaacgcataagttattcatttccatgttgcctttcatgttttctagtgtagatgcatcaccatcagtaagaataacctgcatcatcgtataaacactgtgtcacctgtctttcctgttgaactaatctctaacctttgaagaagtttatgagcttagttaggagtaaatatagctcatagcataaccatcactagtcgctacagtcagtcaaacttaaagagttgactatatgtctgcattttcatttctcagttaagtcgtcttgacaaactatacaaggcttactttttcacagatatccatttacttgaatggagagtggcattataaactttcataccttggaggcgctgacatagttcagacatacaccaaccaaaccaacaccagaacctagctgtttatcatggaaacatttagaagggtaagacacactcacatataacttttaaaagtttcggtcatgagattttctgttgatataacaggcaaggaaaaagtatgatgctgatgagacagatgatcatactaaagtcatagcaacagtaactgcatatctatttgctcaagaaaaacatcaaggtaaagcgacacatatagtagaagggctttgcagagagctagcgacagagttcaagctcaattttacacattgtataatcactagaaaaaatgcccgtgcgttgcaacgggtaaaaacgttttttatactatacattatactcccttgattttgaaccaaatgctttcttgttttttggaccgaacgttcattctttccttccttttcagctctagtcctagagcagtccgttgcctctatctgctcgacctatctctcttcggctcagcccacaagtggagctgtagacctagcttgaacagtcctttgcctggcctacctctctttggctcagcccacaagtggagctgtaggcccatgtcgaacagtttcgtgcccgtaccatgacggagccgatcctcccaccaaatccggtaatttggtcgagctcgcatagtaccgtgcccgtacgatgacggagtcgatcctctccgtcaaatgcggccgaatctttctcgatctccaaaattgttgagaaattttgatccactcgatctcatttttcgaatttttatcaaaatcgaagcaatccgcaaaactcggaataaaaaatgacgaactaatgggaaattaaggggaaaatgatgagagagtagtggggaatcggtttttgcaatcaattggatgaggaaacgcatggagaggcaaatcgccatggcggcggcgctaggattcaggccgaaaaaaaaaaaccgccaaaaatagcgcgttggatttcgttgaaaccggaaaaatggtgaaagaaaaaaaaagaagagaaaaacaacgcaaagaaaataaaaggaaaatggacgaaaaaaccgcgaaaaatggtgaaaaaatggcaaaaagaaaataaaaccgaaaaaggggaaaaaaaaaagaaacggacgaaaattttgccgtgccgagcttcttttttgtccgcttttttagtacagataagaatcggtcaggttttttttttgccacgcctttttttttccgcgctggacttttttcgttacaatcgaacttttttatcgcttttatttattaacggacgaaggaaacatcttatactttttaagtagtagtagattagagaaatgtacaatggacttctatatatttgtgttgcaaaacgcatgcctaagcaagatataaccagtatttgctgggggatgatcaggttggctcactttggatctgtccctggttacagtaataatattttacagcagaagatagagtagttgagctgaacatattcctataaatatatatatgctagataaagataacattttccatgtatctaaactaaaacacaaaaaataatcggtatttacctcaaagcaacacttcctagagaaaatttttgggtatgaaagaataaactcagataggaataaacctgatggccaaagagagcacctgtaaaagaaaagtatgcactgacatgaattaagaatttatgcaagtagcttaatatatagataatagtagattatatattcaatgccatcataccctgtatcaccttcgagcatattgatagaacatgataatcgagcaaccaagcttactcgtttattgtcatctacataaaaggtgcatgttacaaactattataatttggaagaattcaaaattaaaaactcacttgtaggagaaataaaagatatttctttatagatcttctcagtcctatttaaggatgaattattctgcacatgttataaaataagttacttttagtacagcatttcaacagttattaactactacttggctatattacgatgtttaaaagacgtactgattttgacgacatgaactggccaaattcctcataaagtccatcaatcacaatatctgacgataactcagcttctgctataatccttttaagaatagttgtaacataactacagttttgatctccccctgcctgtaatgaaaactcaacattttagattaggagttacaggaaaatattgtgcaacaaccagaaaattataaaaatgtcaagtaaaccaaattgtgactcttttgtattatgcatctttctacaacgcacacatcatggtcgtttttttttctgttgatagttttgcgtgagataacaaaagacatttacattattgccagtacaactctccaaaataaaattttgaacgtgtggcgtgacagaacctcccccagcttttctgcacaatcaaatacacacaaatttaaataaacaccaccataaacttatcaaaaaaaagaagagaaaacaaaatagcgctttgccttgtcaagttacaatcacattcatacaactgagaagaggaagattattattttttttaagaaaaacctttgtatgaaatttcctgacacattcatataaggtggaaactgacaagttctctgaactttcctgggtctaaagatctctctgctcattggagctcaatcactagccaagtctcatcacactactgacgcaaacacagcctcctccactactaaatccaaaccaaatctctgtatcggcaacatttttctgaaggcaaccaaccgcataggcttgcctgagattggggactcgatcgatcgatgcagagcagcatacgaattcgagcgcgtggggggcgcgcgtacctggcgagggagaggacgcaggcggggggctcccgggcgaggaaggcgagcttcaggtggaggagcagctcctgctcggcggcggcgggggccatggatttcagatgccgcgcgtggagatgacgagatgagaggaaaagctgctgatttgcagtctgggccttggctttattgcagttttgggaggggacagactgaggccgtgtacgggcaggctttctaaaccgccggggctgggttactgtgccccgacggtaagcacggttaccgtgtggtaaccgcggtaaccgtgaaaatccatacaaaatcgtgtaaaatttatcaaaaattaattattttttaaatttatttgaatttaaggaggttatcgcggtatttatattaccgtaccccgtggtaagcccagtaaccatggtaaccgtgcggttaccggcggtaagtcaaatcctatgtacaagtactttttggaggatataagattgttttagtatcataaaattattactacttgtcaaaataaatctacagatattttttttcgaaataaatctgcagatatggttccttcatgacaccatcctagtataaaatcctaatataagtgcgcacctgtaccggatttgaacagttttactactacatcttctgatattatgtgcacttattcttgtggtagtaggtgcacttatattgagacgatgagagtaacatatattcaaggtaaatatatttaaaaatgtagtattatgcttaagatatttgaaatttggccataaatattttttacagcaataaggcacgttcttttggataaataaaaatgaataaatgcacatgtttcatgagtttctaaatagtttattaaagggataatgatgatggtgagtgatgaattagtcaccagtcactaccctaatcaccactacctttttggaataaagaaatgacatagggtcaaaggactcgcatgtcaaccaccactaccatcatctctacttttgtggaaaagaaaaatgatattgtgagcctatagagaccatatattagttataaatatgtagaatttaagagatgatgtatacagaaaataatgataatagcaggttaatgatcattttcatcaattaaaattccattacaatgcacgggcaatatgctagtatatacaaacatatataacaatataagaaacggtaggtcatgttcttttctaatcaagatgtagattttacctcagtttcattaacggtttttcaaactgctacacagtgtatttgtgcgaaatttttttagtataaaagttgctttaaaatatcaaataaatatatttttcaagtttgaaataattaaaactgctaatggttttctcgttttacgtaccctacttgatcttcatctttgtcaaattcaaacgggcataatttctgcctctctagctagttaagtattaccacctccatcctaaaagataagaagttttaaggatagacacataagttaaaaaagttggtgaaattaaatagaagaagattgcaattgattaaaaagagaaggtagatgggaaatcggaatggtaaaagtttatgattaattgcgaagagaacgtagatagaaaaattgttatattttgaaataaattttgaaggctttgttatatcttgggacgaatggagaactcctttcgtttgacatatattaattcagatatgaaaagacgaatattttctttattaagacgatctattcgatatttctcct

SEQ ID NO: 8616 - DNA, 26006 bp, Oryza sativa
catgctcatgcttggtcgccggcgccgtgaacgtctggtaggtcacggtgccggcgccggggaagacctcggcggcgcggcaatggcacgccaggccaagcggctccagggcttcggccaccggcgtgcagagcgacgacgcggcgctggaggtgtgggagatggagaccgagacggtggccgggcggaacgcggcgacggcgcggcggatggcggcgagcgcggcggcggcgtcgtcggtggcgcactcgaagctggcgtagcagtggccgtcctccggcgtgacgtgcacggtggcgtagcgcgcgccgtcgagcgcgttcatggagtagccgcacggcgcgaacgcgtaggcgcacaccagggagcgcgggtcattctcgtccaccacgccgccgatccccgacgccgccgtcatctcgtcgccgatggcgtggctggtccggccgtcgccggggcgctggtagaaccgcgcggccatgccgcggtccagctccgtcatgcacacctccgccgtgagccgcgccgcgccatccgcgtcggatgacgacgccgacgacgacgccgagtagacgtgccacctgtgcgaggcgccgggcgacgacgacgacgacgacggcatcacggcggagcggcggaagcggaggagctcacgggggagggcggcgtcgaggtacgccacctcgtcggcaaagtgggcgtgcgggaacggctgcgcctccgggaacaggtactcgccgcgggagtacctgcacgaccggagccggagccggagcgcggcggcggcgcggagcagcacgggcacggcgcggagcagcggcgtggtgccgcacgtcttgagcaccacccgccccgggtacacgaacatgctcgactcggacagcacgtacgcgtccgccgccgcgttccccgctgccgacaccacggcgcactgcgccgcgtcgagcacctcccgcagcgcctccgccggcagcaaccggagcccatgccgcgccacctcgccgccgctcgccgggagctcgaacaccagctccagccgcttctcgaagccctcaaacccgcaagaagccattgataacgatggtgcgccttcgtgatcgatcgagagcgtgaggagcaacgcggttcaatttatagacgatgcagatcaagctggtgccaagaagtggcgggaggttgatgacgatcgatcgatccgaggaagaagaagaagaagaaatgtaagtggtgatggtggtgatcgatcgagttgagttgagaggcggcatgcgcgcatgcatgaggatgagggggaggcaatggtaatgattgtgagcattatggggaggggagaggaggatcttggtgattaatgaacaacgttaatggtggaagtggtggcagtggggatttcgaatgagatttttctttttaacgattagcactagacaacacgactatgagaaatacccaagggtcatctggctagctctacaaggtggtaggccagatgatctgggttcaaagcctcgccccttttaattatttgatattagtctttttctaatattcatgtcttttactagacagtacgattattcatcgaatagaatatgaaaaaattacaagattaattagagacctagaagacaatagctaggaaagaagaaaaaaaatccaccaccacgcaccgacgtcatctacacacagccaaggagaaggtttagcaccggaccagtcggcgctaagcgtgaccgactgccgctaaaccaacaagggtatgggaatgaccgctaagattgcccaagtccaagctataacagccgagcatcaaacacaactctagccacatctataaaattgaggggaagaggatgagagagaagaattgaaccgctctctacgctaggccctctaacgtggccaatttgtttaaactagggcgccaccacaagaggatgagacatctaaagtgagcttgcaccagttatctatgataagatttgtcaagggggctttctagatgacgtctccagggacaggagcgacaatgacactgccgccaccatccgtcgaggtcttaaggagaactaagacaagattttcactcgataaccctacaagaggagaggggatggctcgacaacaccccgaagaagtaagatggcgcctgaagcgccagccaagaccgggctgggtttacacccgccgtcccgccacctgccgatcgaaagctgtgctccattgctacaaccaccatccatcctccgtcgcgcgtgggcaccgttgcaccgccggcccccgccggccaacctccatgcggcctcccactctttgcaccggacagttgtcaggccatcaccgtcgccgaccgccggcctttgccgctccgtcacccacgcctgccacaagccgtcggcctacgtcgcccgtgcccgtcgcaagccgctggcctctgtcgctgtctcctccggtctctagattcggcagcggctgtgccggatctaggcgcgggggagcgggggtggatgtggaggtgggggaggaaggggggcagatctggcagcggtggtgccggggacactatctcgagccgcgccgccgccatcctggcatgccgcgcggtttcaggcagcggcgaggtgggggagaaagatggagggtggcggcggtgtcgggaaactagggtttcgccccccgtgttgtccgcgcatgcacgatgcccgggggtggggtggactgccttcaattgaaaaactctagtgggaatgagatcaaattcaacttatacaagttaaaaaatttagctgtgaacatacatacacattaactagttatggtttaatttcttgtttttgctacagtttgtatgtataagttgaattttaatatgcatttttgtaaagtgatatatcacgcattagtctatcttattattattattttatatgaagacatttgaaacaaagtattgaattctatgttatcttttgcaattcctttggaatggaaaatcctatagacattttggaggaaatttagtaaggaatccaacctattggaaattttcctctgagtctatctctcttatccgattcctgcatttttcctgcggtccaatcaaagctattccgtgtttttcctatattttacaatcctctattttacacttacatttatattagaatcgtttgtttttcatgttcctgtattttttgcattcctatgatttaaagggatcctaagtaattttagtcctcgtatatagtagcgacaaaataaaaacactaaatttttatgtctttcctagttagactggataaacttgtatagtcggtcaaggattatccataggttgaccggtccgtgcggtgcctatatccttgataaagcagctttatatataggatcaaattgtgatgctcgaagacgacaaaatgaagttgacagtgaacctcgcaataatattaagaaatgacctgcgcatattatgcagacatgcagtccccttcctctctgcgtgatcatgaatcggcgcacggtttaagttaataacaacgaagcaaacaaaacaagattaatttgcaaccccattggattatgatacaattcaatgtactccttttggcctgcatgcaatgagtgggccgacacttggagtagtgtgcatatgctgccaacaccaacaattgaaatcttcctcgatcgttgcgggtcctgtttgacttatttttatatccaagattttgtgtactcaaatacgttctttgttttatactccattcgtttcacaatgtaattctttctagcattgcccacattcttttagatatagattcattaacatctatatgtatgtgggcaatgctagaaagtcttacattgtgaaacggataaaatagtataatttggtttcactttttctaaataagtttcattgaaaaatgtagcaatatttataacaccaaattagttttattgaaattaatattgaatacattttggtatgtttgttttatgtcaaaagtattaatatgttttttttataaatttgatcaaacttgaaaaaaataaacttaagaaaaagtcaaagcaatttataatatgaaatagagatacatagtgcatgaatttgaatttgtgattaagttgataatgtctggataaattatttcagacaaaatataaaattttaaaacactataatttaacatataaaattcaaaatcagtgtggatatagctgagccaaacatgaccttaattaacaacttccaatggatcaactcgttagctaagctagtgctatgcacagcacttttgggttaattcgtgatcgccatggccaacctgcaggctaaactagctaatgatcgagcgagagcatgcatgcacggaagtatgatggaacccgccgacttgcaaataattaaacacactcatgtttgactagagaattgtcgtgctctgttttgtttgaatccagcttaattacgtgcaggaacttgaattttttcccccgaaatttaaggcggatatagccgtctaaatatcgtatattactagcgtgtgtgaattatgtaatttgcatttctgttccggtgtatgaaaagggaatggctaaatttaagataatttcagtcaccttcaatctagtattggtattgggaagggaggagaggtgaaactccccactaatagtaatgacgccaaaactccgacgacatttagatttgggaaggtgactccctggcaggggcggatctatagtaccatggccagtgtcaggcgacaccgacaactttcggcagaacctatagtaaaactgtttatccatatgttataacaccgatagatacgtcatgacaccaacaaattgattttttgaatctgccactgctccctggcagtggtagtatagctagcaataagaaggttctcttttccgaagatggtaataacgtcaaaactccggcagaaaaatctgagattaggttttatggtaagagtccaaatgggagcggaggcaagggaattgagccggtttcctcaagcttaaagggatggccttatgcaatgggcccagggtagaggaggatacggagatatcaccacctgggtgtgtttggacctctaggttcccaacccaaatctctcgtttttcgcgcccacgtttttcaaactgctaaacggtacgtttttttgcaaaaagtttctatacgaaagttgctaaaaaaatcaaattaatccatttttgaaaaaagaaattagctaatacttaattaatcacgtgctaatagatcgctccgttttccgtgcggaggcactatgttcccatcatccactcgcgaacaccagaggtgacggcaacatatcgactacatgcgtgagcacggagaagaggtgactctgaaaaacttagacagacagtcccttaataaaattcatggtccgttccccattaatctctatagctagctgtaaattatctgcaggaagcaatattgtgtcggtggcatgtggcagcgtgactgtcatatgtaaatcatcctcgtacatcgcacaggcgcaacagacgttggtagagggattctaatcattcgagtaggtgctaaaaagagtatccaaaaaggaaaaaaggcaagcaagtagagacaacatatagctagcccggtacaacatgatcatgcaatgtctggtaccctaagactgtactgttgtcattaaccaacttaatttgcatctctacaatgtagatacaatgctcatcgatcgatcggaagggtccaaagattttgtcagcagatctggagcagcagcttgagtggaagtgtctatctctgatttgctgtaattagagaaacaggtgcaaagaccggtcgacatgccttgcagcgcagatcgatgattgtatgcaatcctcatgtcgggaacacatacgaacaggccggcaggccctagctagcaaaatcatgggtttttacactagatcatgtgtgcttcaccctgtactgttctaaaataattcagctttttatatcaatctaaacacaatctatattgaaattcgatcatcgtatcaaatgaaaagtaatatttagtttagattgtaaagacatattggtagccatagctctcccatgatatattgtggagattatggatatcccatatctacatggcgatactatttgggctggatataggataccgaatatgtatagaatatcttatttgtatctcgggtttgtttcttaacttgtacaacaaggaaacaccttgagacttagtcggtcacggctatatttaatctatatctgtgtattccgttagggatattgattatcttttgtaacccggactccttcccatatataaggggggtccgggcgcctctaggggcagatgttgattttctctaaatcatacaatcaataatacactcggcggattcatccccggacaggagtagggtattacttcttttataagaaggcctgaacctgtataaatcttttgtctccaaacccatacacttttccagcttgatagccacccccttttattattgccgaaatctagtttcgacagttggcgcgccaggtaggggtagcgtcaagcttttcgccgatcagtgcaatgggttccgtctccggcatcgacgacctcgtcttcccacccgggcagacgtttcggttcggcagcctcgacttcatcaccaacaacttcggcaagatctctctcctagactcggagtcaaaccagtcgggagagaaccggatttcggtcccgttcgaattcccgaacgcggctgaaagctacttcaagaccatctcaaccgagtcggcttcaaaccactcggccgagatcgcatcttctccaacgacaccagatcaagatgatggggcttacccaccagtcctgatgaagctccccgacgatttagcggccgtctccaccacgacagcgtcttcatcccgtaggcctaggcggaagtcggccttaacaccgatttcgcctagcttcagggaagtcggcgtcatcctccaaccactcggcacggtttcgacggatcagctagatgactacaacagctctcccaccgtcgactcacgtcctactgacatcgtggagtacgacgaatttagttctcgctacaacgacttcaacgacttcgacgacttcgacggaagcctagatgacaactatacccctctctactttggcgttttcatggccaataatgagacggaggagcaacgccaagcccgggagaccgaagaacgtcgccgactggaggaggagcatcaggcacaagaacaagaacggctacggcgtgagcagcaggaccgtgagcggaccgcgaaggaggctgaggatcgacgtcagcgagctttggaagcagggcgccgagcgcgtgatctcatcggccaacaagatgtcgaagggacaccggttttccgcacccctcaacagaatgcggtcgccgcgatcacccttctcgacaccctactcaaccaaaacgagctcaatcgatccgaccacgtcgtcaacatcttgaaccagacgaagaccatgattgcggcctcggtcccagttaactccgaaagcgtccacacgccgactggcagccgagttccccacttccgatctcacgactaccgtcatccaagcctcagcatcaccggcgcgggatccaaccgcaggagcaggggtcacgacgagcggtctgttcactcacctcccgaccttcatagggagcgccgagtggaacggcctcgctcaccacctcgtcgccgccccatcgatcttcgcgacacaatcatacagcgccgagcagctcgaggctaccatcactcgccggatcgccgcgatgacgaccttgacggagttgcagccttcaccgacgacctgcgtcgagtggattggccagccggcttcaaaccgactggaatagagaagtatgacggcaccactaaccccgaatcgtggcttaccgtctacggtctcgcaatccgcgcagcaggaggagacaacaaggccatggcgaactatttaccagtggctttagcggattccgcccgatcttggctccatggattgccccgtggtacaattggatcttgggccgaactacgcgaccacttcatcgccaacttccaaggcaccttcgagcgtcccggcacacaatatgatctttacaacgtcattcagaagtccggagaatcccttcgagattacatccggcgattttctgaacaacgtaacaagatctccgacatcaccgacgacgtcatcatcgccgcattcaccaaagggattcgccacgaagaattggtcggcaagttcgggcgcaagcctcccaggacagtcaagctcatgtttgaaaaagccaacgagtacgccaaagctgaagacgctgtcaccgcatcaaagcagtcgggtccgagttggaagcaaaacaagggtacgccggctacgggaggaggtggaagtaacaatcataaggaccgcaagcgtaagcctgcggaacttgttgcaaccgccagtcactcttctcgacagcgttcgcgcgtcaacacgttcgacaagatcatgaactcccaatgcccgcaccatcctaactccaaccacgtggccaaagattgtttcatctacaagcaattcgcggatcaatacaccaagactgcacggaagaattctgacgaagaacaaagcacgtcaaggaagaaggacgacggtgacaccccggcaggttttcaagatcaccgcaaggagctcaaccatatctttggcggccccctggcttatgagtctaaacggaagcagaagttgactgaacgggagatcaatgctgttcagcccgacacgccccagtatcttcgatggtcagagattgcaatcaagtttgaccgctcggatcatcctgaccgagtggtccacccggggcggtaccccctggtactagacccagtggtccgtaatgtcaagcttcgcagaaccctcattgatggtggcagtgcactcaatatcctcttcgccaagaccttggatgatatgcagattcctcgctccgagctaaaaccaagcaatgcgccttttcacggagtaattccaggattatccgcaactccactcggccagatcaccctcccagtcacttttggcactcgggaaaatttccgcacagagaacatcagctttgaagtcgccaatttcgagacagcataccatgccatactcggacgcccggcgttagccaagttcatggccgtcccgcactacacttacatgatgatgaagatgtctggtccccgtggagtcctatccctacggagcgacatcaagcaagccgtcacatgcgacaaggagagttgcgacatggcccaaactcgcgagatggcgtctgcccgagaggatatccgactggctgcagccacggcgagcgaaggagaaatacctgccaccaagacttcaaaaagtggagaaagcgaagccaagactaaaaagattcccctagatccctctgatcctactaaaaccgctgtaataggcgccgagttagattgtaaataggaaagcgcgctcatcacctttcttcagaataataaagatatctttgcgtggaaaccttcggatgtgcccggtatccctagagaggtgattgagcactccttacatgtcaaagaagatgccaagcctatcaaacaacgactccgccgattcgcacaagacaggaaggacgcgatcaaggaggaattaaccaagctgttagcagcaggcttcatcaaagaagtccttcatcccgactggctggcaaacccggttctagttcggaagaaaacagggcaatggcgcatgtgtgtcgattataccgacctcaacaagtcttgtcccaaagatccctttgggttgcctcgcattgaccaggtagtcgactcgaccgccggctgtgagcttctcagttttttggattgctactcggggtatcatcagatccgactgaaggaatccgactgcttgaagacttcattcatcacgccctttggggcatactgctacgtcaccatgccgttcggattaaaaaacgcaggagcaacttatcaacgcatgatccagagatgcttctcaacgcagatcggtcgcaacgttgaagcctatgtggatgatgtagtcgtcaagaccaagcaaaaggatgatttgatctcggatctagaagaaacctttgcgagcatccgtgctttcaggatgaaattgaaccctgaaaagtgcaccttcggagtaccgtcagggaagctgcttggctttatggtgtctcataggggcatccaagccaacccggagaaagttactgctatcctcaacatgaaaccgccaagtacccagaaagatgttcagaagctgactggatgcatggcggcgctcagccgatttgtttcaagacttggcgagcgggggatgcccttctttaagctactaaagaaaacagacgacttccagtggggacccgaagcacagaaggccttcgaagatttcaaaaaactcctcaccgagccaccagtcttagcctcaccacacccgcaggagccgttgttgctgtatgtatcagccacctcccaggttgtgagcactgtcttggtcgttgagcgcgaggaagaaggccatgtccagaaagtccagcgaccgatttattttgtcagcgaggtcctagccgactccaaaacgaggtaccctcaggttcagaagctgttatatggtattctaattactaccaggaagctatctcactactttcaaggtcactcggtaacggtggttacatcatttccactcggtgatatactgcacaaccgcaaagcaaacggacgtattgctaagtgggctttggagttgatgtctttggacatatcattcaagccccgaatttcaatcaagtcccaagcgttagctgattttgtcgccgaatggaccgagtgccaggaggatacccccgcggagaacatggagcactggaccatgcattttgacggatccaaacgactttcgggcactggagccggagtggttttgatttccccaactggagaaagattgagctatgtgctttggatacatttttcggcgtcccacaacgtcgccgagtatgaagccctccttcatgggctacggattgcaatttccctagggataaagcgtttaatagttcgaggcgattcacagctggttgttaaccaagttatgaaagagtggtcttgccttgacgacaacatgatggcatatcgacaagaggtacgcaaattggaagacaaatttgatggactcgagctcagtcacgttcttcgacacaacaatgaagccgccgacagacttgccaattttggatccaagcgtgaggcggcgccctcagatgttttcgtcgaacacctttatacaccgaccgtacctcataaagatactactcaagatgcggacactcatgacgtagctatggttgaagccgactggcgagagcccctcatacgatttttaacttctcaagaactcccccaagacaaagatgaagccgagcggatttcaaggcggagcaaactttatgttttgcatgaagccgagttatacaagaaaagcccttcaggaattctgcaacgctgcgtatctttagaggaagggagacaattgctaaaagacatacattctgggatatgcggaaaccatgctgctgcacgcaccattgtcggcaaagcttaccggcagggttttttctggcctactgcagtgtccgacgccgacaaaattgtgcgcacgtgcgaaggttgccaatttttcgccagacaaattcatctaccagctcaagagttgcaaacaatcccgctgtcttggccgtttgcggtttgggggctcgacatggttggcccgtttaaaaaggcagtcggcggttacacgcatctctttgtggccattgataaattctccaagtggatcgaagctaaaccggttgtcacaatcacagcggacaatgctcgagacttcttcatcagcattgtgcatagatttggagtgcccaatcggatcatcaccgataatggcacacaattcactggcggagtttttaaagacttttgtgaagactttggaattaagatttgctacgcttcagtggcacaccccatgagcaatggacaggtggagcgagccaatggcatgatacttcaagggattaaagcgcgtgtttttgaccggctaaaaccctatgccggcaaatgggtgcaacagctgccatcagtactttggtctttgcgaactacacccagtcgggccacaggccagtcaccttttttccttgtctatggggcagaagcaatgttgccgagtgaagttgaattcgagtctttgcgctttcgaaatttccgtgaagaacgctacgaagaggaccgggtggatgacttgcaccgattagaagaagcccgcgaagcagctttgattcagtcggctcgatatttacaagggttgcggcgctatcataatcgcaacgttcgatctcgtgcctttttagtcggtgacctggttttgaggaaaattcaaactacacgagatcggcacaagttatctcctctatgggaagggccatttattatctctgaagtcacccggccaggttcttatcgactcaagcgcgaagacggtactcttgtcgacaactcttggaacattgaacatcttcggcgtttctacgcttaagtttatcattgtacttccctatcttgactgtcaacatcaagttttcttcttgccgttgtcagtcgggggctattatcataataatggagtgtgattttttatcaatttaatttgcttacttggtctatcattgccttgtttgattttttctacttagtctgcgaggactgaaagtttttaatagcttctttgggttttaggctcaacaaagcttgataaaagcttttaagaaatcaaagacttggctagaactatcaagcacagcataaatacaccagtatagtacaaattatgcctccatttgttacaatcatgctcagtcagaatcagtcctttcatcatcagagttattgttactcggctgaaggtcattgttgcggaattgatctaccacatcgcttgcaatcttgtcagccgcattttgagcattgttgataagatcaagagcagcttcttcgcttgtcccatctgcaaatccatcaatggtgtcgatttcaattcttgggtacaaggatttggtcatcgctaatgccatgctagctcccatgcttccagctttcttgatgttcttgaagtatacatccggtgcaactcttaacttgtcaaagatttcggttgcgtcaagtgcactcggaccactgttattaaggaacatagcttggacgagtggtgtagcgacattggcgacttcgtctcttgctccttcaagcttcttgatcttaccaaccaggacatcaaactgagcttgcgatttgattttacggtctacaaaatacatttataataagaatctgctgcattaaagagaggacagttcaaattgtcagttggcagtaccttcaacctccttcaaggctgagtccctttccgcagccagttctaccttgtctcttttcaaggcttcaatctgtttctccatctgggccattctggtggcttgcgctgtttgaaatccaaatgtttgaggatccagctatgacagtataaatgggacagatctagagattaccttttgatgaaccactcagctcgaagttggagtcctggagctgtgcaattcgttcccttaattccttctccgttttcttggcatactccttggcctcgtgtagctgttccctaacggcttcaagagttcccaaatgtggaaccagcttttctaaggttgcagtcttggcctcattacgaagatggattctctgcacggtggttcatggattagttttgctaacaagaaaacaaagttattaaaggcagtcacccggaagatttacattcacaatgcgagtggcttctccaagtgctttcttcagctggcacacttcctcatcttctttttggcgatttataacaatgccggaaacttgagagttctcgtcccaccatttgagtaagatagggggacgggagtcatcagccgcctttatgcgaggaattgtttcttcgtcatcgcctagtgttcctgatgtatttccaagacattagacgagtaagctggagttattcagaacgatatcacttgagaagatgagttacctgaggatgtgcctggctgagcgcgagatgatccttgttctttatctggagagccaaccaccgagtcatttccagcctttggtccttgagaagatgtcgcttgcgcttcaacttcagggatttcttgatcaggacctacatccgactggtttccagttgggggctctcgggttgttgcagtttcagttgttgccgactggtttccagtcgacggctggtcactcggattggccttgtcatccgaagcatgggcgccagtcggctggctttcggcagtcggctggctttcagcagtcggctcagcgtctttggataaatttggttctgtcactgccggatcaggatcttttccagttggatctatgtcggacggtttcctgcgaagtatcctttcgatattcagcgtaatttctatgagagaagcatatcaaagggagttggtgccgagaggtttatacctggacgacgttctaatctttggcgtttgacggccagccagttttttcctgggcatggtatgcttcgggagtttgttgggcgtgcccttgtccccagatttgttgctgtcgtcgccctcgtcgtcatcaagcaccagctttctcttgcgaggacctgtctgcccagccggtttggaggtttgaggttgtgggtctgacctgattgtcggccctccacttccctgaatggtgtgctggcgaggagatcgtcgctgagcaattgggggatcggatttcatcaatacatattcctgaataagatgcctccatggttagttaattcaacatgaagacaagatactattttggtcataagttgaagatttcagatacatacctgcggaggcggattgaatgcattatatggcacaactggcagctggtgtgagtagctaacgacaatggcatttgagaagattttatacattctctccttcatgattttgaaatccagagagtcaggttcttcacggttaggatcatgcttgccgtcgaactcaaaagctgtacgggatctttctttaattggcgccagtcggcatttgatgaaatgccgagtaatctgctctccttgcaaaccttgttctttgagttttaacatgcggtccatcaactccaaggcttggactgcttcatctccgattggaagggagttccaggtatcttggtacaccggaggaagacaagagtacccgggaagagcaggctcaggattctgaacgtagaaccagtttgcatgccaccctttgtttgaagtcttgaagggcatagagaaatatttttggctcagagttccccttagctggaatcctgcccccccgactacgcacggtttgctcttgttcggttggggtttgaggaagaagatccggcgaaacagggcaaagtgaggcttgattcccaaaaaggcttcacaaacatggacgaaattggcgatatgcactatggaatttgggtttaggtgatgcaagctgattccatagaagttcaagatcccgcggaaaaatttcgaggtcggaagagcgaagccgccatagaagaaatgcgagaagactacgatctcatgtgtatcaggggtcggaaaagcctcaccgcacgctggccgccacccgatgatctccttggctgggagaacgccgtgcgccaccatctccttcaagttctcttccgttacgtcggatggcgcccattggccttcaaagctttctttctcctccgccatcgattttacccgaatgcgctgatttgatttgatggatggcttgggagaggtgaggaattgaggcggtggatcacgggaaggatttttaatcacttttcgaaggtggatttggacggattgatgaaccctagttcgccggcgcagctatttactgtagcaaggagtggggaaaatggcgagcgttccggcggggaagacgaagcgtcgcttggatctcggattttttgttaagggtatcggaggtgcaagtgggcctaggcctgaacagtacctcagcccaatacttttaacagcgtggcccattgtgttccttagggacttaggcatattttgctttggcaatatttatgcacacaatagtgttgcccaatgctgacaaaatcctttttatgcggtcatataattctttggagttattgcaatgcaaattaaaaggtgccctgcagaaaagcgttatgctgtttttgtaagcttttttaggctacaaaagctgtttgggttaacttggaatgacttgtttttatcatagtcatttccttggtatgttatatacctatttttattgtggtaacttgacatagcctaggctattagtctttttgttaccataatttttataatatttggtgggtaatctttatagttttatattcggatgcctgtccagtgtgttcattcgtgaaccttttcgagtgtaaaccactcggattctttttattatggctaaaaagcagtcggctagaatgcctctttaggcgccgcgtatgcttttgccatctaatgcatgattgtgttattatattgttctcaactatatgtttagtttgttaactaatcacatagttgggggctacacctaattaggtgcatctattcgatgcaccatattctttatcttttcgccctttacagtcttcgtcttcgctactcggtgggccttggcatgaataatctgaagcactcggattgctatctttgagaaggctacgatggttgactgcaaaggtctcgggggctactgtggagattatggatatcccatatctacatggcgatactatttgggctggatataggataccgaatatgtatagaatatcttatttgtatctcgggtttgtttcttaacttgtacaacaaggaaacaccttgagacttagtcggtcacggctatatttaatctatatctgtgtattccgttagggatattgattatcttttgtaacccggactccttcccatatataaggggggtccgggcgcctctaggggcagatgttgattttctctaaatcatacaatcaataatacactcggcggattcatccccggacaggagtagggtattacttcttttataagaaggcctgaacctgtataaatcttttgtctccaaacccatacacttttccagcttgatagccacccccttttattattgccgaaatctagtttcgacatatatggagtataacaaattctcacctattacctcttatcttaaccaatcataactatctcattttatttcttcatctacattttcatccgggacatctacatttttatcacaattaatcacaaccatttcttgtttaattcttgagacagaggggaactctaccatttttaagcagtgctgctataattatgtcgacacatttttttagtaaccacagtcgattttctgatcaattgatctccgttgagattggtgctacgattgaaataccaatgcactgacgtctttgcgtattgcagcgtgaagccaaacaattaaatttaattcctcatctcatcggcatgtattttcatgaaaaaaaacatattgtagggacttacatacatgctaactatttttttttcgtgaaaaaatatggtggtataaatatcggtaatccctttttaagttttttttggacgaacctccacctccccgctaatagtccgcacgtgggtccaccacaactccacaagcctgttatggcccacccaaaacaggcagcacgtccattaagccaccgtttcggcccaacaatacatgggccgcacatcgcttcaattccgttccgggccaaaccacaaacgggccacacatctgtttatttttttcccactaatttattaagatcaacttcgattcccaactacaagagatcaaaccggtcgaaatgatgaattagagctttctcgccggcgcccagccgtgccgccgccgtcgtcggcgccgtcgagctcccgcgcaggaaccccaggaggagcttgctgctggcctccacgtcggaattatagcaccttgatcgtttgacactgcatcccccatcttcttctttgtcgatctgtcgctcgatcttggcaagaaatccaagactacaactctacaagcaaattgagacttgctgtccatttacaggacaagagagctactcagtatatatctagccacagccatgcctccctaaccttccatgtccatgcagcagtccattagctaatgtttaattatattttaggttgatttattttgagacgttgagtggcagataaggcaggcaggcaggcatgcgtgtgcaaccgtttgcagcggcctttgtttcctattgagctttgcagaaaatgaaccggtttgtctattgctaacagatatatgcatggaaatttttgtggagcgattagatggagaagatgacgctaattaaaggggaaaattaacccgtgcgttcttgcggttgtgcgtcatgtgactgtctcgatctcggcgtcacatatcaaccaacaaaggcagtttgttcttgattctcatttctgaagacatgcgtcactgttccagactatctcgggctcatcttgattgtaacctcgatataatttggatgaaatggtttacttcaatttgcccccaacagcaagtatataagtttcaagaaagaagtctcgtctgaattctgaaaacggggacagtaacatcccatggaaattaaaagctattcatgaaatatgcatgcgagtttctaccttactaaaccaaaaggtaacaactttttacgattcttcgaaagttcaggttaattatgagttggaagttagaacaagaaaatagtcctagtttaaattctgaattacgatccttcaatagcttaatcctttcatcttgtcttatcctagcttaagctctgaattggggaagaacctgttatccgaacaaggtcttcaaaaaatgggaccaatctagaaaggattaaattgattttgaattaaggagggggtgaggccgtgaggctagctcgaacctggagtggtctagctcgcagcttgcgttactagccaggaagaccctgggcctttctctatccaaaccagggttttaaatttcgaaatcaacatttctgccgcaggtgagcgatagaaccgaaattttcaaaatttcggaaaaatttcgtacgaagttttttgaattttcgaaagattttgaataaatttgacaaaattcacaaaaaaaaatgcaaaaaaccgaaattttcgggcaagatgttagcatttcggtggggcgaaatttcgaaccgaaatttcaatccctgatccgaacaaggtcttgaaaacccctcaaaactcaacgaagcagtagatgattcatgcatatgagactaataaaaaaaatactcaaatataatgaaattatttagtccataaataatcatcatcacgtcgtcctaagtaggacaaataattaatacatgcaccgccatctataaagttcatcatcagttctacctggatcatgataacatggctatatatcacataattaagtagatattaaataattaagctccttatttgcagtggcggcatatacggcgagtggatcgatcgatcagaagagtttcccatcacggccggccgccgtcgccggcggcgagccggccggctgccggaaggacttggtctggttgaacaaccttgccctggtcatcttgatgaacctgtcagccttcttgttgatgtcctctttgatgctgtcgatcttcctgaaggtcggcttgggtgccaggttgtggtacaccttctgcaccgccacctcgccggcaccgccgccgccgatgccgccggcggcggcggcggtggccggagcagcagtactgcctcctcctcctgctcctcccttgcggatgatcttctggctctgccaccagctcatcttaatttgctctctaagctaagctactagctgttcttgcacttgcactaaactaatgttatttagctagctagattgctttgggatttttttgcttcttgttttttcttggcttgctttggttggattggatttgcacctagcaaatgggcgtcctttttatagccaatataatattctatattccttttgcattaaggctgcatatatgtgaaatgtcaggctttctcattgagttatttacttttttaatttcctccgaatatattggcctaacctaaccagggtcagggtgcgtgcttgtcaatcataattaagcatcaagacggtcatcaagctctgaagttatcaattttgtgtcacaaatgttttcaataaaattgtttaagacatacgaataactgatggcttttcaaaagaagtaaaaaaaatgactaacaatataaccttttattttccaggttttgatgtaggggtggataacgagccagcttagctcgtttgatctcattatcttaattaactagcatggtggcccacgcagattgcgcggctagcatcattatgttttctcccatataatagcatatatgttttctcattatattattcaaatatattaaaatgacaacataattttaaattttgcaataactttacaaaactactaatacgtaatattcatattatattttatatacgtgttagttattaattatttttaatatcaaattttagttatttgtaaattatatatatttctatatggactctagactcgtgttttaatatttcttttttttaattccgaattttctgtaaattgtatttctatatagactctatgctcttcttccaatattatttatttttatttctgaatttttattatttctaattgtatttctatctggactctaaactcatctttcaatattctttaatttttaatttcgaatttcagttacttctaaattgtattcctatagtgactttaaactcttcttcccatgtttttcttaatttcaaattttagttatttataaattgtatttttatactgactctaaactctacttttaattttattaaattttattatgtttattccaaattttagttagttttaaattcctatatggactctatactcaacttctaatattccttatttttttatttcgaatttctatttttttttcttcattgaatttctatatggactctatactctacttctaatattccttatttttaattccaaatttcagtatatggactctatactctacttctaatattccttattttgaattccgaatttcagttatttcataattgtatttctatatggactctatactctacttctaatattccttatttttaattccgaatttcagttatttcctaattgtatttctatatggactatatactctacttctaatattctttatttttaattccgaatttcagttatttatttcctaattgtatttctatatatggactctaatctcatcttctaatattccttattttttaattccgaatttcaactatttctaaattgtatttctatatggactctagtctcatcttctaagattccatattttttaattccgaatttcagctatttctaaattgtatttctatatggactctgtcttttctttttccctaattaatgtgagaatttatagaccatgagagcaaacatggaggcttctttttctattcctttaataatataatagatgagcctgcttggctcgacttgctaatgttaacaagctaaaaggttagcttgctcattaaaattataagtttgagccaattcgagccaagcattttgtcacgagctaatccaagccacgagttttgagttttttgttcacccttattttttatgtgtgcaagtcattttaaccgagagcttgaagaaacatgtaacactagctcctaatttggagttgaagttgtcagggttaacaatatctccttttcaaggtcaattaattgtcagttactccctccaattcatgttttcatgttgcaagttatgttagttttttttattatgaaaattggtttatatatatcttcggtttctataccaatatatattcaaatttgtttcgtgaaagaaaaaacagtatcaactgacgggacaagtcctcagctcctcttgaaaaatgatcgtctgaatgagatgttaaagacaaataatatagattctaacgaataattccgtaggtattatatcattatattcaaagcaagaaaaacccttaaataccaattccaaaaatatagcaccgctgtgcgtaccatccgctcctcccgtggtattatcaaagacgataactttttgtagaataagccagtttttaacataaaaagtttatcatttcgacaacatcaaatcaactaatgtagtacactggccctaaataaaaccaattttatttacatgggcattctcataagctaatttctaaaaatattttagttttgttctatatatgctatttttcaactttatgcattgaccgagtttatgaaaaatgcacgacaacaactaccatactaaattagttttgtcaaatccatcataaaatttatcttaatactaaatttatttataatctcagttaaacttatagttgttagacttaggaaaagaataaaatgtgcatgaaacgaagggattattttcgatgggcatattctaaggaagctggcgctagctgcgacaatcatcggcgccgttagtcgcagcacacggcattccatcgccatctcatcacctcatcgatgattccattggcatgcattcatacaggggcgtgatgctagtttcgtacttaagatcctgcaactaattaaccttaagctttagttccaccgttaatgccaatttccagttgggggttaaagctaggaaacgtgaaaaaaaatgagcacatttttggttcagcccagcattactcacttatctgactattgctaagcagttttggaatatcaaacgcccagatgataatcttaaagtggccaatttatcttcttttgtaatcagtttcgctacagcacctgctgctctagctaattgttcatcctttccacgtgtggtttctatattatatatggccgtgcctctcttcaatcatcatgattcatgaatatttggtgattgggtggataagatttggtcaaacttttggtacaaatattcggtcaaacttttggtaaaaaaattcaatcgaacttaattgcggtgattaattttgtggggaagttagttataaacttaaaaaattatgatagtatgatagtatgatagtattattcaagacagatttttcttttagaaaaaaacaacgtggtatgatctttgataaactaagcattcgagaaattcttgatatatttagatttttaaattgtactacttttctaagtcgtatataaggcggatctagggaagcccaaggcccagctaattaagtttctttaggtcaatttctatacatatatatattgtatattggcatgttatatatatttgtggtatttaaaaagtttatttaaattggaccaccatacttacttcctccttttcacgatgtaaatcattctagcatttcctgtgaaacagagggagtacaaatttggatacatacgccaaccgtcatataaagaaaaatggagggaataaatatttattatcagagggagtaagtttttttcttaacttaattgatcacctctgagtctcctactttaaagtttcctacgttatatattgtatatgcccaatgtttatttcatcgtgcatgcacaccgtaagcaaaagtagcaagcttaattttttttagataatggaataaaacatcccggcctttgctcatcagagctatagccaattattacaaaagtaacacccaaacactgagtgtagttcaaatgaattaaacacacccaacaaaataaaaaattaaactaagataaggagagcacatttattcaagtctatttgtgaatctccatccataatttgcaaagagttgcatgaccgttgtctcaagcctacgacatgtaaccttcgtaagctctcgatcatcttcacacatttgcagctgtgcccaaaatcggagccaatatatgagatagatggtgatttgtcaaaaaccatatcattcctagtcaaccacagagcccaacatatgatagaagctcctacaagtatgagtttactcttcttcttgtctaccccaaaacccaaccatcaaacatattagatatggtagtaggaaggtatagaccaagagagaactgtactgctctccaaacaaattttgcataatgacactctataaaaagatgttaaatagtctcatttttcataaaaaacatcttaaactgccattccaattttgtcttgccaaattatccttggttagcacaaccccttgaaacaagtaccacataaaaatcttaatctcaagtggcatcttaagcttccaaataatcttgtttctctcaatataactattattaattaaaactagatacatcgacctaacagaaaatattccattctgatgataattccatctaaagctatcagagaattgattcaattgaatatgtacaatagaagcacacaattcatgccaatatgcaagattctgatcaactaaatgatctcctaaaggaaacattaattgagtcgaacagatctcataacatcagcaatagtagaacttttccttcggacaatagagtataaagatggacaatagtagcaagcttaattatggattaataattaacctgttctactaccgaattagttcggcatgtggaatccattacagatcactaattaggcacgtttgtaggaatccaaatggatcatgacggcgacatgtgtatagcgcaagagactgtatatcgccatgcgtgtggccatccaagctctgagctatactgttaactatcactatacatagaatctgccaaatatgacgtcttatcggtaacgattagataagatttgcactggacggacaaaaactgatactgtgatgaccccgtatcaatgccggttcaagtgaccaaccgacactgatgtattcattatgattttttacatgaactggcatggaactaatatcaatgctggttttataattaaccgacaccaaaaacagagttaagccggctgtggtttcagtcgatctcgccctgctctccttcctcactctcttacttttccctcttctcttccacctcttcctctttgtagcgagcggcggccatctttccttgtctaatgatggctatctccctctctcctgtgatggcgcccctcccctcttcatggcgatcagtgacaccgtccttaacatagggatggcaacggggcggggcggggccggattgagttggaacgaccctgcatccactcctttgcgcgtctactcggccctagcctcggactggtggccgggtcaaaaatgagccccgtccccatccctccagggcccgtcactcgaccgggggcccattgcacccgtaggcaaggatgctcgacgcagcgacggtaagaagcagtatgtggaggcgccaccgtgtgccagcaggaggaggcggcgtagccaggctaaggctgatcaacgacagacggaggtggtgcgacgacgggcggaggcagagctgagacggcgacgagcggaggtggtgtggtgacaggcggagctggaggcggcgggtcaaggcagcgtgacgacaggccgaggaggagcggaaacatcagcgacaca

SEQ ID NO: 8617 - DNA, 13432 bp, Oryza sativa
gggggtcgtcggcggggatcgaagcggagtcgatcagaggagtggagaagagagagagagagtatggctagagagagagaggaggaggaggaagaagaagaagggggaaggaggaggaaggagatgaggagaaggaggcgcttgtctctcctcttctctaggcctgatggatggagagagagagagcacacacagcacagcagttacggttgaattttttttttaccatttcttttctctcgttttctgctgggtgctgaccccaccaatggttaggtgccacgtgtaccgtgttcttcgggtgagggctgacgtggccggtggcggtcgatgtggaataaaccagggaagggagatatgtgttgttcttggttatggaatgcgagatgtttggagatggttaggttggttttgctttgtttggtgaatggattgttgtttttatttagcatgggttttactagtgatagattagcattcagtgattacggtgtaaattggctaaaaaatggaaattgcccttcgatatggtgtttagagatggatgacgatcgagtaaatattgaatgaaatagcgggaaaatagaattgcacgaggcaaattctgtgaacaattgaattacctacataattcctaatgaacgggattgctatatattattcgactgaaatatgggatagccgtgggtggcggaggaccggcagtgggcggtggacttcggcgggcggcgaggcagcagcggcgccgccggagccgcggagatggaggagggcggtgggccggcgtcggtggcgggggcaaagcaagagtgaggttaggaggtggtgggcagtggttgcagatccggcggcggggagccaccggagatgggggaaaacggcggcgcgggggcacctcgccgtcgccgccatgaggagaaagagaggggggaaggggagggggaaagggaagggtgagggggctcgccgggggggcctcgccgacgccgttgactctttccggccagccggcgaggcaggcagcggcgcggtggggtggtggtgacggtggaatcgcgcaacggcgcgaggacgggagtggtggcggcgttctgaacggggaggagaggagttagggttaggggggtctgcacgaatctttaagcgtatccagtggtccaaaattcgaatgataggaggtgggattttctatcacaagatatatagacaacctctttaatgaaagtgaaggtttatcctagaaccatgttttttttttgcagggaagaaccatgcaaattgttattcaacaatatgtaatatgtgatgttcaaatatcattttgttactattagttacacatcactctagcattgcttttaccccattaatccatatagtaaactctgcgctggtaaagttttgaagtcatatgctcccatcgaaacatacaacaactaaacttagcttacacatcatcatccaacatagataatacacacagcctcatcactaggagtatcaccacatcaggcggaacagccacattagctctacatcttgctatctattgcaattgtggtatgagatatattgcaattgtggtatgagtaagtgatttgatatcttccttatttagtagtactatgtcactagatagagcaactaatgaatagctgaatagcaaaatagtgttttatatcttcacaactgttactaatccaagttctagaaggaatttagtattattttttttcatgaagcaagtaatgacttgttgccaaacaaatgctctcaatgggattatctcgtttctttaagtttaccgttttacttgatagaataagaaatacaactatggggtgtttagatcccaccccaaaattttataccctgtcacatcgaatgtttgaacacatgtataaagtattaaatataggctaaaaaataattaattgcacagattgtgactaatttgcgagacgaatcttttaagcctaattgttccatgatttgacaatgtggtgctacagtaaatatgtgctaatgacggattaattagacttaataaattcgtcccgcggtttactgacggattctgtaattagttttttttattagtgtccgaaaacccatgcgacaccatatataatacctgatgtgacacgctaaaactttaaacccttggatctaaacaccccatatgattgtcttaaatcaattgacattagcccaatcaaacctcataattagagcaaggacaaagggaagaaaatgtgttcatttgtttgtatgattccacatctagcatacctaatcaaaagaacattattctattctttttatgcacaccgtgaccgcgaataaggtaacttcaaaggtacaatgagaaatctaaaaaaaggaaatttttattgaagatgacgaggtaataccgtaatacacacttttgcatccattaagtaagaagagcttgggctaaaaacaattattgcaaggtcgaagctcgcctcattcatcttgatacttataagggaatggacaacaaagtctaacactttcgagagtacgtgttttggaagatagagaaaagaaaatacaacaaggttggtccatttaccccaatactaatgggattttatttggttgacatgcctaaccaaagcatcaatccatgttcatgtgtgcctacatctatttggttcattcttattgatcgggcttagctaatactagcagtaaaaaaaatttagatatgatgtgaccatcaagtataggcatacaaccaagcatgagaaatataaagcattgccaaagaggatgaatggaggatgtacaggatattcaagtccaacgagttttagaatccagttcggcctccagagacatcactgacttcaaacggacctatcgccttcatgccaactacgatttgcgtgatcttggaatggaaatattatctcgtcatctttcaaatgcatccagtctcatatccaaattcatctcgagtcaacgagaatcatcaaaacaaaacagtgctattgctgaaacggaacttgggcctttggtcttgtaatagactagggccatctcagaagtgtctccctccacctccccgaattagtacttaaccctagctctagtttcccctatgaatgtctatttacaccgtctagaacaattgggttttatttagttgaattatgccaagtgctattcaccttgtctctagttcttactcgattagagcatccctaggagatacgctactacatcctccgttcgcgatttggcgtataggagtgcaaaaaccgtctccaggagatgcgccatccaatccggcaaaagtggcggatgcgccaaaaagggagagagaaaacccaaaaatagcgtgtctctctcctcgcgccaaatcacaacgatcgagctcccgcccccatccggaattccacgacgtcccctcccccgcaacctccactccatcgtcgtcatcgccggccagcgaaggggagtgcgccatgcccgtttttgatttttttttttgcaatggagggtggagagaaaggggtgtagccgtggagtgagggtggagggggataagcataccagatcagggaggagagcgccggcagcgcccaccgccatcgccctgcccgctgctgccgcctgccgccgttgcccctcgcccaggcgccgctggatttagcggtggaggattggagtagatgcggaggcccggccgccaccgccgcccgccgccgcgacacctccgcccgcgcctgcgacacggtcacctgcgcccggtcgctcatccgcccggcaaccccaccgcccgcggccgtgaccccgccgctcgcgcctcgcccgcccgcgcatgtgaccccaccaccgcccctcaccagctcgctcacgagaagaatagcagtagagagagtagtagagaaggttagttgaaagatgttataaaaaataggaggatgcgatatggatgatgtaatatagatgatctgttggagtgggaagggatatgaacgaggaatcttttttggatgggcatccatatgggcatatagaggatgatatttggatgatctgctagggatgctcttagtcgacgactatagattggcaccccccctaaatagttggtgtgttgatttacctggtcgatcagatataccacttcaatcgcaactatttctttgtgcttaatcacctattcataatatttagattgcatcttatcttgttcttgcagtgttctctcgtttgcattgcaaggatcctcaaccgcgtgcaactatttctttgtgcttaatcacctattcacaatatttagattgcatcttatcgtgttcttgcaatgttctctcgtttgcattgcagagatcctcaaccacgtgccacggttgatacgacatcgtttatggtgtagcgattgcatggcgatctagacttgttctgattggtagccatgtcgtacacgtcacactcgataaaagcgagagttatcccctaccagaagatcaggccacgagagagagcacgtcatcaagatacgtcagtatcataattgataagtagaatgagaggccatgcttacttgggagagatacatatgtcaactaatgcaacccattttttcacatatttggagtacaatttaacatctttttccctctttgaaatctctaccatctggtttattcacctaacgttgaaatgaacgaggaaaattctgcttgtgaggcaagccttagaaaaagcatgcccttgaaaagaccatgcttgatctctacacaacatgagacctaagaaaaagactttgcaacttaaaagggtgtgttcaggaggagttgggaacttctcatcaccacacgaaaacatgatagctcattaacacatggttaattaagtgtactagctaaaagaacttgaaaaatggattaatatgatttttaaaaacaactttcatatagaatttttttttaaacgcataccgtttagcagttcagaaagtgtatgcatagaaaaatgatatagtagaagttgggaaagagtagtgccgaactaagtgcaaatcatgttttgaataataatacgattatcatcttaagtaaaaacgattttgctagagatcaatcaaaagacctttttcttagccatcacaggtgggaaatcaatcccacgacctcttggttgatgccacgcggttgtaaccagatgagcaagctatcaatcctatcgtgtttaatatactccctccgtttcacaatgtaaatcattctagcatttttcatattcatatttatctagattcattaacattaatatgaatgtgggaaatactaaaatgacttacattgtgaaacagaggaagtacaaccgatgtacgatgccattataatataattaaactgtaattatattcgtgtgatttttacattgaaaaaaatattttgaacgatatctagtagccccaagtaaaaaatatatttagacccgaaacttaccattcaagccaaggccgtgtttagttcccctaaattcccaactttccatcacatcacatcacatcacatcgcatcgaaaacttttctatgcacataaactatcaactttttctccaaactaccaactttctcccaacttcccaacttttccaccatctaaacacagcccaaaaataaaagagttaatttcacaaaactataggtactttgtacaatatatcacaaaactacatatttaagagtttgtttcacaaaactacagatttattgtctccgtttatcacaaaactataggtacctgtacaatatatcacaaaactacagatttaaaaacttgtttcacaaaactatagatttagtgtatccgtttatcacagaactacacatttagtgtcttcatttattacaaagctacatatttagtgtcttcatttattacaaaactactccctccatctacttttgatagtcatatttccaaatctgaaaaatctatttttgataggcatatttcaacccaacgacctatcctcttaatgactttctcggatttaatgcatgactctccattattccacacaagattggctacatgggcatcgagaaatgtaaatattaataaatctcttgtttacgaggaataactagtagcatgtttaaatggatgataagtagaattacttatccttgtctgtgtgtcaagatgaaatatgactatcaacagtagatagagggagtacatatttagtgtcttcgttatcacaaaactacaatttttgcattaaaacctgtagttttgtgataacgaagacactgaacctatagttctgtgacaaatgaagaaattaaatttgtagtcttgtgaaacaagttttaaatctatagttttgtgatatattgtgtaaagtacctgtagttttatgaaataagtttataaatctgtagttttgtgatatatggtacaaagtatttgtattttttgaaatttactcaaaataaaacctgagtaagaagatcagcccggcccggaccagcccagccggtccacaaacatgcaataccacatttcccttttcttaatttttctaacacgaaaaaaggccccgaatgggtgggaggggcccgttcgtcttctccagtaacgcaggagggaggagctcgtggcggcggcgccgccaccgcaccggccggcggtggggacgcacggcgagggacccggtcaatttttcccaaaacaaaaagcgttcaaatcctcaccacctcccatctctctctctcttgacctcacgaatcccctttgccgcgagcaacccgcgacctccctccctccgcggccacacgaggtacgcgcgctttcccccttaccatctcgagataatccccgaatcgattgatttcgacgccgatttgcggcgatttccacaggcaggtttgctcgcgtccctctctgctctcgattgattcgttgggggttcggggggttgagtgctcgatcgttttggttgcgtgagtcgcggtcgaatttagggtagtattgcttggcgattcgtttgcgcggactggatgggggctttgattggatggggaggtgggaaaatcgctatgcatgcttgttgattggaattggattttccatgtgtgggcgttgcttgtttacattgggattgatttgcagagttggacttcatctgattgcgttggaagcaagcgaatgtgtcgtgagattgaataatgtgatatacattttcagatgttaggtgccatgtgttaaaaacaccctcgggtcgtaggtttgatctccatttatgatttgagtgagccggggagccacagcttaagatgccatatgtgtcatatgttgtttggggagagaacggaattggattgataggttttacatacaacaccgcattgctgaatttataaaatgcacagtagcgaaggaagcaaaacaatgtatcatacatacccccctggtgtcattttccatgacatgctgcctaagtttttccttgtcgttttgcatcaccgggatagttgttcccatcttgtgcatagttagccacctgaaaatcacaaattatcagtttgcgcctggcaagtaagccaaccaccaacaaaatttcctatctagaaatctgacagcgatattcttcctgaacctgaagggctaggaataatatgtctgcagtactgcaataatcataaactcaggttaaactagttgtgtttcgggcatattgcacctgggattattccaatatattgccaaaattttaaaatgacatgtttcggttatttttccttgtttttggaggaaataggtggaggatacctttagatcagcagaatccccctttgggagctaaaaactgaggagtctatgtgaaaagaaagattactgggaaaatcgtaaaaacttagacatgttagtatgttcagcgtccttcttcatagaaccataccatctgtttcatcttaagcttcaatggtcatgtaaaaggtcctttgaatgactgcaagcaccttccataggaagcattctgatgttggtttcagatcatgttcatatgatggaggttaaaagcaatccatactttatcaatccagtagaacaataaagtagtttttaatttttggaatattcagaattggcagtccatatatgttgagaattttctcaatatggaacgaagattccaatttcctaatccagtgctggtgctctacagttgacttcaaatcccactgaattatttgtgagcaataagtcagtgctagttccttgctaagccctttctagtgttgaaattttagtgtttaattctgtgaacttctagggagggaggatgatgtttttaagaaataaaaaatggagaaaaatactcttgatttcaccacttcctttttcaatcttgcatatctcctgcagtaagcataatctcctgcacatatgctgcttttccaggattctaccttttcttccgcagctgtctatctaccgccatggagcactgaagccccaagcatccaaatcacattgaaatccttccatttagatcaccgtaagtgataactgttgaaacttatgctcaccaagtcaaccacgcacataatagctgccctgtaaagcaatgttttgtttgttaaatcccattggaagtccatgctctctgcaacaatatcctggtagacatgttgcctcctgttgatccagttgagcgcagaaaacacaatcaacattcccatcacatcctgctcggctttttcttggttgcaaggactaaccgctgaaggatctgatcattaattggaactggaagaccccatcatttctatacttcttcagggatgtattcatatcattatatcaaatttaaaaacctatatggtaaatctacatattctgcaggctgtattcataggaattacaacaagctgtgcaatatatccggaaaacattccttgttttcttagtggtccgctgatatggccatacatacctcataggaaattaggtggataaatttagaacattcaattattttagtctcaaagatggaaatagatttgcaaaatgcagcgtgttgcactacctcttagtgttaacatagcattctgaaaataagaagattattgagtattgacactgctattagcatttgttgataatattatatgaatttctttctttctttttatcagtgtagatatttgcatcatctggactcaagactccattccattttgcagtggccttttgctttcaactcaatctcaagagtgtaattaacttggaaataaagacaggtgacttattggtaagcattatgtcctgcttttgcacttttcttgtttaattattaccatttgtttctccagttattttgtgcatttgactgttttagtggcttccatagtccctcatatttgtgttgcttgcgttctagtgtcccttacgttttatagtttggcattgtggaattataactctcgagcaccatttcaatgatatgccgctaaagtacttgtatgtgcagttctagactgtaaccagataatcctgctttaaaaaactaagttaaattgccataaaaaacaatgttctgattttaggttggttctaattttctattgagctacaatttggtattgtggggcttgttttgtttgataccaacttattgccctaccaaaattttggtaacttcaatagtagcaagtgcatgtttggtttgctaccaaattttacccgcatcagttcaaattcaatactacccaatttggtagtgccaaaacttgccaaggttttggcattaccaagattttgatagggcaaaattgattccaaaccaaacaagcccgtggtttatgagccctacaattaatacttaatgtaggaggatacctaacatgcaatctatttatacagttctactattttattggagaagaaccatgtaactatgtagtggtgaaggcagggagccaattgctatttgatagtgcaactacattacagaactcctcaaattaaactacttgaacatatactacataaattgatgttactaggctgttcagatttacctttggggatttctggttgagagttgtgtcataggaaaaactgtgggaagaggagctcatggaatgataaaggggatttaagtgtggtaggaagaagggaagaaaatggcatgagcgtaaatgaggggttttggatagggacatagttcggctgcaccatcatcgaatactatcactctttggtgcacataatactggcatatgctagtctgcaatggatatgcattttatggtaggaaggtgcgtgaatgtgagtggctgacactaaaatcttgggagggtgacagaaaaatattcacatatgactcgtagaaataagcaatgagaaaagaccttctagcagatatcacagcttgcatctttatgaaaactttaatctgctatttgagttgtgttatgccatacttctccagtagcacgaagatggtgttgagatatatttgacttgatattgctcagtggtcagcaccaatagaaacaaatattgcatactcctgatcctttccccaatcattatgccctttttgagtgcattaccagtcagacttaagtgcttgcatgatccataaaatctggttatattcatgtgtaggggccaatggactcccacttggccattcactttgtctattaaaagtcattataaatgatatgatgaattgcattgggtgcattgaaggctatagtatagtgcttgatgtgtgtcatctctctctaccaacagagaaaaacagagctaatgttcctttttaggcttatgtactctttgtttgctgccatgaaagccaaagtttgccaagggaaattttgttatcaccgcccaaatttggtctttgttttgatgccacatatcaggaaggttccgtacaaatggttttggttactctgtttagttcactcttgagttttgactccaaactaccaagatcaggacagcctttcatgcgcaattttagctttgaaaccaaatatacccttgatgcctcgagaagattggtctccctgatcaattggaactctttatgctattctcacccttttttctggcctcccatcacaatggctcattttgctcaaggtctgttgaatgcaacaacttaaaatcataatggaccatccacagatttttttttttcgtgtccatcaagaaatgaacagaagagtccgagtgataaccacaccaaaagacaggattgatctaaaccctaccaagcgctagctgagtaggatccagtacaataaagcaaccggagtttcataaacattaaagtgtgtttagcgtgtcaaaacgctaaacgtactttattgttgaaactgtcagtgctttgctggcctttgattctatgttacttctcgagaagacatgggctgttcatttcgtaccatgaggccccaaacctagaagcctagatgcatcgaacatgcagacttccattgttagatcgcatcagtattcacaccagagtcacgtgaaaaccagccttgtccgattaaattgattttagcactgttcgaggcccataaatcattttgtcattccttctgcactgcttatcttcttccttgtagattgctagttagttgccccaaaatccatgtagacatcactgcatcagatgctggtttcggtcgctttcatcagaaacaaaaaaaatgatcctttgctctttgaagtgttaaaaaatgcaataacattccagtctttacttaaacagatattcagggaggtaaagtagcccaaaacatgggataaaaagtgagctgaaacttctctgcaatccgagctgtatccattatcttatttggtagtggtaccgtggattgggggcttggaacaccacatgagatgttcttcttccttaggggagaagactgtgtcctcaagactgaaaagctttgtcaaccttttgggagcatgtgatggatgtcctctaaacacccagcttaaccatggcctacaaatacaatatttgatttcttattgtcatctgtcccagaaacatgcttgcaccggcatgcttcgtgttgcttctgtgtgaataccaaatttttgtcaaaaaaaaaaaagaagcaaagctttaaagcaatctatattccttattgctagtagctttgagcaaattgagctggacatcatcatcactcatagctcccccttaaacaatgttttgtttgcatcctatgcactcctagtagtgtacacgttgctttacttcatggttgttactcaccatctttctggaaaagcaaagcttcctttgtgtgcctgttactacttgttaacacaagttacactgtcaagttgcagatacatttttttttttactttgcatcatcttttgactgtcactgtgcccccttagctagatatctggacactgttggccattgatgctacatatcagattcaggtcagtatcagtataggtaggtggtatgccatcgacgagtagggttcttacgtccaaagggtgtgttaggaggtgtgctaccatcagccacatggataaattcctggaagaagccggaatgcatcaccatcagagtaccgagtgccaccaatgccatgataggatgaacccaagacgtgtagtactagttgcaccgtagcagcagcacatagcaaggccgtgtggttggcgatcgattgccgtgtgggtgtgcgcgtgtgtgcgccctgataatgcaccgactcttgcagaagaacaggagagttgcttggctgattccggttggaggatagtagtgatgattttccattaggatttaggaatcgtgcgccgactagtggactagtaatgcttcacggagaggagaagcagaagcagaagcagcagcatgggtggtgccggtgatgtaagtacgatacgctaagcatcctatcgcaagttcgaagcacctttgcaccgcgttttgtgaggccccacactaaaagaaatcatgtcatgtgccccccgtgtttgctttaatttgatgggcccttaggtccttttttttattaagatacatatttttatcttaattttaattcgagtactcctagctgctagacagtatatttcgtaaaaaactttctatatataagttactttaaaatatcaactaaatcaaaatttcaagtataaaataattaaaacataattaattgtatgctaatatatttttttcgtgtccacaccccatctttatatgctattttctcaaacggggccttaataagaaacttagaaacttgctcttcctatttctgctaaaatttgtactgtttgttcctttgagaaatccattactaattcatttctgtagaacatccagacaagaggttactgaaatgtagcataacgaatctt

SEQ ID NO: 8618 - DNA, 15846 bp, Oryza sativa
cctcccccctccccctcccttgtttatataaacccgaccgcaccctggcgccagccatgtcatcatcatccacccccaccggagcagcagccgacgatctcgccgccgccaacgccaacgccaaggagtgcgtgttctgcgagatgacgcggcagcaccacccgcaatgcgcgcggcggctcccgaagcggatcatcctggtgcgccacggcgagagccaggggaacctcgacatgtccgcctacaccaccacgcccgactaccgcatcccgctcaccccgctcggcgtcgaccaggcccgcgccgccgggaagggcatcctcgacgtcgtctcctccgccgccaactggaaggtctacttctacgtctccccctacgagcgcacccgcgccacgctccgcgagatcggcgccgccttcccccgccaccgcgtcatcggcgcccgcgaggagtgccgcgtccgcgagcaggacttcggcaacttccaggtcgaggagcgcatgcgcgccgtcaaggagacccgcgaccgcttcggccgcttcttcttccgcttccccgagggcgagtccgccgccgacgtcttcgaccgcgtcgccagtatgtccccatctcatttcaattcaattccattctcccattcttcttgcaattcaaaacgatttctgatgaaattcaatccaattcaattcttgttcaggtttcttggagtcgctgtggagggacatagacatggggaggctggagcaggacgcgagctgcgagaccaacctggtgatcgtctcccatggcctcacctcgcgggtcttcctcatgaagtggttcaagtggacggtggaccagttcgagcgcctcaacaacttcgacaactgcgagttcagggtcatgcagctcggccccgccggcgagtacagcctcctcatccaccacaccaaggaggagctccagcgctggggcctctccccggagatgatcgccgaccagcagtggcgcgcctccgccaaccgccgcagctgggccgacgagtgctcctccttcctcgccaccttcttcgaccactggaacgaagacgacaatgacgacgacgacgatggcaaggaggaaaatggcaagaccaacaagttgctcgagtaataatcttgctgcttgcctctacttgctctttctttagaaattccgtttaaaattctttggaatttgattcgattggtactactagtgtatttctccattggggcgatgcaatgtactcccctttgctgattcttttctgtttgatctgtagcctgttcatacatagttgctagatactacattgataaatactatatatgatttggggaaatgaagcaaacgatttgactatcaaaaggaatcattgcctatattctgataaacacataggataaatctcgagggtttgttctgaatctcattcctattacttgactgtcattaaaggggatctttgcctctcttctgtaactaaacacagccccttttgtttcacctaactttgtttaactactaataatagataggtcacattaattcgagcttttgttgacagtgatatatgagattatggatttctctgtgaaaaacactttacttttggggcaaatgcagcatgttgttagcagatcacctgggaaggccagatacgcctccatgctttcgttcaatttggttcttgttttccctgattattttactcctagatatggccatggcctctttactattttttgtcggggtgaccgaaggaggtcatccaatgtaattaagatggaggaaacctctttactattacaatgtgctttgtttagctaataaagataggtaatattttacatcttcggtttacaatttgtttttacaaggttatgtatttttgtcaaaaaaagggggggaacttagcatttcgtgtggttgcattcttcctttttgtgacgggagaaaaatggtagtatctgttattcatgtatagctagacacacactccagttttcacatgcatatgtcatcagaaacaggtgcaaatgcaaagattccttccttgctactagttggcatgttcatccttgactacacactatacatctagatgttgcaatttcgtgcagtgcactacaagtaggagtacttcttttctccctttttcttgttattttatcttttattttattttctaaaaaaatcagaagtactagaattgtggaaccacaaacagagcactgtccttcctggctggtccagcaaacttgcccatctgacaatctgagtactaggatccatgctccaaaatctctataggattgtccattccataggaatttgaaaggattggataggattcaatcctttgtttcaaagtgctttataggaaattttcctataggattgaaatcctccaaaattcctatgaatttcctttgaatcaaagttgattttagatatttccaatgtagttttattttcatcattagtttttaagtagctaagtttacgcgtaaaaaagttattttttaatcgttaataagtcattttgacttgtaatcaactcatgtccaactgatgggtccttcatgtcctgcaaagtgtgctgcagtatgaacttcagatgttcttctccttgtataagttcccatgaactgcatatgagcatatcagcagtctgaatattttttgagcaattggggcgagatccccaaatgctgggtgaggtgtagtcttgaccatcttttttttttcttctaaagatggatcaattcccatcagggcttggatttcattaataagcatgaaacttgctggtgatattttgttacatgatggcaattcaacagggcagtgacctacatgttgtacattggaatataagaacaacttgtcctgacatgtgtagattgcgcatctaatttcgctaatgtttgatcctttcagctgccatgaacatgcttcatcactcattcactccgatgtttaatattccctccagtattttatttcccatttttctaattctctgaagtcaaaggggtgccattttgattactactcactctgatcctatttactactctctccacgggaaagtattttctacacctagatattatgacaactaggtatatgcatatagtttaaatagctatataaaaattcataaaattgataagatactttatgataatataagatactatacaaacatacaggtttaaattcgatctatacataaaaaacaaaaacaacaaaattatttgcaatgtagaaggtatttcataatgtaaggcatggtcaaacttagtacggtctctaaaactaatctttgacttataatttctcgtatactataaagtttgtagcaacaaaattataaccatatgaaaatatattgaaataccaatttaatgttattattttcagcaaataaaatttaatttataatatactaatcattagtctttttttaaagttaaaccttaaaatgtgtacgtgttttacattatggaatggggcctaagtatttcgatataggggttgtaatttctttaaggatgattttttatttgcccatgtaaaatactctcttcatgtggatgtgtcacatccacccaaaatcctttatattatgggacgggagaagtgtacgtgaatcgttgttttcatgtaatgagtcaattagggatcgggtcaactttctagggtaaataaaatataatatttttttgtcccttcacatacagttgaatataatttaggccgagtttagttctgtcgaaactagatttcggcaataataaaaggaggtggctatcaagctagaaaagtgtatgggtttggagacaaaggatttatacaggttcaggccttcttataaaagaagtaataccctactcctgtccggggatgaatccgccgagtgtattattgattgtatgattcgggaaaaatcagcatatgcccctagaggcgcccggaccccccttatatatgggaaggagtccggattacaaaagataatctatattcctaacggaatatgaagatagaggtaaaatacagtcgtaaccgactaagtctcagggtgtttccttgatacacaagttaagaaacaaaacccgagatacagataagatattctatctacattaggtatcctgtacccagttcgaataccatcgccgtgtagatatgggatacccataatctccacagtagcccccgagtcctttgcagtcgaccatcgtagccctctcaaagatgataatccgagtacttcaaactcttcaagccaaaacctgccgagtggactgtaaagggcgaaaagataaagaatatggtgcatcgaatagatgcacctaattaggtgtaacccccaactatgtgattagttaacaaactaaacatatagttgaaagacaaaataataacacaattgtgcattatatgacaaaagcgtacgcggcgcctaaataggcatgctagccgactgctttttagccacaataaaagaaatccgagtggtttacactctaaaaggttcacgaatgaacacactcgacaggcatccgaatataaaaactctaaagattacccatcaagtattataaagattatggtaataaataagtcgaatagcctaggccatgactatttaccatgaaaacaggcatataacacgccaaggaaatgactataataaaaacaagtcatccctagttaacccaaacagcttttgtagcctaaaaaagcttgcaaaaacagcataacgcctttctgtcgggcacctttttaatttgcattgcaataattccaaagaattatatgaccgcataaaaaggatttcatcagcattgggcaacactgttgtgcgcataatattgccaaagcaaaatatgcctaagtccctaaggaacacaatgggccacgctgttaaaagtattgggctaaagtactgttcaggcctaggcccattagcacctccgatacccttaactgaaaaatccgatatccaagcgacgcttcgtcttccccgccggaactctcgccattttccccactccctgctacagtgcaaagctgcgccgacgaactagggttcacaactccggccaaatccacctccgaaaagtgcatcaaaatccttcccgtgatccaccgcctcaatccctcacctctcccaagccatccctcgaatcaaatcagcacatttgagtgaaaccgatggcggaagagagagaaagcttcgaaggccaatgggcgtcatccgacgtaacggaggagaatcttaaggagatggtggcgcacggcgttctccctgccaaggagatcatcaggtggcgaccagcgcacggtgaggctttcccgtctccggatactcatgagattgtggtcttctcgcatttcttctacggcggctttgctcttccgacctcaaaatttttccgcgggatcttgaacttctatggaatcagcttgcatcacctaaacccgaattccatagtgcatatcgccaatttcgtccatgcttgtgaagcctttttggggatcaaacctcactttgccctattccgccggatcttcttcctcaagccccaaccaaacaagaacaaaccgtgtgtagtcgggggggcaggattccaactaaggggaactctgagccaaaaatatttctcgatgcccttcaagacttcgaacaaaggatggcatgcaaactggttctatgttcagaatcccgagcctgctcttcccgggtactcttgtcttcctccagtgtaccaagatacttggaactctcttccaatcggagatgaagcagtacaagccttggagttgttggatcgtatgttaaatcttaaagaacaaggcttacagggagagcagatcactcggcacttcatcaaatgccgactggcgccaatcaaggaaagatcccgcacagcattcgagttcgacggcaaacatgatcccaaccgtgaagaaccagattccctggatttcaaaatcatgaaggagaggatgtataaaatcttctcaaatgcaattgtagtcagctactctcatcaactgccagttgtgccatataatgcattcaatccgcctccacaggtatgcatcggaaaccctcaaaccgtgatcagaacataattttatcttcatgcttagttgactaactatggaagcatcttgttcaggaatatgcattgatgaagtcagatctaccagtcactcagcaccggtctcctcgccaacacaccgctcagggaggtggagggccaacgatcagaccagatccgcaacctcagacctccaaattgactggtcaaacaggtcctcgcaagagaaagctagtacttgatgatgatgaaggcgacgatgataaatctggggataagggctcgcctaataaacccccaaaacgtaccatgcccaggaaaaaactagctggccgtgcaatgccaaagatcagaacatcttccaggtattagatctctcggtatgatttccgcttcggcatgttttccgatgaaaataatgctaaatactgaaagaacactctgcaggaaaccatctgatatagatccatctggaaaagaccccgatcctgccatgacagagcaaaatatatccaaggaccccgagccgactgctgaaaaccagccgactgctgaaagccagccgactggcgcccatgcttcgggcgatagggccaatccgagtgacctgccgccgactggaaaccagtcggcaacaactgaaacggcaacaactcaagagcccccgactggaaaccagtcggacgcaggccctgatcaagagatccccgaagtagaagcgcagacgacgacttcgcaaggaccagaggctggtaacgactcgatagctgggtcttcaggtaaagaacaaagatcacctcacgctcagctaggtacatcttcaggttagttgtcttctcaaacaatggcgatttaaataacctcagtatatccgtctaatgtcttggaaacgcatcaggaccatcaggtgatgacggagaagaaatccctcgcataaaggcgaccgacgactctcgtcctcctatcttgatcaaatggtgggacgagaactcacaagccgccggcatagtcataaaccgtcaaaaagaagatgaagaagtgtgccagctgaagaaagcgctcggagaagccactcgtattgtaaatgtaagtcttccgagtgacggccttcggtaactttgttttctttttagcagaactgaaccatgatccatcatgcagagaatccatcttcgcaatgaggccaagactacaactttggaaaagctggttcctcatttgggaactctagaagcagttagggaccagctgcatgaggccaaggagtgcgccaaaaagacagagaaagagttaagggaccgaatcgcccagctccaggatgcaaacttcgaactaagtggttcatcaaaaggtaatcacccagatctgttccattgatttatgctgtcataattgcatcctcaaccatctggatttcaaacagcgcaagccgccaggatggaacagatggcgaagcaaattgaagccctggagagagacaagacaggactggctgcgcaaagggactcagccttgaaggaagtcgaaggtaacgccggctaacaatctgagcttctctccttataatgcaacagatgctcatcataaatgtgttttgcagatcgcaagatcaaatctcaagctcagttcgacgtcctggttggtaagatcaagaggcttgaaggagcaagggataacgtcgccaatgccgctgcaccaattatccaagccatgttcctcaataatggtggtccgagtgcactcgacgcaaccgaaatatttgacaagctgagtgttgctccggaagtatatttcaagaatatcaagaaagctggaagtatgggagctggcatggccttggcgatgacaaaatccttgtatccgagaattgaagtcgacaccattgatggatttgcagacgggacaagtgaagaagctgcccttgatctcatcagcagtgcgcaaaatgcggctgacaaaattgtgagtgatgttgtagagcaatttcgcaacaacgacctccagccgagtaatgaagactctgatgatgaaaggactgattctgactgagtttgagtgtaatacatggaggctcaatttgtacaatactggtgtatttatgctgtgcttgatgattcttgcgaagtttttgatttcttaaaagtttttgctaaactttcttgagcctaaaacccaaagaagctattaaaaactttcagtcctcgcaaactaagtagaaaaaccaaacaaggcaatgataaaccaagtaagcaaactgaattgataaaaaatcacactccattattatgatgatagcccccgactgacaacttcaaggagaaaacttgatgtttgacagtcaaaatagggaaatacaatgataaagttaagcgtagaaacgacgaatatgttcaatgttccaagagttgtcgacgagagtgccgtcttcgcgcttgagtcgatatgaacctggccgggtaacttcagagataataaatggcccttcccatagaggagataacttgtgccgatctcgtgtggtttgaattttccgtaaaaccaggtcgccgactagaaaggcacgagatcgaacattgcgattatgataacgtcgcaacccttgtaagtaccgagctgactgaatcaaagctgcttcgcggacctcttccagtcggtgcaagtcgtccactcggtcttcttcatagcgttcttcacggaaattacggaagcgcaaagattcgaactcgacttcactcggcaacattgcttctgccccgtagacaaggaaaaaaggtgactggcctgtggcccgactgggcgtagtacgcaaagaccaaagtactgatggtaactgtgacacccatttgccggcataaggtttaagccggtcaaaaactcgagctttaatcctttgaagtatcatgccgttggccctctccacctgtccattgctcatggggtgtgccactgaggcgtagcaaatcttaattccaaagtcctcacaaaagtctttaaaaactccgccagtgaattgtgtgccattatcagtgattatccgattgggcactccaaatctatgcacaatgttgatgaagaagtcgcgagcattatctgctgtgattgtgacaaccggtttagcttcaatccacttggagaatttatcaatggccataaagagatgcgtgtaaccgccaactgcctttttaaacgggccgaccatgtcaagcccccaaaccgcaaacggccaagacagcgggatagtctgcaactcttgagctggtagatgaatttgtctggcgaaaaattggcaaccttcacatgtgcgcacaattttgtcggcgtcggacactgcagtaggccagaaaaaaccctgccggtaagctttgccaacaatggtgcgcgctgcagcatggtttccgcatatcccagaatgtatgtccttcagcaattgtctcccttcctctaaagatacgcagcgttgcagaattcctgaagggcttttcttgtataactcggcttcatgcataacataaagtttgctccgccttgaaatccgctcggcctcatctttgtattgagggagttcttgagaagtcaaaaatcgtatgaggggctctcgccagtcggcttcaaccatagctatgtcatgagtgtccgcaacttgagtagcatctttgtgaggtactgtcggcgaataaaggtgttcgacgaaaacatcagatggcgctgcctcgcgcttggatccaaagttggcaagtctgtcggcagcttcattgttgtgtcgaagaacatggctgagctcaagtccatcgaacttatcctccagtttgcgtacctcttgtcgatatgccatcatgttgtcgtcaatgcaggaccactctttcataacttggttgacaaccagctgtgaatcacctcgaacaattagacgctttatccctagggaaattgcaatccgtagcccatgaaggagcgcctcatactcggcgacgttgtgagacgccgaaaaatgtatccaaagtacataacttagtctttctccggtcggggaaattaaaaccactccagctccagtgcccgaaagtctttttgacccgtcaaaatgcatggtccagtgctctattttctccacgggggtatcctcttggcactcggtccactcggcgacaaaatcagctaacgcttgagacttgattgaagtgcggggcttgaatgatatgtccaaagacatcaactccaaagcccacttagcaatccgcccatttgcttcgcggttgtgcagtacatcgccgagtggaaatgatgtgaccaccgttaccgagtgaccttgaaagtaatgagacagcttcctggtagtaattagaataccatataacagcttctgaacctgagggtacctcgttttggagtcagccaggacctcgctgacgaagtagattggtcgctgaactttctggacatggccttcttcctcacgctcgacaaccaagactgtgctcacgacctgggaggtggctgatacatacagcaacaacggctcctgcgggtgtggtgaagctaagaccggtggcttggtgaggagttgtttgaaatcttcgaaggccttctgtgcttcgggtccccattggaaattatctgttttcttcagtagcttgaagaagggcatcccccgctcgccaagtcttgaaacgaatcggctgagcgccgccatgcatccagtcagcttctgaacatctttctgggtgcttggcggtttcatgttgaggatagcagtaactttctccgggttggcttggatgcccctatgagacaccataaaaccaagcagcttccctgacggtactccgaaggtgcacttttcaggatttaacttcatcctgaaggcgcggatgctcgcgaaggtttcttctagatccaagatcagatcatccttttgcttggtcttgacgactacgtcatccacataggcttcaacgttgcggccgatctgtgttgaaaagcatctctggatcatgcgttgataggttgctcccgcgttctttaatccaaacggcatggtgacgtagcagtatgccccaaaaggcgtgatgaatgaagtcttcaagcagtcggattccttcagtcggatctgatgataccccgagtagcaatccagaaaactgagaagctcgcagccggcggttgagtcaactacctggtcaatgcgaggcaacccgaaaggatcttttgggcaagatttgttaaggtcagtgtaatcgacacacatgcgccattgccctgttttcttccgaactagaaccgggtttgccagccagtcgggatgaaggacttctttgatgaagcctgctgctaacagcttggtcaattcctccttgatcgcgtccttcctgtcttgtgcaaatcggcggagtcgttgtttaataggtttggcgtcttctttgacatgtaaggagtgctcaatcacctctctgggaataccgggcatatccgaaggtttccacgcaaagatatctttattattttgaagaaaggtgatgagcgcgctttcctatttacaatctaactcggcgcctattacagcagttttggtaggatcagaaggatctaagggaatctttttagtttcggcttcggtttccccactttttgaaatcttggcagcgggcacttctccttcgctcaccgtggttgcagccagtcggatttcctctcgggcagacgccatctcgcgggtttgggccatgtcgcaactttccttgtcgcatgtgacagcttgcttgatgtcgctccgtagggttaggactcctcggggaccaggcatcttcatcatcatgtacgtgtagtgcgggacggccatgaacttggctaacgccgggcgtccgagtatggcatggtatgctgtctcgaaatcggcaacttcaaagctgatattctctgtgcggaagttttcccgagtgccaaaagtgaccggaagagtgatctggccgagtggagttgcggataatcctggaattactccatgaaaaggcgcattgcttgattttaactcggagcgagggatctgcatatcatccaaagtcttggcgaagaggatattgagtgcactgccgccatcaatgagggttctgcgaagcttgacgttacggaccactgggtctagtaccagggggtaccgccccgggtggaccactcggtcaggatgatccgagcggtcaaacctgattgcgatctctgaccatcgaagatattggggcgtgtcgggctgaacagcattgatctcccgttcggtcagcttttgcttccttttagactcataagccatggggccgccgaaaatgtggttgagctccttgcggtggtcttgaaatccagccggggtgtcgccgtcgtccttcttccttgacgtgctttgtttctcgtcggagttcttccgagtagacttggtgtactgctccgcgaactgcttgtagatgaagcattctttggccacgtggttggagtttggatgatgcgggcattgggagttcatgatcttgtcgaaggtgttgacgcgcgaacgctgtcgagaagagtgagcggcggttgcaacaagttcctcaggcttacgcttgcggtccttatgattgttacttccacctcctcccgtagccggcgtatttttcggcttccaactgggacccgactgcttcgatgcggtgacggcgtcttcggctttggcgtactcgttggctttttcaaacatgagcttgactgttctgggaggtttgcgcccaaatttgccgaccaattcttcgtggcgaatccctttggtgaatgcggcgatgatgacgtcgtcggtgatgtcggagatcttgttgcgttgttcagaaaatcgtcggatatactctcgaagggattctccggatttctggataacgttgtaaagatcatattgtgtgccaggacgctcgaaggtgccttggaagttggcgatgaagtggtcgcgtaattcggcccaagatccgatcgtaccacggggcagtccatggagccaagatcgggcggaatctgccaaagccactggtaaataattcgccatggccttattgtctcctcctgctgcgcggattgcgagaccgtagacggtgagccacgattctgggttagtggtaccgtcgtacttctctattccagtcggtttgaagccggctggccaatccactcgacgcaggtcgtcggtgaaggctgctaccccatcaaggtcgtcgtcgtagcggtctggcgagtggtgacggcctcgagctgctcggcgctgcatgatcgtgtcgcgaagatcgatggggcggcgacgaggcggtgaacgtggccgttctactcggcgctccccacggtagtcgggaggcgagtgcacggaccgctcgtcgtgacccctgctcctgcgattggatcctgcgccggtgatgctgaggcttggatgacggtagtcctgagatcggaagtgtggaactcggctaccagtcggcgtgtggacgctttcggagttaactggaaccgaggccgcaatcatggtcttggtctggttcaagatgttgatgacatgatcagattggttgtgctcgttttccttgaggggggtgtcgaggagggtgatcgcggcaaccgcattctgctgaggggtacggaaaaccggtatcccttcaacatcctgctggccgatgagatcacgcgctcggcgcccagcttccaaggttcgctgccgtcggtcttcagcctccttcgcgttccgctcgtgcacctgctgctcccgccgtagccgctcttgctcttgtgcttggcgctcctgctccagtcggcggcgctcgatctcgcaacgtgtttcggcttcccgggcttggcgctgctcctccgtttcattgtcggccataaagacgccgaagaaaagaggagtgcagttgtcttctaggcttccgtcgaagtcgtcaagatccgcgtcgtcgtagtagcgagaaccaaactcatcgtattccacgatttcggtgggacgtgagtcgacggtgggagagctgtagtagccatccagttggtccgtcgaaaccgtgccgagtggttggaggatgacgccgacttccctgaagctaggcgaaatcggtgttaagaccgacttccgcccaggcctacgggatggagacggcgtggcggtggagacggctgccgaatcgtcagggagctgcatcaagatcgatgggtaaggctcatcatcttgatctggcgttgttggagtagatgcgatctcggccgagtggtttgaagccgactcgatcgagatggtcttgaagtaactttctgccgcgtttgggaatccaaacgggactggaagtcgattatctcccgactggtctgattccgagtcaaggagagaaatcttgccgaagttgttggtgacgaagtcgaggctgccgaaccgaaacgtctgcccgggtggaaagacgaagtcgtcgatgccggtgacggaacccatcgcactgatcggcgaaaagcttgacgctacccctacctggcgcgccaactgtcgaaactagatttcggcaataataaaagggggtggctatcaagctagaaaagtgtatgggtttggagacaaaggatttatacaggttcaggccttcttataaaagaagtaataccctactcctgtccggggatgaatccgccgagtgtattattgattgtatgattcgggaaaaatcagcatatgcccctagaggcgcccggaccccccttatatatgggaaggagtccggattacaaaagataatctatattcctaacggaatatgaagatagaggtaaaatacagtcgtaaccgactaagtctcagggtgtttccttgatacacaagttaagaaacaaaacccgagatacagataagatattctatctacattaggtatcctgtacccagttcgaataccatcgccgtgtagatatgggatacccataatctccacaagttccaatctttttcttcaaactttcaactttttaatcacatcaaaacttttctatacacacaaacttctaacttttccgttacatcgttccaatttcaactaaacttccaattttagcgtgaactaaacacacccttagagaagtgtaaaagtgcaatgctttgttcgtaacaaatctacccctgccaccgccatgtataaaaaaaaaggagaaaaagatcatgcatatgatgcattgaacctacagaaagctagcaatctactccctccatctgaaaaaaagacaacctcctagtacaatgtctacatttgttctactaggaagggtcacatcccattttaagttatctttttttttggacggatggagtagacgcctcatgtgatggatctttgatcgacagaaacctgacattttcatatctgaaactgtagtcgacattctagcagagaccaaatctcctctccttaaaggcataatccttatgcatgatcactgcaccccaagtgatgctaccacagcacgcgcgcctccactgcacactccaccactccccaaattcacccccaatccatgcattttgcacatttgcattcttcctactcgatcgatcgcccatagtgcccttgccaccacgccttaacactgcattatttccaaattttatcttaattttatcacgcgcgccaccatcctcgaaagcaattaaaaaaacagagataaattttacagtcttgagaggtatgaaaatttt

SEQ ID NO: 8619 - DNA, 14184 bp, Oryza sativa
ctcgctcgtggtgcaataatgcaaaccgcgcgcgcgcgcgcgcccgcgcccgtccacgcgcacgtccctacctaccggctcacgcagcgcaccgggacgcgcgtgttttgacggcttgacgcgctcgcgcgcagtcgcacacgtacatccggcttgtgtgtggttttgcctgattggctccgtcgccgccggttgtcccgcttgcggcgcggagaggagacacggggtcgttcatccgtttaattatttgttggtttcctccagcgcagaagctggagagtgaccgatcaccgttccgccctctccaggaccgttctcgccacgttctagtactacctaccgcgtgcagaagattgctgtaccagtttttttttttctttttggagccacatccgtcacaccgtcctctctcatcaatggcgacatgtctgtcggatcaagacgttggcctgcagcagagtagaccatacatatgtgtcgaccattcgcccggggtggcactgtcactagtcttcgccaagatttgtactttgtaattgaggaggaacatatagaacgctagctatatagttaggtccaacgaaatactttatatggactgacatcgatacaatacctaggtaccatacggatgttaacataaacctcacgtttcaattaattgcatactgtacatgttgcagtatttctatttgcaatcggctaaaaaacagtcaaagggttgctaatgaaattagagggagactacaaaaaggatcccgttagaacgggatattttaaatgactccttccctttctttctgttagcttccacatgtgtttctcctagcacctggtaccttggataccagctagtacctagtacctggtaaatttggtaccgaccgatacttggtacctggaaccttggtactggctggtacctaggtatcacaaactttggtacctaggtacctggtaccttggtatcggctggtacctaggtatcacagactttggtatctaggtatcaagcatgatacttgtgggtaacaggcttgatactgaggtatcgcgattaatacctgataaagatggccgtggcacggacacagaagatggtgaggtttggccataagtcggcggcgaccatctacaggaacatgcgcggcagcaacttcatcttgaagttgatggcgaaagagaggaggtagagattctagagtaggttatcgtcggcgttgcggcgacagaggcaccgggaccgccgacttcttcttcttcttctgcggcggaggaggagccacctgtgctcactagcaaggaggcggcgggagcagcgggcaaggacgatggtgctggtggctcgcgaggcaacggagaccttggcgaggagtgtgagggaggaggggagaggcctcgacgcctacagtgacggggagcgccagtggaagaagcggcgccgcagcaggcggaggacggcgtcgaggaggcacggcgagatcaccctcgacactgccccgacctcgccgacgccgggccgttgtcgtccacctcggccgccggagacgacgacggcgaccccttcctcctagctggcttcatttccgcgctcttggagagagagagagagagtttgtggaggggaagggaaggagataaggtagaggagaccttatcccgttgtgacgggatactattgtgtagattctctttttattaaacaagtggtcaattacccgtgcattgctacagaacaatatatatcaagaaaaatgtatgatttattttgctataatatttgaaacatttttaaacaaaatattagttgtgcataggttaagaatggtttctcagtaggactgtatactgctcatacgaccaaaacagcaccccggatctgtcaaaatttacgatttgtcacatctaaaatatacaaataataaaaaaacaaatgggccggcatactgtgaatattattacggcccaaatgaaaaacccaaattgaagcccactcataaaacaacttaaacatattaaaacaataataggcccatcatacaaagaattttgagcccaataaaaattgtccagattaaaaattcaaaaaatatttggatcaaggccaattcatccaagcccatatggaggccaattatataagaaaaagaaagatagtagcattttcttaacatgtgtgttgagttgttgatcgactaaacatgtgacgaaatacaatttaatattagaggtggtgaaggaggtacaccaaggatcatgcagggcacatcaagctgcacgggcggtagcatactagcaaccaagatatttcgccaatggctatactggccaatcctgctacatagctccgaagagcatatcacgcaattcgtaggtgccaaaaacatggtatatctcactccgtcccatagtacaacctttagctgatcttgccggtctggccgttcgcacactgggagctactccggatgtggattttcatccctcgaggggacatctcctcgttgtttgcatgtcatctaaatagttatcaaaaaattttaaaaaaattggcaacatagattaatacgaaatatatcactccacaaacatgcgagaccatattcaacttctataagttgcaacaaaaataacaaactaaactgaaaatagttatcgcacattcgcaactatatttgttatttttgttacaacttgtagaagttgaatttaaacttgcatgtttgtggagtgatatatttcatattaatctatgttgccaatttttttcatattttttgatgactatttaggtgacatgcacgaaacgaggggatatcccctcgagggatgatttcactttcccgagctactccctatgtttcacgatgtaagactttctagcattacttatatactatacatatagatgttaatgaatctaaatatatatatttatctagattcattaatatctatataaatgtggggaatactagaaagttttacattataaaacggaagaagtagatataattggtcctttcccaacgacaaagaatagctacaagttgcaatcaagtacttttgaaggtggattgaagcagaattcttggccaccatcacttcagccaccgtataatgatttgtgtggaagaaaaacattatatgtcgctttgcattggcgtattgaaataattcaccgcgaagggtctggctcataaactggaaacaggaaggcttaatataaaatagttattgccaacttaatatattgacattggatttatccttgttcagttgccagcttggttttctactatagtatatacgattaagagccttacctggtgaaggtaggtgggcctggctcaccacaaaacctttattctttctcatgacgtaaactagtggagtcctatcgatatcgatcttatgttgctatatacttagcatttgtgtctacgtaaaccaacataaaagaatgtaacaaataattaatgattgcttaccttggggaagatctttttagctcagatcttcttcgtatggtcacctgaaccactatttacatgtgcgatgcaataccagcttaagcataacgaaattctcagtaaactacgttgtaggattctatgtggcccgtatctaaattggttttcttaaaacacgatctactgtagtgccgtgatatagaataaaccatattgcctccgtttcataatgtaagtcattttagctttttttatatttatatattgatgttgataaatctagacatatatatgaatctaaattcattaatattaatatgaatattagaaaagctagaatgacttacatgtgaaatagcttacattgtgaaatagaggaagtatatagtaagcatgtaattcaattttccttcgcctcttttctttctgatgactggttgtctttccatgacgcaagccaccccacggagagctagtttgcacctaatttatctgtctataaattgtaatgtaaacaatgtcatatcaggcataaaccttctgcaccactaagcataaacgatgtcctggcttgctttaaatgtcttatccagcgaacactaacacacaaacgttgctccgaaagtctatcttatccgataacgattagcataaactaaccttaggccggtgtctaaatgactttaacatctcatgtgatttcttaagtgccgtcagcatataggcaataccaagtgattttagatggtttggacgtttggtagttttcaattttcatccagatacctctcttgacaattccatccacttgtctattcctgtcctgtgtggaaatgatcatgtctcgattctagataggcaaaatcaatagatatgcagttacagaagttaataggacgaaatggtaggtcctatataaggataacgttcaaaattatatataagcccctgcgtaccatgtcaaattatcaattgagactttgaaaaggaaagcacaggtctcaacatggcagatatggagtgaaggatcatcgtggcctcttcctttatttctgtgcatttttatgcttcgcttttcatatactcggacaggacattgctacggaagaatagaagatggtccctttagttttacactccatttttttctggtttgttggatgccactgctaacattaaactatgcaaacagaacgttcaccaaagaaattaaaaagaaaaccacactaacctccgcagatcgactctagctaatccatttttactagtatgatgttcaaaggccaatggtaaatatatggtgaaaatcccaatttaagtagaaactagtgtaaacccatcaataaaaaatggaaaccagatatttcaaactgtaattggaattccacctctaatattaaaaaaatgatagatcccttaatattcttgaaaaaccatggataactagtagcttgaaaattgtttacttgcccgttcgatagtaaacaattttttgctcaacttacagccttattatatcaaaatatatttcatctttctgtcaaaataatatatatttcatctgagatgttggtggcctgattgaacttatttctacaatttccacttgattttgattctaaaaaacgttaacttttctttttagaccaatactatactacgggttggtttggtttgtggcctaaatagaccttaccaaattttgtcaatgccaaatttaggcaagttttggcatgactaattttggtaatgcaaagttatgtttggattgaagccaaaatagcctaagttctctattgaaatggcctatttttttaggcatgctaaaatttggcttcaaaccaaatagacactaaacactattgaaattgctaaatattggtaagcctaatttaggcatcaaaccaaatcagccctacaaaatcatttaataacatacgcggattgacgtggatcacaaacacatagtgcaagacacctacatctctgagtttgcgtctttatcacaaacgtagttttttctccacatctgtggtatatacttttatagactggggagacctgtgtcactatatttgattgtagtcacatctatgacttgacttttccgagcaactcaaaaaaatgtcgtattttactagatatactaggtactccaagtattcatacacatgcgcaggtcacatgatctttctcgaacctcccagataggtggcttttcctatgactcaattttgaaatcaaaaataaatttgaacaccttgactcctttagcctcgcttttgtttgtaggagtcgtcatgcattcatactatagcaataacatagagactaaaacttgcactttgtcctcaataaacatgttaatcccttaattagtcgcattgttaacccaccaggggctagatgcacttctagcgagtagattgcattgagatctacaattttgatatataacatgtctctgtctaatataatttaaaatttttgtttttaaaaatagatttgagaacttgtaaggatactgagacaaaagtctataatgaaaagtacttagagacacaggtataacctgtgtccgtcatagatatcaggcacactttttatggaaccaagtttgtgatgataaacctcattcattgacacgttttctttatccacatctatgatttcttagcccatgtgttttatttcgacatgtatctgatagcttcacagacctacatctctatggtcatttcagagacacagcgtcaccaatttcgtattttgtggtagtggatgttaattgtcatgaaaataccataacaagttaacaacaaaatcctcagctgaaacccccacatagcatgaatgataacatccctctgctagaatgatggatatatcaatggggtcgtgacatcaaacaagagaaacagggaaggcattaaacactcttcatcctaattacatgggataattgaaaagatgatttgttaaaataaagtgtatccaacacattgcataacagaccgttgaaatataggcaactctaaccctagtttgttgcctccactactttcctctgtccttgccaccgccaaaggggtgccctagaatctggctgccctcgaggaaggtggtggcggggtctcttccttttctggcgtgtgccctcttccggtggtatcgtcacgaagttatcttctttttaatcaaggccttcactctaacctacaaactagagtcatcttggtttcgattttcgatgtcgtttacgtcgatagcttagtgactcttcatatggaccgtacggattgtggaaatgtgtatattgccttcttcgttttataatcatttgagtagcatatctaaagatgcttgtagctattgtgtttctgatcgatcgaaattgtcctaagggttggagggggtggaggttatggctcgcagcgacgaggcaacaatattggggactttgattacataggtggcgctctttgggtaccgatttcttgagtctaaggttaaatctctaggtctgaccttcaaaatgatcgcttccttgttcaaggtaatgtctggagtcagtttttgtctccagcggtttagtattatttactaattgatcaatgggatcagcagcgcatatgcatcattccctttttgaaggcattgttttaggagagcatttttcatagtctaagttttgctttggtggtatttgagaatgagtatcaattgtggttgtattttgctctacggcatgacattctttccatgtcttccttttttttctttttaataattataggttatgtgcatcttaattatatagaggttatgagtgatttttagaatagttgtatcatcttgatgtaattgtttaatatcaatatagtttcttttattaaaaatattaaaagtatggctacataaaagagcttttcacgatgaatctagctatcaatataattttaatatttccaatgaacgatgctagtatatggtgaaaataatgttgtgaaaatataattgtctactatttggatggagtaccggttggcaagatatcaaactcgtatcgtaccaaatcgatttttttctgaaagcctcctgaactggtatgatgtcatgatgcagtgcatgtaaatattgatgttcaaggcatggcactttcttgctgatccaccaaggaagtgtcacctgtcaagcaggatatatagcttcttatgcactcaaagctgaattatcttggccatcggccttccaagctaaatgagcaatggatgtacagccactcattatgctacaactgactactgaggtaaacatccattgccatgcattatgctaaacgcactcgatcgctagaacaaaaaattggcagcacagccacatatcatcgagaaagtccctcttgggacgtatagtttactcactaattccccttttgactggatagtgttctcttcattcgtaattgattatcgtattatcaaaaaaaaatctgatttgatcatgacaacaacattgggagctagcgaaaatgtcctttttataacatgcatgtatgcatgactttaatgcggagattagttaaatcaccgatcgtctttaaccatatccaatgcgtgcatgaatttaatgcggagattagttagttaaatcaccgcttgtctttgctgaattaaagtaaaactatatttatttagggatggagggagtagttttcggtaataatccaatgtggtggttactccaattactcactccgtattcgtaaagaaagttgtttaggataatgttcaagtcaaaccttagaaatataaatcatgaataactctcaagctgttgagtttgaaaatataaaaattatatgaatagactttttttttgcaaaatactttcataaaaatatatcacttttaaataaatatttttataaaaacaagaagtcaaagttgtgttttggagaccgtgtcgctgtccaaaacgattttctttataagtacggagggagtatattagaaagatactacacggatagcaaagtgaaagtaggataaggctattcccaactcaatgactaggatgatgtccatattattaaataagctaccatctaagatgaaaaatgatgtggaagtgaatacgtgaggaaagagaaggaaaccatgacttgcatgagacatggtttctacacaacatataagacattatgtgagataagtagcattaaatttaagtatgtaatagtggtgtttgtattggaagagtagtgtctagtactagttttttgatgatgtagagtttatggaaactatgtctagttccttgggttgagaatggcctaattaactagttaggttttttttatggtataacctgttcactcaagttcaaacctcttcgacttaatatgggtagtcgtatttacggctaattattttttcaacggtagacaatatagccatctgtaatgaggtatatatggtgattttaccaatccctaaaagtactgaactaatctgttggaagtgtttataggagtatggtgaaatacgccctcagttttcaattgaataactattgccagaactactttaatggatcactcgtcttttataaaatgtacaaatatttctaattataaataacaatgatatcatattataaaaatgtattactaaggttttgcaagaccaaacaacgaatttattgcatccaaattaactcgatgatataaagtgaacgtagctcatatcagctagttaagtttcatacggtgaaactagctcatcaagtttttgtaaaatcaaaagtgtttttgattattattatgtgataaacaattggcatctgagattattggttttgaaatttggattattgtcgaagtggttttggagataattggatttacaggtgttaacaggtactgctgctgttttgatctggtcagactgggcaggtgctgccggtcggaccggcgtgtattgcgcggtcagactggctagcccgcggtctgatcggctaacattgtgtcggtttcggtttcagttgtttgtttggatatccgtgtttgtttcatgtttatggattctagacggatactatgcatatgtaatactgttgtttgctaacaatgagtcaagttggagatagcttggttttggaatatggtttctttgtttgattcatgtgtaggtgacttgatgcctcgggagagtatatccggtgatggatcggaagtcgacttggggataaggcgatgtctgtgacgatcatatatcatacgggatacttaggctaaagttcaatgcacgtgattggtgaagattccatatggcatacgacggaggtattgtgtgcgtatgggatgtggagtcgaatttggaaggagtccaaatttggtatggttagagtttgtaaagtttgtttcttgtgcgggaaggttttctaggtggattaggacttctagaatgagtttggttcgtggctttaggctgcctacctcatgtataaatagagagggagcgtgaggcttcccggtatcgcttttgagagcattgagttgatagtttagttagggtttcgagtttagtcgagatttttgtaaggagtactgttgttgcactttgtaaacatagagaggagcaataaagttgtcatctactttgagagttcttcgatttgtgttttctcgggttcggcgctctaaccggtgaaacaccgtcggtctaaccggctgcattgcggcggtcagactggcggcattgcggcggttagaccggcgtcggcgtcaggaggctgaggcgacttcggagcagtcagatcgggcaatctacatcggtcagaccggcggcacaggcgcggtcagaccgacgggactactctagtcagactgatctatatcgattcgagggtaacttttaattccgctaaaaaattatgttttttggtataccaaccattcacccccctctggttgtcttagttcttgtgtttcgatcctacagttttaaatcctgtaattattacagatgctcatatttacggctaattattatttagtggtaagtaacgtcaccgctaacagtgagatactcatgcttatagagataaagcttacatgtatatatgtttatacaaatgagtataagtatgttacgagcgtctatgtatgtttaagggttgtttctaacgagaaaagaaagtgactcaaaagatgagctggttgtacgtactaaggtctatgactgggcacgacattaattgcgtccaagatgatcctcatgtgggtgtgtcacacatttaattttttttagatatgttgttcattggttattgttagctaattattaattttgaatctcataattaaattagttagatagtatattctttcaagaatataaaccactaagaaaataaatatttagcaaaatgagtgtaactcaactggttatgtttcttacggtgaaactagtaaacacctcggtttaaatccgagacttgacacgagtcctcgtatttttatactatttcaaatgttagtagttgtggtgttcgttctgccacaccatccctacccactaacatttggtccccataatctatactattacatcacccctcaatgacaattattcaataacaaaaatcataaaaatacaacttggactaaatatgtgcttaattgacttagttagctagaaactcaatttgttttccgctgcaatgcacgagctcttccatagtatttctaattattctttaagtgctaggcaacatatctatcaataacaagatatctgccgtgacttgtcaatctcaatatacgtcgagcatgtttgtactgtgtctctaaaaaagaagatcaacatttataactttagtttaaccattaaactaacaacatacattagaattcctagtaatggtggataaaaagtaattagtcaaatatgtggttttatcagtttaacatatgagtatttatagtaatggtggataaaaaaaaggtaatttggaaccatgccattataattttttaaagtttgagatatgccatcggtatcacaatgacatgtaggacctacatgagtcaatgacatgtgggtcaggatggcatatatcaaattttgcaaaattataatggcatagttacaattttccctaaaaaaataattagccaaatatgtggttttattgcaagggaaggcttcatcaatctcaatatgtatcagctgcgttcgtactatgttttaaagaaagaaaatcaacatttataactttagtttaacaattaaactaacaacatactccctctattcccaattgataatcacatatatttttaggttattgtcaaatgatcaccatattagtattcgttctctaagtctattcgcataggagtaattaatggatattggtgcatatatccatgcacacaaccatttataaccaacatgcaatgttttggtttgttattggcataaggtaaacaatatatggctgagtaaggggacccatcccacatgacattgtaaaagaatgcaacatttaatagaaatgcaggatatttgtaaattgggtacaatatgatcaattgtaatgcatgactttccttgctcttgcactgatgagaccacagcaacgtcttcaagaaaccgcggatcgacgaaacggccgaaatctacgcgacaaacagagcacacaagcaaaacacactataagactactgaaacaggaaacaaaaccatttttaatggattctagggatttttatgaatttactgagacttgaatggacttaaacggagctcggatgaattacttatgaattttagaagataaactatgtttttactaataaagaaaagccttaataacttttattgcgtaatattacccagggctgatgtcagccgggggggctcggcaggtgggccccgcatgtcagcggcacaaggggagagggagggggtgccggcacgtgggccccacgggcaatggctaaaagggggggtggtccatcggctggtgggccccaccggggcagcggcacaaggcgggggagggggtgccggctgctggctcggcacggctcaagctggccggccatggcgtggcggcgacggcgcacgaccgccggcaacgacaagcggcggcgcgggaggcggcgcggacggcgcgaaaggtggcggcgtcggctgaatgcgacggcgcacacgcggagggtggcggcgctcatgggagggaggaaaggaagaaggagaggggatccctcaccgaggcgatgacggcgatcggcgcgggaagagacgagcggcggcggcggttcggagaacggtggacaaggtcaggcacaacctgggaaaggcgatgaccgggttaggagaagggaaggatgaccacggcgactagaacggccggccagagttgggcggaaatggagagctcaccggcgtgcgagggaggcggcgctttggcgacgtttggcggcaagcgagcggcggccgaggtgtgccgtggggagagcggcggagtgcacggcggaggccctagcggcgacggcgtgtggccggagatgggcggcggcggcggagctcgggtgtgccgtggggagagcggcggagtgcacgggcaagcgcggcaagagcgaaaaaaggtcgaggggggctcgagggagtgatttataggtacaggagggggcggacgtggcctgggaggtggccgatttggccggcgacgtggggtggagagagagagtgcggggtgggattcaaaatgaatctcgcccatttttgggcgcgtgcgagggcgggaggagcgggggaggggcggcgacgtgggcgcagggcgcggagtgggcacggggaggcgggaaaggcggcggtgtgggcggttgccgccggggtgcggtcggctggaggaaggggacgaccccgacaggtggggtccacctgtcggcgtcccggagggagggggaaggggaaacgggccggtccaacaaggagaggccgagcgcggggtaaggcgaggtggactgggccgatggcccaagaagagggaagatgaggaaaataaaagggaaaaaaatgaattccctgggatttaaaattgcactttggtgatttttaattggtaaaaattatttccaaggctctgaaaattccactaaaaatcctgttaatatattgcaacatggggaactcaagaaaaattccaccacgccatttccgattattaattgcattgattaattagggattcaactctaggttaattaaacaatttcttcgagcaatttatttaactaattttttttagcaagaaaagggggaaacttcagggcgtgacaatgtcgctcccgccatcgctgtttggcgctaccgcgcgagcagccgcgcgaacttcgccgccgctcggccatgcgtcgccgacagctcctctcgacgttttccccactgtcgctctcccagagaccccttcaacccccctcctttggccgccccgcctctttcctctagccgccggcctcccatccccttctatcgccgccgctctgcttccgccgctgccgcgcacaaccgcgcgccgtcgtcggccattccccgtcgattcctctcgcctccgccctcttggagctcccgtggccctccccgaaccgccgccttgaccgccggccttccttctcgtgcccgcgccgtgccaccca

SEQ ID NO: 8620 - DNA, 4418 bp, Oryza sativa
cgagcgggcaagaaaacgtgcgctctgcttgtcaaaggtcactcccggctgtagactagccctcattgtaaaaagcatgtttcctttcttaggcagctagaggcccatgtggtgacccctgaccagataaaaaggaggcccaggcctaagagagaaggaagaaagacggggggctagagcggaaactctgtctggctctccggcactctgtattccttcacacacagatccaccagaacacaggagtagggtgttacgcttctcagcggcccgaacctgtctacgtcgcccgtgtcttgtgcgcttcctttctcgctgacattcctcagatcgagggcgaagaatctcacttagcgcccccggccgaaccggcaaagggaggcctgcgcggtctcccggtgaggagccccacgctccgtcaatatcatattataaacataagattggaaacatccaaaatttgaccaaaaatttaaaatctgatatttcagaatttttgcccaaattttggaagtttttgtttcaggggtagtcatttggacaaaattgtacattactaatgaaagctaatcggatggcaatggtaaatcatagaagttaagtaaaagttgatggtatattatagaacgttataaagtcagtggcaaatcgtagacatgtgacaaactcggtgccatataatggattctctctatgttataccatgtccggggcatttcgttgctatgctggcagggagctgctaggggcaagctagtatagtgcaatgttccgtagcatccaagattccctcattatttatagcgtgtatatcaaactactagtatatatagcatgtgccgcatccataatacgcatgtaagaaatcaagctacaattcaagtttatgtgcagctagctagaccactaatgttaccatcatatattttttctagaatcttttactgaaatatatgaatagaggcgcagccactgtggtgggatggggtctggccttccccaacagcccagtaacaaccagcccctcctttcctacaccccaatagtttacttttgcttttaaatactaccttttatcaacatataagtaaaaataaccatgtactattttctttttaaaatatatgacaccgttaacttttcgcataacgtttgatcattaatcttatttaacaatttagtataaatatgtaaaagtataagttaagattatattttatttgatgataaaacaagtcataataaaataaatgatatatatatataataaaacaaaatagtcaaacattatgtgaaaagtcaatagcatcatacatttttaaatggaatatattttttatatcattagttgtctaacacttcaaaggtataatttcacctctccaattaaatttcaatttttctaaaatattagttaatacttgcatgaagatgcgtatatagtttgtttctcattttactaaaatatagttttttttggattgcttgtcaatttatttggaattttagctcggatgatactatcaccgcttatgattgtctgcttaatactcataggctaaattgaaatgaataaatatattcggtatatcaacatacctaccttttttattatcatgtgctattttttagttgatacgatatattacgtacctttgggaaacattacgtatattttttacactatatttttaataatcataatcgctttgtgaagttcgtcttcctcgtatctaaatcctagcttcactacgttgcatgtacaaaatgaggggacgtacccttaactttaatgaacaaaacgacattttacgaactactgagctacgagcaaagacactccacgaaatcgaaatgttaacttatatattttttttttttgaaaactagagggtgcatgcagcggtcgaagatgtagtttttgctagtctcattatagtctcttacactcattatagtctcagttcttcacaatatatattgattactattgaattatattcccaggtttcggaggacccaaacttggtaaaccgaatcgttgcatatttgaaggagcttcagtttccgatatgcttagaggtaccgagttctactccttctccagacgaaacagaagatgccgacaccgtgttcgatggcctcattgaagaggaccagatggtcatactccagggagaagacgagctaggcgacgtcgtcgtcgctgagtgcgagaccaacggcgccaaccccgaaacgatcaccatggagaccgacgagttctacagcctctgcgaggagctggacctggacctcggttcttatcagctagtcccgacgtcggcacgggagacggtggctgcggcggcggcggcggctaacgatgtcgacggcgttgcatactctcacgcctcgtgtttcgtgtcatggaaaagagcgaacccggcggagaaggtggtggccgtgccgatgactgcaggcatagagtcacagaagttgctgaagaaagctgtaggcggcggcaccgcatggatgagtaatattgatgatcgtggtagcgtggcaataacgacgactccaggaagtaacatcaagagccatgtcatgtcagagagaaggcgccgagagaagctcaacgagatgttcctcattctgaagtcactactcccctccgtccgcaaggttagttaacttagcgttccatactgaaagttatataggagtagtattattcatcgagctgtggattgtccctgcaggttgacaaggcatccatacttgcagaaacgataacctacctcaaagtgttagagaaaagagtgaaagagctggagtccagcagcagggagccatcgcgttggcggccaaccgaaattggacaggggaaggcgccgtaagatcaccgggaaggaggtctatgagatcggtgtcagtggtggtacctcgtcggtacctcgtcaacaccgtacgtatatgatatgcatgtataagatcaccgggcaggaggtctctgagatggatgtcatacggtgttgacgaggtaccgtacgtatgatatatagttatcgttttcattatggaaaaaaaattccgaattacctcgtgtactataaaagacgcgaatattagggaagaatctaatatcaaataattagaaggggtgaggtttcgaatccaggtcgtctatcacaccaccttgtgaagctagccggaaaacccttaagcgtttctctacctccatgtactattggtgccatctgaattaccgcttactaatagactcgattctctccacacaagctcaatatgatttcagcacatctgctaggttttgtcccttttattaacgtctattatagctagggatgcatttacgagtgcatgcatgtgtaaacatcttttatataattgcaaatagaagaataaattccataaaactatagactgcgaataaagtatcgcaagttcacataattaagatgatgcatcacttttattacagatcgaactacatatataagatggagtgttagaaagctacagatttaataataaaattaccatgaaactacaacatttataaatccaacataacaatgcttttatatttaaactctaaaatatatagttttgtgataacttaattattaaatgtgtagttttgtgatactccgccaatttgatatatagtttcatgataaatttatactaagatgatacactgtctcaaatatatatttttctataaaataattttagtttcttaaattttacctattttaaataatataatggctatatcagttcttggagacaaaaggaaaaagccaggaaactcaagttggaaaagacctcacattttcataatctaggaaaagacctcacatctattatataattaaaggaatataaaaggaaacctccacgttcgctctcatggcctagaaattctcacattaatcggagaaaaagaaaaaacagagtccatatagaaatacaatttagaaatagctgaaattcggaattaaaaaataaggaatattagaagaggagactagagtccatatagaaatacactttagaaatagttgaaattcggaattaaaaaataagaaatattagaagtagagtatagagtccatataggaatttaaaactaactaaaattcgaaaaaaaagagcctccacgttcgctctcatgacctagaaattctcacattagtcggagaaaaagaaaaagcagagtccatatagaaatataatttagaaatagctgaaattcggaattaaaaaataggaatattagaagaggagactagagtccatatagaaatacaatttagaaatagctgaaattcggaattaaaaaataggaatattagaagaggagactagagtccatatagaaatcctatttagaaatagctgaaattcgg

SEQ ID NO: 8621 - DNA, 17170 bp, Oryza sativa
acggggccgggggccgtcgtaggcgatttcaacctcattctcgaagctcaggataaaaacaaccttaatctcaatcgtcgtatgatgggtcgttttcgtcggctcatcgacgagttggaactccgggagctgccgcttgacggacgtcgcttcacttggagcaatgagcgtgagtcgcccacgcttgttaagctcgaccgcgtcctcttctctgcggattgggaagagcttttcccctcttgcctcctccaagcggcctcttctatcgcctctgatcactgtgctcttctccttcatacctgcgtcacctccccgaaagcgcatcgttttcgttttgaggccttttggcccaagttcgacggctttcttcaagtcgtgtaggacgcctggcatccccctgccaacctaccccctcttgccgctcttgcttggtgcttctctaccatggccaagcgcttacagagctggagtgaccgtcacattggcagtgttcgtctgcagcttcagatggcgaaggaacttgtcttccggcttgatgttgcgcaggagagtcggtctctttcccccttggaaacctggctgcggcgagatttaaagttgaagtgtcttggtcttgcctcgcttgagcgtactatcgcgcgtcagcgttcgcgtttggtctggcttaaggagggtgacgccaataccaagttcttccacctgcacgccagagctcgtaggcggaagaacttcatcacgcgcctttatgatggtgaccagcttgccgtctcccatgatgcgctgcaagagcttgcctcctctcacttttgcgccatcttggggacgagcgtcgagcgtgaactcgccctagacctccactctcttggcctccgccctgcgtagcttgaggggctggactgtcccttcacagaggatgaggtctgggcggtgatcaagtccttgccctctgataaggcgcccggtcctgacggttttacgggccgtttctacaagtcttgctggccggtgatcaaggtcgaaattctggcggctcttaactccttgttcctgaccaacggccaaggtttcgcttccctcaacgacgccctaatctccctcttgccgaagaaggacgaggctgttgacgttaaggatttcaggccgattagccttattcacagctttgggaagctgttctccaagatcttggcctctcgtctctctcctcgcctggacgagcttgtggcgcctaatcagagcgctttcatcaagggccgctctctccatgacaactttcgctatgtccagcttgcggcaagggcgctccacgccaaacgcgttccccgacttcttctcaaggtggatatcgcgaaggcctttgacacggtcagctggcctttcttgcttgaggtgctagcccagcttggcttcagtcaacgttggcgtgattggatctccctcattctcagtgcctcctcttcccgggtgctggttaatggggtgccaggtccacggttcccccatcggagaggtcttcgccaaggagatcctctttcccccatgcttttcattctagtcatggatgtgctcaatgcgatgctccgcaaagcctctgactcgggtggttttcttcccctcaatgatcgttctattcgacatcgtgcatccctctacgccgatgatctagttctcttcctttcccccgttcggcaagaccttgagttcatccaaggcatcctctctgtcttcggtgccgcttccgggcttcggaccaacttcaccaagtgctcgattactccgatccgctgctcggttcttgacctggagctggttcagtcctcttttccttgctcgatctcggagtttccctgcacctacctcggcattccactgtcagttcgcaagctgccaaaagcggccctgcaaccgcttgtggataaagtctcccattggctccccccctggaagggctgtctaaccactctggcgggtcgctcggttctagtccagtcggttctctcttccattccggtccatgtttctatggcgatcggcttgccaagctgggttatcaaagccattgacaagaagcgtcgcgccttcttgtggacaggtacggactcggccaatgggggacagtgccgggtgtcctggacgagggtttgtcgtcctagggatctcggtggactgggcattccggatctcagggtggctggctttgccttgagagttcgctggctctggcttcagcgctcgggacacccctactggtctgatctgaaggcccctgttgagcggagcgtctccgacatgttcgtagcatccaccttctctatcctgggagatggtcagtccacgctcttctggactgatcggtggatcgatggtcgctcgatagcttctatagctcctgacctcctccacgtcgtgcctccacgcttccggggatcgcgcacagttgctgctgggttagcgaacaactcctgggttggtgacatacgtggcgccctcactgtcccggtcatctctcagttcctgttagtctgggacgcggtggttcctacccagctctcgccgggtgttgaggatcacctcgtctggcgttggacgggtgaccagtgctactcagcgtgatcagcgtatcaggcgttcttccttggccagcactcttttgcctgtgccgacttactctggcacgcgaagggccctgctaaatgcaagttcttcctttggtttgcatttcagcagcgctgctggactgccgatcttctccaaaagcgtggtatcgatagccactctgcttgccccttttgcgctcaggagcttgagacagcgaaccacatcctcatcgattgcgtgttcgctcggcaggtctggctccgtgtgttgtcccctcctggctgggctgccctctctccccctcgtggcagctggctccaggattggttgtcatcctccagggtatgtttacctgagcaccttcgcagcggcttcgactccttggtactcctagtctcctggcagctgtggaaggaacgaaactccagggttttcgactctgcgctcgcttcggtcgcagtggttctagagtccttccgctcggagggccagctgtggtctttagccggtgttacttgttttggggatttcttgggagtgaagcgtggctctgccccctcccgctgtttggagttgcgtttttaaccgtcgtagtagttcctagcttcaagtccccccctttagacataagccagtctagctgattgctttgtgtaacaaaaactcttttcctgctaatattttgacgtgcaatccttttgcgcgttcgcaaaaaagtttccacttgtgcatgccatatatactccatactagtataactaaacatgcatcagtgatcagtcaggtctgcatctataattatatttcacttcattttgaattaaagatcacaaatgaacctatatgttactccaactattttcaggttatgagacgttttgactttggtcaaaatcaagctgttttaagcttgaccaagtttatagaaaaaaataataataacattttcaacccaaaacaaatttattataaaaataaattattattgatttgatgaaaataatttagtattataaatattactatattggtttacaaacttagtcaaacttagagcagtttgacttttaaagtcaaaacatcttataacctgaaacggagagagtatttaattaattcccgtattacgtaggacactatcatactatgtccatcgtattaattcatacaatatgtataaaacactacatgtagagttctgacttggaacgatggattctacaacggcgaggtaaagacgaggaagatatccaacttagaggacctcaccgctgaccagctcgtcctgcggagaagcgagcaactgagcgagctctactactctctcctgtccggcgagtgcgaccaccgggcaaggaagcccgtcgccgcactgtcgccggaagatatcgcggacacagaatggtactacgttgtctgcatgacctacgcctttcgacccggccaagggtgcgtatctcatctgctaattgctgccagccaacgcacacatgcatgatgagatgatccgttgatctgccctacacatatgactgatcacttgtcggttgatctgctagcaactccaataatacgtttataaaaaaaaaactccaataatactccgtaggagagaacacaaagcttatagctgggtataagctcagtgacgcagtcagaaagatttttaagcccgaacaaattttgatataactagtatttgctattaaaaattttatttactcattaatattgaaatttaatgtagttttcaccagtgagtccgggaagctgcccaggctagccgggcggtggcttcgccactgcagcctagcaatgttcataggcggatctaagggtggttccggtgatttcgggaccacccaaaaaaattcagcccaatgtatatatatacatatgtgaaaaataaacttttgaaaaaaaaactcatttcatcaatctatacttttaactttattgtatttaaggtattttaaaaaattatataaattagatcacctatataaagatacgtcacttcaccactggcaatgtctctcatgagtcccatgttgacaagaatttgctttaccgtgttgttgttattgatctgctggggtacattctgccaggttacccggcagaagctatgcaagcaatcgatctgtttggttgtgcaatgctcagtctgcagatagcaaaacctttctacgtgcgctcttagcgaaggtacatatatatttcccatgctgtgctagctgctcatggcatcgtcccttatgcctccaaagaatataatgttcagttcccgagaaaaaaaggataatgttcatgcattctccttgatctaatcatcatatttagttgttatttatctccctgtcatgtcatgatctaactcgcatgctctctctctctctctgtgtggtccaactccgtccactaataatatcgtatgcaaagagcgcgtctattcaggtatgtaggtacagttgtacatagtacggagtatttcagttttcaaattgatgtatactgtacgtgtacgtcgatatctctgactccatctgaaatatctatacattttacagacaattgtctgcatccccttcatgagtggcgtgcttgagctgggaaccactgatccggtaagttcattggatcactcagcacgaaaaactatggacctatatatatgtagctagctcaatcgcctagtgatgatcgaccaacataagagtatactagtatgttataacagagtatcacatgcttggtatatgttatagagagaacctattatatgtcctgagtttatcacaggtctacgatttgtcattgattttgtcacgttctataatatgctatcgattttgcttaacttttatgatttaccataaccgtcagtttaaccttcgtttgtattgtatttttttcaaaatatgataaaaattgtaaaatatctgtcggtgacatgggaccgggggtatcgtgactagaggcttgggcagccgcggtcacccacgtggcctgaccccctcgggggggtgggggggcgggcccgagggtgacgtggccacccctccctctgtctccccgaggggtcgggccgctcccgtttcggccccgagggttggggcgccccgaccccctgtggtattggtgccacgtgtgtgggttaggtgggcacaacggcgctcacctaaccgcatttatagcggattggacgagcgcgtcacgccgcatttaatgcggcgcagcgcacgtttatccggtccgtgaccagtcgcggtgtgtgaccggtcacagaccggtcagatcgcgggttaggtggcaacaggcggcctgtcacacgcctcgccccgtcccgtcggaatgatgagagcttcctggctctcgtccctagccggagccggcgtgctaactcctggagttggtatgtcagtcccggtcagattcattccaggcttcagcgcaagtatggcaaggaagtcgccggccattaaatgaagtttgaaatgggcgtcctccgggaaagctgacgagcggggcaggagacgtgcgctctgcttgtcaaaggtcacttccggctgtagactagccctcattgtaaaaagcatgtttcctttcttaggcagctagaggcccatgtggtgacccctgaccagataaaaaggaggcccaggcctaagagagaagggaggaagacggggggctagagcggaaactctgtctggctctccggcactctgtattccttcacacacagatccaccagaacacaggagtagggtgttacgcttctcagcggcccgaacctgtctacgtcgcccgtgtcttgtgcgcttcctttctcgctgacattccttagatcgagggcgaagaatctcacttagcgcccccggccgaaccggcaaagggaggcctgcgcggtctcccggtgaggagccccacgctccgtcatctggcgcgccaggtagggggcgcgcgtgtctttctaagccctcgtcctctttcgtgtgcgccaagcttctcccgctcagcccaatggccgaacgggcagtggcgcatagcctctctccgaacgctagcggcgacgacggggagcagaacccacgccgtcgggctcgcaccccaccgtccccctctcgtcgaaatcttgggcggggggaggcgctcggggaggtcggaggatccgcgacttcgccgcccgcgggcgacgggggaggacggcgagacggggcgcgtcgccgcctcgtctacggcgatggcggcacgccccagggcgcgctccaggctgcgggcgcgctcctgcgtcacccgcccgtcgtccccgatccagagactccagcccggcgttggctggatgacgtggccgacttggtcatgacggcgcagcagagcctaggcgccggcgggaggtcctccgccaccgaggcctctggcgctgccgccgccggctccacgtcgtcgaggcggagggcgcggcgagcggcggccgttacccgccgttcgtccgccattccctcatcaacgcctccgacccaagaagatgtgcgtggggggtcggatgcccgcctcgatatcgagcaccggcgcgacgctcgtcgcgccgcccacgcaacggagggcgcttcctcgtccggagcgccacttcggtccgggcacgggggccggccccccgtgtccccggttggcggtgccggctgtcgagcctttgtggcgagccttcggaacgtccgttggcccccaaggttccggcccaccatcaccgaaaaatacgacggaagcgtcaaccccgccgagtttctccagatctacacgaccgggatcgaggccgccgggggtgacgacagggtcatggcgaatttcttccccatggccctgaagggtcaggcgcggggttggctaatgaacttgccacccgcgtcggtccactcttgagaggatctgtaccagcagttcaccacgaacttccagagcacatatccacgcccaggcgaagaagcggacttgcacgcggtacagcgaagggacgatgagtctcttcgctcgtacattcagcggttctgtcaagtccgcaacaccataccgtgcatccctgcacacgcggtgatctacgcgttcagggggggcgtgcggcacaaccgcatgctcgagaagattgccttcaaggagccccagaccaccgcgcagctttttgagctcgcggaccgtgtggctcgcagggaggaggcctggacctggaactcctccggttctggtgtggcagctccggccgtccccgggtccgccgctcggtcagggcggcgggacaggaggaggaagaaggggtcggcccgttccgacgacgagggtcatgtcctcgccatcgagggtgcttcgcgggccccccgaaaggggaggccagcgagcgacaaaaagaaggaggccggcgctcccagcagggagcgcccgaccggcaagtggtgtaccgtgcacaacacctccctccacgacctcgcggactgccgcgcggtcaaaagtttggctgagcggacgaggaagtgggaggaggagaagaggcaggagcgccgtgagggcaaggccccggcggctcccgccggcaaccggcgaggtgagaccaagcagaaggccaccgccgaggacatcgacgatggtgacgatgacctggggttccaggagcccgaggccaccgtcgccaccgtcgatgggggagcgtgcgctcacgcttctcgccggagcctcaagtccatgaagcgcgagcttctggccgcggcccctacccatgaggcgacgcggcgggcgcggtggtcggaggttgccctcaccttcgaccaaaccgaccacccgccgtgcgttgcccggggaggacagatcgcgatggtggtttcccccaccgtttgcaatgtcaagttggggcgtgtcctcatagacgggggtgcagccctcaacatcctttcccccgcagcctttgacgccatcaaggccccgaggatggtgctccggctgtcccagccgatcatcggtgtgacgccggggcacacctggccgctgggtcatatcgacctcccggtcaccttcggtagttccgccaacttccgcacggatcgggtggacttcgatgtggtggacctcagtctgccctacaacgcggtcctggggaggcccgcgttggtgaagttcatggcggcggtccactacgcctatctccagatgaagatgccgggccccggtggccccatcaccgtccatggcgacctcaaagtcgcgcttgcttgtatggagcaacgcgcggaccacctcgccgcggcgtccaagcccgcgggtggcgacgagaggctcagcacctccgtcccggccgccccaaggcagcggatggtcacgtgcgacgaggtcccggtcaaggaggttgccctgggcgacgtcccgtccaagaccacacgaatcggtggtcttctggacgacaaataggaagacgcgctcgtctccttcctgcgggcaaacgccgacgtcttcgcctggagaccggcggacatgcccggggtccctagggaggtgattgagcaccgtctcgccgtgcggccgggcgcaaggccggtccggcagaaagtgcggcggcaggccccggaacgtcaagccttcatccgtgaggaggtggcgcgacttctggaggccggattcatccgtgaggtcatccatccggagtggctggcgaacccggtcgtcgttcccaaggcgaatggcaagcttcggatgtgcatcgactacaccgaccttaacaaggcatgtcctaaggacccttaccccctgccacgcatagatcagattgtcgactccaccgcggggtgcgaccttttgtgttttctagatgcatactctggttatcatcagattcgcatggctagggaggatgaggaaaaaactgcattcattacccccataggaacttattgttatacgacaatgcctttcgggctaaagaatgcaggtcctacttttcaacttactactcgaatttctttgggtagccagataggacgcaatgttgaggcctatgttgatgacttggttgtgaagacgtgcaaccaagagaccttactctcggatctagcggaaactttcgaaagtctccgctccgcccgcataaagctgaaccccgataagtgcgtgttcggcgtgcctgcgggcaagcttctcgggttcttggtctctgcccgaggcatcgaggccaaccccgagaagatacgagctatagagcggatgcgcccccccagcaagcttagggatgtgcagtgcgtcaccggctgcatggccgccctaagtcggttcatatcaaggctgggagagaaggcagtacccctatttaagctcctcaaacgctccgggccgtttacctggacggaggaggctgagcgggccctcactcagttgaaggcgtacctcagttctcccccagtcctggtcgccccggagccagatgagccgttgctactctacctggcggcaaccccgcaggtggtcagtgcggcgttggtcgtggagcgcgacgaggacaaccctcactccgcgcatgcctaccctgtgtcgactcgacccgggagagagcagggaggagaggcccccgagccgaacggtggcccaaggcccccgacggccggagttggccctccgcctgcttgtccgacggtgccaggcgcccccgacccccaggatggccccggggccactgcgggaaggccgcgcctgtcgccctccgaccccgaggtcgtcggcacagaagccgagtgcgccccgcgcggcctcttggaccaagagcgccatggagatgcggcccctggcgaagaggatcggccccgccgaaaggtgcagcggcccgtctacttcgttagcgaggctcttcgggacgccaagacccgataccctcaggcccagaagatgctttacgctattctgatggcttcgaggaagttgcgccattatttccaggcgcatcgggtcacggtggttacgtcgtaccccctcggccaaatcttgcataaccgagagggtactggacgggtggtgaaatgggcaatcgaactctctgaattcgatctgcgctttgaaccacgccacgcgatcaagagccaggccctcgccgactttgtagcggagtggaccccagctcccgagcccgtctccgcccccgaggccagctcgggcccctcgcagttgcctcacaccgccttctgggtgatgcagttcgacggctccctgtctcttcagggcgccggtgcgggggtcacgttgacctcgccgagcggagacgtcctcagatagctggtccgcctcgactttcgggcgaccaacaatatggcggagtacgagggactccttgcgggactcagagtggcagctggactggggatccgccgcctcctggtgttaggcgactcccagttggtcgttaaccaggtctgtaaggagtaccggtgctctgacccgcagatggacgcttacgtgcgccaggttcggcgtatggagcgccatttcgacgggatagagcttcggcacgtgcccagacgggataacgcggtcgccgacgaactctcaaggctcgcttcctcacgagcccagaccccaccgggcgcctttgaagaaaggcttgcccagccgtcggcgcgacccgaccccctaggggagacggacgcgcctgaacggcccctgaggcccgtcggagtctaggcctcgggacccgaggggagcgctcccagctcccctagattgattgcttggatcactgagatccaggcgtacctcgcagataagactctacccgaggaccgcgaagggagtgaacgcgtccggcgcatctccaagcgctacgtgctggtggaagggaccctctatcggcgcgcggctaacggagtcctcctgaagtgcattcctcgggaacaaggcgtcgagcttctcgccgatgtccatgaaggcgagtgcggagcccactccgcctcacgcaccttggttggcaaggcctttcgccagggtttctattggccgacggctctcaacgatgcggtcgacctggtccggcggtgcagggcgtgccagttccacgctaggcaaacccatcagccggcccaggccctgcagaccatacctctttcgtggccgtttgctgtctgggggctcgatatccttggtccgttcaggcggaccccgggcggtttcgagtatctgtatgtcgctgtcgacaagttcactaagtggcccgaggcttatccggtcatcaagatcgataagcactccgcgcttaaattcatcaggggcatcactgctcggtttggggtgcctaaccgtatcattacggataacggcacccagttcactagtgaactcttcggtgactactgcgaagacatgggcatcaagctctgtttcgcctcccccgcccaccccagaagcaacggccaagtggagcgcgccaacgcggaaatcctcaagggcctcaaaaccaagaccttcaacatcctcaagaagcacggctactcgtggatcgaggagctgccagcggtgctctaggcaaaccgaaccacgccaagccgagcaaccggggaaacgcctttcttccttgtctacggcgcggaggcggtcctcccatctgagctcaccctgaggtcccctcgggtcaccatgtattgcgaggctgatcaagatcagcttcgccgagacgacctcgactatttggaagagcgaaggcggcgcgcggccctccgagccgcgcgctaccagcagagcctgcggcgctaccatcagcgccacgtccgggcccgatcactctgcgtcgacgacctcgtcctacgccgcgtccaaacgcgtgctggactgagcaagctctcaccaatgtgggagggtccgtatcgagtgatcggcgtcccccggccgggctccgttcggctggccacgggcgacggcacagagctgcctaacccgtggaacatcgaacaccttcgtcgcttctactcctagtgggggtcgggtgttatgtctcgggctcgggccaaccccgcgcctcccctgggcgtgcagggttggccgggggctaccacatgcatatacttatcttttttctcttccgtatttcaataaaagcattttcgatttcctgaggactgtgtctgtgccatcgtttccttttgaagaatcttggcttgaattagcacgctcgtgctcgaccctgccctcggtggcccgggccggctaaaatcgccaaacggggcccagaaccgagccgtgccccggggcgtggtgaactccgggggggaatcggcaaaggcccacaatcgggtcatccataaccctcggtcaccgcgctcccggcctggccagtctcgacacgtggatctccccaggcactagccccgacccgcaccgtttgaggctgggacctgggcacgagcccttgttcaagctaagacacagaaggaccgtggcacagaccatcctcgtctcaaacacacaacaaacagaactgacgcagaaatttcctccttacttgattacagattaaatcagtctatacaagaagggggcccgaaggcctcggaagaagaaggaaaagttattaagattggcgggggcctgggggctcactccgacgcgcccgggtcgccggcctcgtcgtcgctgtcgtccgcaccgtcgtcaccaccctcctcgtcggagtcgagggcgaacgcgagccgaggggccgtaccctcgaagctgtggacgatgtgatcggcggcgtcccggacctgcgcgcgcgcgccgtcctcggttccgggagggaactcttacagcgctgcccacggagagaagtcagggtccctggcctggtagcttgccagtacgagctccaccgccccccgggcgaggtccctcgtggataacttgatcgtctcctcgagctcctcggggagccgctggagggtcccggccatctctgagaggcgctgggcgaggcccccctggttggcggcgtacttcgcggtccgcccgccctagaggcccgcctgccgcccggcgcggtctagacgggagacggcgtcccgaagcatgccgggtcctacctcgctcaccaaacggagggcctcgacctccctggcggacgagtccagtgcgccctgcagcccggcgatggtgtgttcggcggctgcgaggcgggcggctaggtcgccgtcgcccgcggccgccccgccgctgtgcgctctcgcgtccagctccttcgcccgcgcctcgagctcagcggcccgctgatccagtgcggccctctcggcatgggcgccttccagattgcggcgcgcctgctcctcccgcgctgcttcgcggaggaacaggctgtccgccagccactgcgccgcggcctcggcctcctcgagagctcgctcccgctcggtgagcgcgtcctcgcggaggcggagtgcggactcctcttcggcgcaggcggcctcgtgcgccgccagtgttgcctcccgggtggcgacggcggcctcgcggtccgccaggtctttctccttcgtgtccagggcgcgggcgcgcttctccagcgccgtggcgcgagcctcaagggcctcttcgcgctgccgggacgccgcctcgatctccgccgcccgccgttcccgggcagcggcggcgtcaaggactccccgggcggcgtcgagcttcttctctagctccgccgcccggctcccgtattggaggcggaggtcgtcccgcacctcgtcgagcacggcgatggcgatgagggcagtctcccgctcctcctccacctccctggcgatctccgccaggtccctacgacgggccttgagctcggaggcgtgccggcggtgtgccttgcggcccgcctccaccatggcctccaccgagcgccgcccctcctcgacgcgcgcccacgccgcgtcgagctccgcccgctctgcctgcagggcctccatctgggcacttaacccgtccagcaccgtggtgttcgcggcggctaaggcctgcaggaggggctccgcactcagtggggcaacggaaggcagaggggagagccgcctcggtgtgggtgccgcgcggctcggcccgccgatcgacgtgccggacccaggggtgtcccccgaagctggctcgtcccaagcatcgcccgaggggtcgggcccgagcggcgcgtccgcggcctcgtcgtgggtggcctcggaagtcgtcgtcgcctcgggcggagtcgggtcgggggcttggcaggccgcctggcgtgcacgcgccgtctcctcctcccggacggactccccggcccggcggagtctggcctcctcccgagcggcctcctcagcctggcgaacccggacggcctcctgggcagcctcctcggcttcccggaggcggtccgcggcttctcgccggtcagcttcccgcctccgggcctccgcgatcgccgtctcctcggcctcggaccggccggacttggaatggcgggggggggggggcgacgggatctcgctgaggcagaagaaaaaccagaagacaaaaagaaacgggtgagtgaaaactcgccttgggagatgggagaatgaacacggccgcggtgggcgcggggacgaacctgcggggaggtcggctaaacgaccacctcgggagcgagatgaggttcccccggcatggctcggtcccccccatcttgcggagccgtttcttctttcgctccccctcaggctgtggcgtcggcacggcaccctccgggcgcctgctgctggcacgcaccgcctcgccctctcggggaggagatgggggggtcgtgccctcctgcttcctcttcccccgggcgtcggcagggcggctgccccccgggcccccgtcgcggggcccagaagcatgaccccctcccagggtagattgtttccccctgcggctcccgcccacgccatcgtggcctcgggggggccgctcccccgacgccccgaccgcctgcatgatggtcaggatgttggcgcgatctggatcgctgcagagggggaggacaccttgggggataagggatgcctccacggagctgagattcagcacccgttggaccaccatcctgaagtcctcagggacccagtcccatttgcgcccctggtgggtcctcatgtagtcctcgggcccggtgtactcccaggcgccccgggcgcgccgctggagcggcgcgatctggcgacgaaggtagtcgccgaacaccatggcccccgtgagcccctgggatcgcagacccgccaggcggtcaagaacggcgtcgtagccgtctcccagatctaccgtcgcccgccagctggaggcctgcgccgggggctggctcggaagtcggaggcgcgcttcgtcggcgaggggggtgtagaaccaatcgctcttccagtcgtcccacttcttgcggaggacgcagggaatgtagcggtgcagcacctgcccccgcggctggaagtagcagccaccgactaccgtcggcggcgacaccagctgtacggtgaagaaccactggaacagccggagagatgggcgcaccccgataaacatctcgcacaggtgcgcgaagatggccaacgtcattattgcgttgggggtgaggtgcgccatctggagatcataaaactccagaacatccatgaagaaattagagaatggcgggaccagcccggccattgcgaaagagaggaagaagacggaccgccccgggtagtgtggcaccgggcgtccctcgcccagctcgaccacctcccggccggtggcagattccggcatgaatcggcgcggcaacccggcctgcctctcgctcacgatgcgggaaggcggcagcacgctaccgtcgagcggtgcggagccccgtgccatgacgccggcggaggaggagcttgagagcgagcaagtgcggcgagggtagggcacaggaaacgaagagttagagcgcaagtggcgaaggcaaggggaatagtggcgagaggaaggaaacgaatctcttcctcggcgtctttatacccttgccaacgctatgcccggctcctcgcttcccgcgcccactatctcgccccctcgtttctcgcgcccacgcctccactaatcccactcgcccctttgcagcgcacgcggcagatgtgcggccgtggcggttgagatgggacagatcgtgcgcgcattaactacgttcgccaaccgagaagagcgccatcatcatgtctccaggcgaaacgaaccggctcgtcccgattcgcgcgctgctcgagtaatgtagcggtcttgaagagaccgctcattattgtcggtcggtttttcccttgccgatgcgcgcgatttgcgaccgctgggtttctgcccgcctgtagagaccggccccgcctgtcaccaggcctaaggagtggcgtcacgcccgagcgcttccctcgaggggggtgatcgccctggcgtaacgccggcggctactgtcggtgatatgggaccgggggtatcgtgactagaggcttgggcagccgcggtcacccacgtggcctgaccccctcgggggggtgggggggcgggcccgagggtgacgtggccacccctccctctgtctccccgaggg

SEQ ID NO: 8622 - DNA, 46809 bp, Oryza sativa
taaccgaatgcagtttggtgtaccagaagagagctcattgggtcagtattggcatccccatttgaatgatgttttattgttttgtttcacaataaattatcatggagacttagatttattttcttaacataatcaaatattggtgtcatcaggtgatggtttaggggaaggttatggcatgcttggacaggcaggaagtggaaagctacgcgtgtcaactgcaccaagcaaactttctgcaaaaattaccaagaagtacgcaattttgcttctctttgttacctgtcatcttgttttagaatataaaacaaacacttcaagaacatgaaatacattcagtgtgattgcatgatagaagttgcagtaacccataggcactgttagtgttacgcctgctaccataatgcctctaattctctttacgtaatctgccaaaataccaatattttgaatattatccccttgattctgtattgctgtctgatatcagattcaaggagaagagctatggtagcagtggtgcaacatcggggctgacttctagtttggcgtttacaccagttcaggtaaattaaagattttttagctgtctcgtttgcttcaaagataaataaacggtatgcttaatctttagttgttttgacttgggtcatggaaaaggtagtacatgtaatttttgtttatcaatagcttcaccagtagaactcttctaaattaggtgtattctgctatgctgctggttattgcacagcttcgtggattttatgttgctattcttgtacggtaagttgggtactgcacaccattgcatggttggttttgtcttgaaatctgacgctgtatgttttgtaggctaatatcagagttgatatgcgcctgcattgtaacatatttgcaattacatcgattagtatttttaatgtaacttttcttttcatagttaactgcgtaggagtcctctcgtcattttgtttttctaatgctctattatttgttttatcgtccaggggatagagttgtcaaatccacaggcccacggcaacctgcttggaagtggaactcagagcacctatttttcagagaccgggacgttctcgaagatcaaaaggacctgagctgataagcaaaagtttcttcttcccatcagcccacagacccgtcataatcctcaggatgcaccgatgaatccattttgtaatgtactccaccttatacccgaattcagcagactttcgtggtgctgtttgcaatctctagaagttcgctaacttccatacggttcaagttaattcgacatgctgcgtttgatctgatgccgtctttgcgttcaacacaatttactgtttttggtaggtgattatcttatctgtcatctcatctttaaagtgtaatccctcttgtttcttacaaggtgctagttttgcgtctagaatttctgaaacaaagataagcatcagttggtgttcccaacttcccaatgttcccatcagtccgctatcaaggcagcgtacacgcaagtggattttacataaaatctttgaccaattaacggcgaatagtctcagcataacctctatgtgatggttgcatccgtatactcaaaacatagccaaatgccaaaatttacatgtacaaaaatggggttgctcacactggttcaccctacagagaattgtaagacagaaaactgtctgaaccgagcaaccaaaaatggatacaacgctgcaaacaatgtaaaatgactattcacccattctacaaaaagaaaaaccatcgggatttttacagggctactcgataaagttcgtttactcagcagttcgctgaataatatgatctgctggatatggtgtacgacctagcctttgctcagcctaactcgcaggtcctattacttatccactttgtacagatagtacatctcgagccatcgattcattatgctaacacgaacagaaaatgatctttaagctagtaatgatttaccaaaataaatgctttttgctcatgactgaagaagcccgtcaccttcccaaccaagacgtaacatctgatccactaccttcaagctcaactgcaacattaccagctctattagaacgaaggttaagtggcaacgtaagtactttatggaaaagcaagtgctaaatggattttgatacatcaggaatttatggtactcacagcaggatcagtgaacactattagctgcttatcagcagtagacagtagaagatttgtgttctctttgtttagagcgattgctgtgacgtcctggcctttccccagctccattgtatgaaatacctgccagtaaaatatttctggtaaggttaccacaaatgaaaaataagccccccccttttttttttgcttgtgacactaaccttaagtttatgcagatcaacaaagcatacagaaggcacatgaacagattgcctagtttcagcttgtttagatatgccatccttgccatttggttcattaggttcatgatccccagtctcagtactgtcctcacacttataattgcttgaagaacatgttcccattaaggcgaaatggccatcagtagaaatctcaatgcaactaacccgtccacaaaaaggtgatagaactgtggtagcaatagggagtccattgacagtgaatgtagatagtcttttctttgattcattccaaaccagaatgaccccttgagaagataagcatacagcatgtgcctccgctacattaagcttccttatcagacgaccagtcctcaaagaatgtagaagaacacctgacatgtttgatgaggatacaacaagtcccaagtcaggactgactgaacagctagtcacttcctcaagatgtcctctcaatacatgcataggaccttcaattcgacgcctcctgatttctgtaaggttgctcacactaggactgcgtggtgttgtcggagttgttggtggaggctcaggggcatttttcttatgtaaggagcctgcctgatgaatcctccagagtataactgtggtatctcgagaccctgttacaaggtagttgctatcatgagaaagtgcaaggcaggtaacaggagcaagatgtccagtagcagtttcaatagtcttcgctccatctggggagatcaacttcacagaaccatcagcatgcccacctattattgagtaaaatggtattagaaagcagacgaaacttcataaaaaaaatcattaaataatggaagctgcctaccataacacttcattaaaatccagaagtttctatttgagaaaaaaaatccagaagtttttattcgagaaaaaaatccagaagtttcagatcaagctgtttgcttgactttatctagcgcaacaggtgttcagtattttaatttaaatccaatatatgcaagatataaagggcaaatttgcatctttggattcgaagtgttgtcacaactcacaaggcaatcttaaactacattgcttacatgcgcgtgactttttacattacaatatgaatccacaactccatgctgtgttccatttaatgcctttcttgtacgttagtgaatgtctagcacatatgaacttcattggctcatgataacgaatctgtctggtaagaaaatgattatgaatctataaactccccccaaatctagcaggtaggatgtctcatcctccactagtaagcagagaattccccagaaaatggaaagaaaatgatggatgaagaggaaagatcatctaaatgaacaaaaaaaatacatatagaagctaaagcataaacagtcaaaagaaacaattaccagtgataatctctttgtcacatgtgacagcaacaactgctgaactacggatgccagaagcagcaaatgctatagctcttgggaagtcataatcttctccagaactagcagatcctttaaaaatgcgcatcagtgcaccaccggttgaatttgcagcatttctaccatgatgaaatagaaagggtgtcccttggccatctggagtatttggttgccaatggtgaagtgccacatgagcagcaggcacatttacatctacaactacaatagagtcattggatacaaacatggtactggccggaacattgcagcgatctggatttggaagtaaatatgatttaagttcacttggattccggaatatagtctgcacagcaaataaaagggtcagtccatgtaaaaaacagtgaggcaggccgcaagtaatgtctactcttgaacatggaataccagctccaccatgtgaaaactagttagctacacaacccaaacttaattaaattgccagctaatgcttttgggttcaatttgaactactttccagtgttccacaccaggtaacttgaatctgtttacttgacttctatttgacaatactcctcatccaaggtggaataatttggttctgttcaaagaaatgctttgaatcgtttgctttgggggttgttctcaatagccagggtttaatatagattacctgtagatgtaaaacttctgccaatggctttctcctcatgtggggaatagttagcaattgagatggtgtttgtccaaagtaagcaatttgatcttgcatggcttgccgttgcaccttcagcattttcagttttaaaaaaatatgagcagatagatgacaacacgggaaaccaagcactagcttgagcgcatactagtacttactggatctgtgattttgtcaatgtccacagttccttcatatgtaatgtagaagaacacattgttggccattactgcttctttacccctctgtttaaatctgcaaaagaaatattcctaggtaaatggtgatatgcgaggagaaaaaaaatagaattggcttcttaaaaatactaaacagaagtcctatatcaccctacatcattcataaatgctaaatttcaataattcattgatatgatgatccaacaggaccattctacctaaaatacaagcagagaaacatttacaaactcaagaatcttttctgttcatgtggggcctaacttattgaactttgtcattgttgaaagtcttgcttcgtcttcctacaaaacacatctttctattcagatgcagaacttgtaacaggatgctccatcagatggctacagttctttagaaggatctaccattatacctagaggagcacactttcggaatgataacttgcagtaatggcttataatataagtacctattacaagtatcttgaatagcaagtgattataagaaagggcaaagggaaggtgaattacaaacttatttatacctacaccaaattatagagtgattgcataatataagcattcaaattaaaaaaaaaaaaggaaagtgagggtacccaaatattaaatcaatccactcatgcaaatgagcagaaacatgctcactctcaagagccttccggtgtttatggacaaaatcaacagggtcctcagcccaaggaggcaaatttacagaatctgcatttatgttcggggttacataactctgcttttacgaattgtactgtaaattttacacaagctgaaatacaagtacctagctttcctccaagctgagttgtcccgaagtcgatagaatttatattggtaaatacttcagggaggtaaaacatctcagggacctgataaatatcatcagatagttatattgcagcaaaagatcttgactggatttcggcgctgcctactcaggaaaacaaattgctggtaagacttactagctcttttacatcactcatgtcttcaagaacactgtcccatgtaccagatagatcagaaaacatacgatcagcatgatcaaatttgccgccttgcagctgtattgagagcgtagtataaggttccaccctgaaaaggtaatacaagacctgcaacggatatgtattgttatcaaccaagatatacattgaataaaaaaaatcaaacaacatattgaagttgttatattttaggatggagggagtaataaataaacatttgattcagctttaagatgtaccgtgccagcactggagtaatgtgaaccataatggaactttgggatgattggatcctcaaacgtagagtagcgctcttggaatttttctagtcgctcagggtttagtgcaccaatcggctgcatcaaataatactcacaacggttagcatcctagataggcaaaaatatagaaacaactgtcagaccaacctttgaaagatcccgatatgtacatgggtcatccagattaagaatttcggatcggtaatcagcaattatccaaggaaaaacaggatactgcacatgcatgtaaattgttagaatgataagttaccttgttttagagaagaaatacaagtgcagtaaactgacctgagttatgtcattgtaacttcgtccagccagtgtgttcagttccatcaagtactcaaaattgctaatctgaagaaattgaatatactgagattcaaagctaccaacaacagcatagaaaaattatatgttgtgttcatgtacctcccagttagcccagcgctccgtcaactgagttcttttgagaatttgctcagctctctgaatcaagtataatatattactgacaaacgtcattgcagattgatcatactagagattaggaaaaatgggtttcacacgaacctgggtagctagaaaaatgtcattcaaattgggaggcttgctgtgaacaattgcccgataagcatttttgcgtgcttccatatcctagatcaagtgcaagacacaagtataataaaattatccggttgcatcatctgtatctcagactacagagagtagagtttcataaagagtgtaccccaaaatcaaaaaagaaatttgacctatctaccataaacaattccaaagcacttcgccgcaacaaatatctgcaagaagtcattgaaaataaccaagtaagtgaatagaaataaaaattatgtggttaatgtcattgatgctgcatgcatttgcttcacaagtattgaatgcctatttttaatctcagcagacaagaatatccgcattgcgacttgataagagtacatcagaaaacaaattctaaacatggcatctgatcagaaaataatctttaccgtctgctatatatctgatgcagagaggagatcaaccaactcctatctttatcctgttgatcacattggccgctagtggacgcatgatcatccatgttactctcgcttgcactctcatcaattataaagttaatcctcttagatgttacctacaaaaaaaaaaaaacagggcgaaatgatatcaattaacagctaaagtgggagttgaagaagcagaataggatcatgagtagcaactaaatctttgtaattccaactgtgtagctttatatagcagaaaaatatagtaaagtgcatatagaattgaaataatacagattttgaacagatccaggactataacataatataaacacgatagaaggatagatgattctttaaagaaaatatattggatcaaagaaataggatgcatagtcattactaactaaattaggtaacacggtttttttagtattatccatctcaaacaaggtgtcaatggtttagccacaaggaaaaataactgtctatgtatttgcagcaaattggacgccctatgttttacttaggggtttagccagaaaacaaattatagtgctaatcttagcatcccctagaatttgatgaacataaggtacttcattgcaatagtttagatcaaacctttcagtatataagcaaataaaatacaatgctgcagtacagatagcatattatgacaaaaaaaaaactaacactgcatatatccgagtacgtacttgacttattttgcattttcagctaaaagaaatgtttttagttaatttggaaccatcagaacattctgttcgatctactgcagcaccccattaataataattaacatgtgcacactgaaatataacgcaagttgtagtggctaaaatccaattccaccatagtaactgagaagtgttataactaatacaccacacatcggtccacaattgcaacttgcccttgacattctttaatacgatccctaaaatatgtatgtttgtaaaaggaaaagtataagcttgaacaattgcatcttagcctcttggcattatttatttgtagcaagttgccttacaatgttatgttggagcattgcaacgcttactggtaacaaagacaatgttattcgatacacagtagctgaattatgtgatgagtaatcttaagacaattgacaacctaaaattgacattctggagtctatcagaacacatcagtatgacagatcgtggatgagccaagttgtaataaaattaaagttcactttctgattatttttttttaagaactggtcatggcaccatcaaaatttagtaaatatcaattacttacttggaatgttcctcgtacaactttcaatggtcgcaccatcgacgatggaagctcaacaataattctctcatcagcatcactaggcacatatccaggtgcaataaccgtcgaccgaaccaaattgcgatcagcagaaatgccagaacctcgtgaatctattgatcctttcacagactgttgatctgcttgttggagtcgatcgtcaacactgctttgagttgtgtctgattctaactgctcattgtcctcatttctgtcatccactgacatggcctcagccgttattataggtgcagttgatggaagtgtgtctgttactaaaggttctgtaccctctgggttgcattcatttgattgtgcaacattacttagctttcgctcttcataatcagcagctgcacccaaatgatcagaccccttgtggttccttttcataaatcttctcatccttgaagaactttcagtaaaatctaatttccagaaaatctgaaatacaggaaagaaaagaaacatcaaaagatgtcctgcaggttgtcttttccttctatttttgtttcttttgtaagggtgctagtataccagaatgcgctggtctggaaacaaaatttgctggggaacagggcagaaaaacacacacacacacacatatgcaaaaaaaaaagaagaaagattagaaaaagttgtacatacacgatcaggagcacacaagggttcaccgaaaggtccatatagtctgtccatctctgttaggcaatgaagaagatggcgccatgctcgaactccagttgacacccgatgtcgattcagcacatcagcttgtgtttgcctctccatctgcatgttccagagttcatatgatttatggtaaatttatatatcagaaatggacatattccaagtggattcacctcaactcgctgtaagttccgcgccaacgcaaaaccagagacaagaatagcgacatatttgtatgaaagggctgaaaaatcccttcctgaaactgacttggaatcaactgattgcaggcactccatccaagcagcactcatagcttcagatgtgttccacctctttgcacgctcaatatcacctgcactcctcctttgtcctgatgttgccattgctacagcactaagaccccttcctgaaccaatcttagcagtccgctcaaggtcccgagtagcagctaatgctgctgctttgacagctgctttatcctttggtgtggatccatgcttgttgggtgctgtttcaataggcttctggaaacttgtaaaagactgtagttttggtgctgctttacgctcaggcactgacgtgtcacgcctgttcaaggtccttggaggtgctattgcttctgttccagaggcaccagcagccatcatggctaatgccaatgcaacaggtggtgaggcaaaagcagcagcccaaccaggtgatatcattgaaagagcagcctgagttcaaaaaagtaggaaaaaccccttgaatatatttttttctttgagaaaacatctggcgataaaactttaagacagacaactagacaagtacaattttctaatctatgctaaatgtaaccacaactagactagacatatgatctcaggatggatatcaaaatgtttaccttatcattaatatgctaatatagttacataagcgggaaaaaaaacaacccatggttgctgagatactagttaccccctccctcccaaaacataacagcttctagtatttaaaattgtcacaaaatataacaacttcttcacctacattctcttctcaaccaatcacaaccttccaccttctaatttctacacctacttcctcttctcaaacaatcacaaccttcccccatttaatttcacctactttctcaatacccatgtccaacccaaaaacttcttatattttgggacagaggtagtacttttcaggtttcagcttctaggtttctcaaatatcaagtgcactcaatagtaccagattaggttaaggttgccacttgccagcttatgttaagttcatgatcattgaaagcaaccccaacttcttttcttccgcagtattagtaaactagagaggaatttttgtggactgcgtttttcccagcttaaggataaaatatgtaaaacaaacacaactgaaatcactagttggaaatttcatagatatcatagtggtatctatatgtcactgtctcactgatgtataatttagcattaataccacataacttaagctatagttggattttacaaagaaccagtccatacctcaatgggtaatgcatctgctgccaaagcgcgatcatcagcaatcagtggattttgcccatctgaagaagttagctcatgaataccagccaatagtggacgccaccttctcaagatggctataaatggtggtaaaatcagctcaatgtactgtttccttagggggctcctgtccctaccaatagcatgccatacctacagaatgaataatatcgcataagctttatgacaaacgaggaataacttctttgttatcccctacaaaataaacattgcaggaatatagtgcctaaacattataagcataaaagattaacatgcaacatctgtacatctacaaatttacctttgattatagtgtttggatgagcaaaggcaggttactgttcaaaaatcagaatcacaggcaaaaggtataacatggaattcgaaacaactacaaaatttggtactcaagagtaaataccgaacacactttatctaacaggtatcaaacataattgcaaacactgagagtaaaacaaatcaaacagctaaataggagaaaacgaaggaatgtggaagtatcaacaattcaacatgtacacaactgcagatgggcatcactatttcttctcttttttaaaagtaaattattagaaaagaaaagagaaaattaacagaaaaagaaaaagaaaatagatttaagatgtgagcatacatctagtcacttaaaaatttgcagagaaagaaatctactttcaggtgatataatctgtagaactttcttgaagataaacgatagaaaaaaaactaaaatattgcactattttttattagatgttccactccgtagcatgggtccacaatcacttagacaaactatatgcttaggttaagaatattaaaactaacctctgaatagagaatagaggaagcaaccaacaccctttgtctcttagattcattaattggcatattgagaatgggaccaagcacactgaaaaatcacaagagtaccaacaaaataagaattgataaaaccagagtaaacgccatagtcacctagatatattatcatgtatataggaagccaactgtgtttccatcaaagttgcggctaccaactgattgtgacatatcatgccttagagcagttatatttttcaagaaataaccaatgccagatattatatcaaagcatatagtatacaaatcaagaaatgttaggaccctgccagagattgttagcacttcaccagtcaccagtgcttttcttagcttggtggattttgctagtgtttcccctctcaacattacccaacattgaataaataattttcagcttccattttttctcctgcagttaaacacataccactaactttgattttaactgttgatacttgatggtgcatagtgcatacctccacagaagtgcagatcggggtttccttgtagatgagcgattgttgctgtcaagtggcatcatgcttccagcttgatggcccaacccttccgatatgacatcttttatgctgatgttgcctgtgaaggcatcaccttcaccattgtcatcctccctcattgaaacaagagtcattctgagcatgcaaaggaatggctggtcgctatccagcaactgataaagtgcagtcataactcccataccagggccggagccccctccaatacctagaccaccaccaagtccagaatcatctaacagcaatgcctgcagcactgcaactgatttcttcacaagtggaaggtcaacccaagtcccatttgagtccttctccagaacagatttccaaaattcccaaccacttccaccgccaccaaatgtatcagatttggatgggattccaacgccataccacaagcggctcctgtacttccaactttcagcaagatctgcaatgcagctcccataagaaacaaatgcatgtttgacagattcataaggttcagctgctgctgctgatgtaagacgctccatcacagcagcagagatttgtccgtttgaatcagccattgaagtaagcacctgcttgatcacacagtaaacaagaatgaaactacattcatatgaaggaacagtggactctatatatagtcaatacgtgaccagaaatctattaaaactaatgatatttctttcaatagcacttgtctgttttacatgcattatcatgctgtcaacttcccataattgtgcattctacagactgaaaggcatatgaattttcctacgtatcacatatttagaactttctttcagaattcctatccagtaaagtggtatgcatctttctgtatgaaccattagacatatacctccgtccattcagtattattgtctatgtagatttttttttaaaaaaaagaagagcagtattcaccatggcaataatattctcctgtaacatgtggttaaaaaccaatgcaggacagggtagcctaagtgactggcataaagagcctcaaagatataggtaactatgacgaaaaaccagcagtagtaagccagaatatagattaaaaaaattctaaaaacttaggtgactaattgtgacacatagtgccaccttttgcaactatgcaccatcttgaagaaaatagtaaatggaatctcagaacaaacatgttgacgaaacatgctagtgcatatagacctaaaaatacaagtattccagttttgagtcctgttagaaataaatatcatttgatcaaaatgatgctaatagctgaagtaacataaaatatatatagccatgcgttacatacatctaatggaaggccaccagcatcagtggacaaagatgatcgtcttgaggtcccagcatccataggctcattaccacttctacacaatgaatttgatcgactggcagcagacgaaaccattgaggcagaagggacagcactatcaagtgatctggatgtgcaaaaatgttgaccttgtgacctcagatgatcttctacaagcatcagaataactattgcattttccgctagtgctactgaaagatgagcagcattttccgcttgggtttttgcttcttcaggagataaaccctcagctgcaacaccagctgcagctgcagcaattacttcagtctgttgtatgacaagcaaaacaaagacattatagatttgactaacataagatgaaacagtatccatgaaaatgatagaattatcaaacttcacgaaattgtatcaaaacataacaaagacagctatcttcaaattaacataaacaatacaatgcaaatggtaaagtacacccagtaacattgataacagaaaccaatgccactgacatggtattgtctaggtgtcaacccttttcttttgtgcagagtaagcagtgatgtagtcaaagctaccagttttagtgttccaccattttgaccattacagtaccaaaatttgtaagttcatgctgaacttttctggattattaccaccatttaaactaggccaggaccaaactatacagcacaaggcaaaggtaaaaaaaactagtgcagaaagtagaaagagcaaaaaaatacaaaaaaaaaaaaggctcacacatatacacaaaacatctctgcacagaaagtaaactgtaacttttagaggaaagtccaaccacctggacttgaagttctctggcagaaaaatcaagcagaccgcctagcaatctcctttttaaaattggcaatgattcttcccgtctaaaagaacataagtgccatattgttataaaaggagcaagataataatgccacaagtaaaaaggccagaaaaattgtagagaaaatgactctttctctatctaagccaattgccaatttcaggtcaaaactcctcacgcattccctctgctagcctgcacacagaagggagcacgagagagagagagagagagagagagagagagagagagagagcacctgattctttggtctcctgtgctagatcctccaaccattgaaagccactctgcacaatgaattgttgcttccacatcctaaattgtcacagcaacaacaaaattatgaggaaataggccaaaatcagcaatgatacaagcatcacaaacacaaataagagaggaaggttgggatggcaacagcggaaaagattttctgcataggatgctctacaaaagaaaaatagcttgccttccacccatctttttgccgcattgaatgctccaacatgataatcaggaaattgtgtatgaggtcttcaatatcaccaatgcttatgccatcagcatatttcttagcacccatctataattagaaatttgtgaattagatcaatgggtagtggacagcacaaaatgtagcatgattcttcttgcaatatattctgacataaaaaaaaggcctacgatacttacctcatgattataaatcaaaacctccaaaatccattctggccattctgaaattgaggtcatcgtggttctattctctggatgactgcaagccaaaaacagaagatcctgaaataatatagagggaaattttgacaccataagaaatttaaacaggtaaggtcgcaaacaaggtttcaggaaaaaacaaagaatagataacagcaaacagtactgatgagcaaaaataataaaaaaaaaacaccaaacagtactaacatagaggttatatgtgggcatataatgcaatggaagtgaatatgattgtgcagccatgcaggtgtttggttaaaagcataagaatatagttaaacacggcatggaatattcccactaaatatgtgtcagttgcatagttcaagcatacattctttttcttttcttgagtttccaaaagaaaagaaatgtgcttgaacagtgcaaagtgacacatatttccttaattctcttagttcttggctgacttctactgagaacatggcagctggttgtcccatgtaaatgtattaaaccacagctgcatgtgatttcaatgagaataattagaataaagcaaaaagaaactgactaataccataaagcctaagttcaaaacagctcaaaatcctaagagcatgtttggatcacttgtcaatctctccatggcctatgtgcaaaacaaattgtgcccaatatttatggatggaatactagatcatttgtcaatctctcattggtctatgtgcaaaacaaaatgtgcccaatatttatggatgaagtactagtacttaacaaataacaaatcactttataaggatttttcactgaaaataaatgcatgccatattcataccctattgaccaaaagaaatattgtgtggatttatcttcaattcttcataatcttcacaaaaccacaaaacaacaaggcaaagattggtgttttttctgtaacaaatactactccacaattatcacaaggtaaaaaaagccaaaccacgcatagcatataccataagaaactaccatcgacatgacagcacaaatcctggaaagtttatggcaagaagatgaaaaccaacctgtatagcacgagattggaatgaccttgatgcatatggaagcgaacggagcaagactagcaacagttgaatatgttcaaaacggtggccacaatcatataggtttagattttcatcaactgaagaaacattgatctgcattcaagatcataacaacatcaaaagtagaaacttcgaattgtaaacagttgggtaataattaaatggaagaaacactaatctgcattcaagataatattagagtctagagcctataatactaatcaaacttgaaacactgtggtgcttatgccattccaaatggaatggacaaaaaaaaactaagtaaaggatataactgcaaagtccgccaaaactgacatggactcggacactcgactgggcagagaaaatctagcgttcatgcttatttttacttgaaataccataaagcacaatccaagagattttgttgatagaaacttagatatcagtttttcatgtggcctgagttgagaaaaaggtcaggtgataaggtaaccaacaggcaactaagtaatttactcttaagttaattaatcataggaaatcgatttcgtggaagtcaaaaacatatacaattatctagacagcacataaacaacataccgcagcagaaattaaagccatatagacatttacagtcataagcctccttggggctgcttgaaatgctttctgcagagcaaacagtaacagtgacactctatcttctgacatggtatttccttcttcatgaactgtcgtcagaaggccaccaggtaaatttggatttgcagcccttgaggcaaactttaggtgacctgatgcaactagagcacccaaaatgtgaatgattccaacaacaatgccatcacctttgtcaacattgtaaacattattccggacattgtcagcagtaattgagaagttgatgccacccaaattctttagcagctgattttcagaactggacaacttccttcctatacttgatcccaaaatctcacaaggcacatcatttgtgcttgtagatcccagctcagtatgttcttcatgaaggatggattcgtgctgttcaagttcaactgattgaatttgatcatcctggctctttgcttcaccactagcagcttttgtgtctgaatcatcattccttaaaaaatcattttcacttaaaagtgcatcagaattgtccaaaatactgttgttaccagctttagcttccctctgtaaaagaacgagaagtgcatccacaccaccacaagatatgaatgactgagcaaacatgttggctctagaaatgttaggctgcacaatcaacctatagatgaggtgcaacacccttgcaacctgttaacaaggacattgttaagatcacaagaaacagcttagactatattgtcagatgagctatatagataagatggccctagactgctacacatttgtattgtctttcaaatgatcaaggcaagtataaatatatcccaacagaaaaatagcacgtactccctccagttccataattcttgtcgttttggacaacaacatgatctccaaaatctttggctatgattttctattataatatatacaaaaaataagtaaatatttagcttttaaaaaatatttttaaactaatatatgcatcatgttctagtgtcttcaaattaaatattttaaaagttagtgatagtcaaggttctaattgtttgacctcaacctcatccaaaacgtcaagaattatggaactggaaggagtaaccacagacaagctttaagagcaaagagctgatgcaccatcaaatttgttgtgactcacggttaaaataatacccacttatccttatgatatgatgtatggaaataaatacatcaaattgtaactttacagttttcagtgtatatgctcactagatattaggtagtagtagtaccattatgatctttagttcaagaacatctgcgtataaaatatgtagaaggttgggtatttccattcaaacaatggctcaggaggaaacagtagaggcatcagcatgagtttgtctagcaatcaatggccaaattacctgattaggctgtgggcaatcaacaacaaatccaatcaagcagcgaacatcatcagaagctgctgtggaagatgctgatcctaacagaagttcaacaacaaccaagagttcatcaatcagagcattaatttcacccaaggatctctttgttccagtaagggcaaagttatcgatcgaatttggttcccggattgcccagtagcaccttctgcagctatcaagaagcatttgcaatgcatttgcatccctcatgcaagcagcctctgtaaatatcatgtctgcaagcgaggacagaagcttcttctgtaaaccataagtacatgaactccacatcttcaggtccaacagcaaagtactgaaaagctgcactttaagctcatggttgtttctttgagattggcacaaggatacaattgcatcaactagctcctcatcagtcactgcctccccctctccaccttccatctttggaaatgcttgtaattggtaatgtaaaacacgtgacaaaatctccggtgaacatgtccgacataattcttcattatttccaggatgctgaatagccagggaaataatcctgaaaattggggcagaaagagaagcagtggcaatcgacaattcaccaagcataggttcaagactatccatctgcacattgcttatagtcaacggaagtaaagccattggacccccataggctaaggcccataaagactccgcaggccgcacacgagatgaaacatgaaccaacccaagaacttctgcaggccttcggtgagtgcctacagttcaaaagaagatactatcaataaaatcatgtacatgaccgaacgtgtcaaagtgccactatgaggaagcttgggaattttttgacattcggttagcccagtacatatcaaaaatcaataatctgacatcatttcagcaacaaggaacatgatatatcaattactttgcacactgaaaagggtatagatgactcaagagagtgtcatcacaaagatttatcaacaattgacagaaactactggcattgaagatatgattcacctgtgagtaaatacaatttcttggtagaaactacagttagcagcttgctctcaagagctcccacctcatttttgagaactcttatgttttgctatgggaaaagccctattttggtcattcgactttaggatacagtttgtgttcagactgaattttttttcaaggatgctattatggaaacaaattgagaaaattgctggacaaccaaaactttttaaagatactatttacagaccattaaatgaaagtttctgaaccaaagcgggccattgaaaagttaaaggtcctaagagaaatcagagccctttttttattggtcaaaggcacattagttatatgactttgagcataacaatttgttttgtccagagcaagaatttaaataatgtgttcaggagtttgagtaacataacatttctgtatctatacctatttcactaaaactggaaccaacaaggatgtgtaaattggacctaaaacatataagttgatgttaatgtgggaaaaggggtaaactactccgtcaacaaaaggggggggggacaaacctgctgagccagaaggggaagcatctggacataatcgtccattcagaagactaggatgataaagaagatgtaagcatcctcctatctgttggttcaatgtaaaactctcttcggccatgttcttaacatggtcattggttgctctccaaggcaaacctgcaccatttccaaaactagggagtacatctcctccacgggatgccagacgacccatcctttctggcccaattggctccctaaaaatgtatataggtcccatttctgcaaacaatggacattgtcgcctccgcctctgcaggcctgcaatagttggtggaggattcgttccaatgcagcaaaatgctagtggttttgagatgcgtgggaactcaaaaggacgactctcatgcaagcttccatcaacgtacaaccgcaattcactgtcgccctttccaagcaaaccatgcttgtttgtgtgctccaacccaacgaagtaccatcgctgaggtttaaacgcataagtgaagtgcagagaagccttcttacccctcccacccccactttccaccaccaagaactgtccatggaagtaagcctccacaccctgattatctgaagagagaaagctaaaaagtctaggcatgtgtgttgttccttctcctgcaagagcgctggctgcagcagctgctgacattgctgatgattttccagatgttgctgcggctgcagcagcaatggcagctgcagctgttgctgtactaagtgtatctgagaatgattctatgtaaatccaagtagcaaacccgtagccattagagaagggccacctgctgtcaccagggccaagcaagccagagctctccccgtcaaactcaaatgtcgcagcaggacctcttgcttcctcactccccatggctttctcaagtgccagcatcagtggtgttgcccagcttgtaccaagcgccttcttaaccaaaccaagccacgaatgcaagtccttcacgctaagcgagtgcccacccaatagctggatgcaatggagcagtggtgttccgtcccagctacttgcccgacccattccaatgagtagcttctcagcagaatcgaggaggacgggtagaaggcccgatgaagagcacatggcacgattgcgtgtgcaggcgcggagcgtggcgtgaatgcccacggccatacgagtgcgcggagatggctcatcgccgcaggggaggtaaggcaggagctccgcggcaacaacggcggctctcgagttgaacatgatgcttgggggagcgccggtgccggtcttgtcttctacctcgtcgaggccatcggcgccgcccatggtgccaagcagcacgtccacgacggtgtgcggcaactcgccctgttcctcggagaccatctcgtggaggcggttcaccccggccgccgccgcggccccgcctccgaccatgatcgcgtcgtcgaccgcccgcacaacctcctgcggggcgtccggcggcacgcccagcggccgaggccttctcctcctcggcggcggcggcgacggctccgaccgcgccggcgtgaccgccaccgacgtgcccgcgctcgtatccggatccagctcgctcccctctgcacgcacctcgtcggcgagcgggaccgccgagaactgctcgtcggagtcctgccccgggggcggcggctccggcgaggaatccaacgactcgcggggttcctccgccattgctagggctttacgacatcaacaccaaacaccgaacaaggtctcgggaataaaaatgcgggcggaatcggtcaacgacagtgaaaaccgcgagcgattcgagagagagagcgggggtggagtggaagggggcaggtgagcagcgcgcaatgcggaggcgcgcagatctggtggcgttcgggggtgggattggccttgcggcgcagcggcggagaggttggggatcagcggcggtgcatggcgagatccgcgaggcggagaggatgggtggggatatcagatggacgaactggacgagaagaagagcaggaagggggagaggtagtagacgacgtggcgcggccggcgggttcacggtcacgggtcgcggccgctttccagtgtcgcagcctcgcacccagtcgcaggcgtttggactttggtgccgcggtttgggccttcgcggcgcattgcgcccgttaaggaagctgactaacaagttgggcctggtggcccatgtgacagagacagacaacgaacaccaattcaacgagcaggaatatacacttgttgtacgtgatgaaatttttttatgaatctggcaaatacagttttggagttttgatctaagcacaacccctagatggaagttgaatccaacatgatttcatttcaagagaagttcaactcattcaagatcaacagcacatgcagggccaggcatgatggaggagctgctgagctgcatcgatgcaggaccaacaataaaaaggagcaacgtactactcctattgcttcaatgcttgcagacaaaggaaaggtatggcacaaccgatggtcgttcacacgattgcgatttgcaaactgaatgttacggagtacttacgatcgaagtaggatgcggcctactcccatggacgtaaacacgtttaagacagtatacatgcatgaactgaatagcagaaaggggcattttctcgtccatgtactattactgctagttattccaatctcgcaatgctcgattagtgacctatatgtgcaagtgattacaatttaattacaaagaactttgacgagtaccacatggactgattaaaaaatctcagttaattctctccgcgaactactgtgacgttcaaaaagtgattagtaggtgagctcgcctgacagtctgacacgactcagaaagattgattagtccagatcttcgcgaggtcatgtgcaaagttgaaagcagcagtgcagcattatactcgttgagtcggtgcaactttgaagacacgctacacagccaagcatctagttagtgttttagactttcagtcacgcagtgctgcagaagccggacgcgatgaacttgtatcccttctggcttgaggcaatgccatacacagctaaatgcttgcctgaattgtgcaggctgacttttgcaatcttgctggaactgtggttattgtcttttcttattctggattttgaatttccatttgcatgctttccaagctctccgtgcatttcgtgcaaagaaaacaaatattatacaaaattcctgaaacatttttaaagaaactttccaacttcatattagtttaactcattcatttatatcctcagacaactacataaaaaccagattatgcataatttaatcaatttcaattatcttaaacgggatgtgtgtgttagttttgcagggtgtaggagcactgctatgcatacaactcatgcatatgactagcgtgcgactcaccttatgagactaatcagtttgctcggattcttttcatgctcaagtctttcacagcttagtcatagtcgtacatgggtcgtatgcaaagtgattcggagggcgtagtacgagtacaagtacaagtaccccaagggaaatctttttcggatttccgtagactacctaaatcgctaccatgacttatgaccaaaatgtactgagggagttcacagtggacttgtgtagcgttcagcatcgtcctcccatgtctgcaaaggagaaagtcacatgccacgttttcttccagacccaccaaaataaagttcttgtgtccaaagtttaccaccgggttcttggagagaaactactcgtttgggtggataaaagctaagagtactagtactcatttggatgggaagaaaaaggagagagatgaaaagtaaaaagtttgtcactggtgggaccccctactagtacttgcactgtggagtatgaagcttataaggttcttcgtctacgtggcatacgaggaacagcaaaaatcggcgatgcactgtgaacgccctgaagatgcctcacttcaggcggagcctctccgcttggatgatagaccgattatttgagcctctccacttggatgatagaccgactatttaagcttggaaggagttgctttcctcctttctctccgttaatttgtaatctgtaatttgaacaatttgctatgtatctctttcctctaattagctctccccctgttgatatttcaaaaaacaacactcgctggaatagtggaagcagctagcaccccaaagatcattcaaatcacagatggacaatagacataggtaacggcgcttaattgattactctgtgcattagcatttgtttacctcagcttcccccaacccaagggccaaggccccaatcccaagcgtcgaccgacaacaaacggccccattgtcctgtagcatttccagtaaaaaaaaacaaccctattgcttcacttattcgagaaataagtgaaacgatgtaaatcctattgcttcacttattcgagaaataagtgaaatgaagtatttacagataaaaagtaatttataaataattttttttatgtacgtgttcttaacaatttaaaatcaaaggtcaaaaataaacttagatgaaaaaaaacataaaatcaactctaaaaattgaaaattcaaattttagctgataagtataagcataagcgaaaagatgaggctgaaagctagcagagccgcagaggaaccttgaaactgatcgaaacccaccaggtttcagccacccgtttgctcgaaatgaaccagaatgaagcgctcaggcagagccgcagaggcgaacatcacatccttgccgtattttcctcttcgattcaaataccatgcggcacgcacggcctgttggcctgattctggattccagtcgctcacatacacagccacgcaggaattcatatggcacatcaatacatatatgtacctcagcaataacaggaaaaatcgatattggaataacgggtctagaatgggccagatcggagaagataaaagatcatctagtttacaggagtactaattaatgaattgacagtactctgatcgacaggtaggatcaaacactgaaagcctgcatatatgcaggaacccgatgcaaaaacaagcattgttctgttcctgctggagcatgagagcatgcatgcatatatatatgcctgatcgcttgatcagctagcacgcgcgaacgattgattaagggaggcttgggaacatcttggttaattcagagggctctcgctttgacgatgtccatgctcatctcgctgggatcggtcgcctgcagctccacctggatcccgtccagctccctcttgaaccggtccttggagctcgcgtacagcatcttgctcctcaccttcgacgtgtccggcgacctggaaaccaagtgatcacaccgcagattcagagatccaagattagtcgaggcatgcaattcaatgtgaaggcaaaaattaattaaaaggcgctggttaaattcatatattttaccaggagatgaagaagatcttgctcttctggcagttctcgtcggtgacgaagtcgaagtcgaagacggcgtagcggcactcgctggcgggcatggaggcggtgaagtcgtcgtaggtgtcgcccggctggcccagcctgtccacgaccacctgctgcgtccgctcgtcgatcttgaacgtgatgaagcggaagctcctcttcgacttgagctcctggaacttgagcttgcactcgtcgcccacggccatccccgacgctgagttcgcctgcatgcccagatcaagcagcaacagcaacagcagcagttagacgtcgatcgtattggcatatgtaattggtcgatcgtatactcaccatggttgataggtttcgatctctgcacggcggtgacgaggagagacggatcggcgtggaggaggaggtggtgggcaatggcgatggcgaatggcaaagagatcgatctccaaggcctgaaagaggggggaagcaggcaaaatatagataagcagctttgcatggcgccatgccgccacgttaggaggaggagccgggccgcgcgtttgaccaacgatcccccttcagggccttcactactatacgtgcgcgagacccagaccaacatgcgctccaccacccatccacccatcgccgtgattgcgagacaacggacaggcatggcacggcgagtcacaaactcatcttcttgtctgcagcggctgaatgcttcagaagttcagagaatgcgcaattgcttcagaagttcatctttggggcagcaaatactgctccagaaatctataacgcggtttatttgagtcgtcaagcgcactagattcttcaactggtatttaaacgaattattgatgactatgatggtaacaaaacaactagagactggcagagaagaggcgttaacagactggcagagctccttgaatcaacacaaacgcaatgttgacacccaagaacatcacttctcaaaacattgaacagtagatcatattaaattcccgttgtacgttacaaaaccgtgatcccccaatagacaaaattgttcggaaggatcttcttctgtatcattactggtaagctacaaaggttacatagtttaaccaaagaattttacaactttcggagcttgttttacttttgccttagtgttggtattcttgtcaccatcgcctgtctctgtggtagattttgaactagattgtttagccttctttgccttggtgtgtcttgtttcttcttcttcaataaaatcgtcatcaaggtcatctccaccccggagaacagcattgtcttccaggtgatgctcctccgtattgaaagctagaaataagcagaagaccaaataaatgagcggctactaataactgtacggaaaaaagttaccagatgtttgatagcaccatcggacaaaattatagaccatctcaaacatataagaaatcataacttatctcacacattagcatgatggcatctgcttggcgccttagccagactgctactactaaaggcgtattcacccaattacccatcggcacagattctatgttacagtatagcatcatgttatgtttctttaacaaaacaaaagaggcacgcctggcaggctagtcattttctcctcataaggttagccaaatgcttacatctaagtattaatccttaattctcacatggatagaaaaggtaaacataatctgttcttctttctccaatgtattgtcaaaacaagcgtatggtctatacatccatgaaaacacttcaatggttatttactaaatgtaaacagtattaataacaagtggatacaaagatcagctacaagaagttagtgaaagttccaaattttttaaaatgaatcagcaaaagtacaatacacatgataccgtggaggaatgttaagacagttcccacaaaatgttacagttgaggtttgtgtttaccatcatccccagaagatatcaagtcttgcctccctctgtttggacaatgcttggccaggtgtgtaacttcaccacatatcttacagcaacctccctaacaaatgtatagagttagaatccacacgtaatggagacatgcaactaaataaaggaaagataatgcaagcagaacatccttcaaagtggacattttgagcccctaaatgcagaatgttatctcagtccaagatcttgtggtgataagggacaacagagtatctgataatacctttggataaatgccgtgtttgttttcaggacaattcttgctcaaatgtccctgctgtttgcagacaaaacagcttgcgaactttgtaccccctgtatgcaaaaatcatgctaaatgtgcgaggaaatcatatggctgagggtaactatttgcaggtatcgagtatggaaactggcaactgtatgagatgaaaggatgtattatttaccattttcaatgggtttggggcacttggaaagtgagtgcccagattcaccacaattataacagaatttcttcaaattttcatcatttttgtcagggcaattcttcaggctatgacctcgttgcctgcagagcaagcaaatctgaaagaagaaaatataaatattaaattttagcttgaaaaccacaaatgaactggtcagactttgaggcaactaagtactgaaaaaaaaaatactactgactgaaaatatataactgtgacagccagaatccactgattaaaggttggaatggaagcagtaaaacacttatcaggatggcctccagaagtcaccgttttgccattcacctagagatagatacaacgtgtgataaaacaaaaaaatacagaacaaccaatacacgcactgcccagtgcccactgctaggtattgcataacgtaaataacaccccgcaacattaaacagaacaaggcataaacagaacaataaacagaaaacccatactgatttcgttggttttaacccccaataataacagaaagtcagaaagtacaaatgctgatctaaacctaaggtcaccttaattgacgttcttaggtccatggcttctatagcaaaagacattgggccgagcaaaaattatccccaagagcttgcaaaaggcagggattttgagacgaatggtggtaggcagataccttgttcttctcccagagggacttctcggggcagaccttggcgacgtggtccgcggccttgcagatgaagcaccgctccccgggccgcatcccggggacccggagcgggtgcttcgacctccccgcgcctcccccacccgccttactcgtcttcttgaacatgctcttcttgttgttcttcttcttcttggtgccgtcggcgggaggggtcgggttggcggggaagaggcccgggttcgcctcgcggaagcgcttccgcgcttcccgctgccgcttgttcgccatcgccttgggctacggacgctctctcgccgtcgcgcgtggtgctgtcctcgagcttggtatctcactctctctctctctctctctgggcggcggcgcgcggcggcgggggacgggagtcgggaggggagcaagggaacagccgagcaaggagggcttcgttttgggaggcgctgacgctttgagattcgggctcacgccttgatccaccgtccacgcatctagaagcagtgggagccactccgcgaaataacggctaaacgaggggtatttctgaaaaaggcaaatcagggatctttttgtaaaattcgcgtcaagcgatctttttagataattcaaaaaaaaaaaaaaaaatggattacatcgattctgccataagacatacttcctccgtttcacaatgtaaatcattctagcatttcccacattcgtatcgatgctaatgaatccaagacatatatatgtcttagattcattacacaatgtaaatcattctagcattccccacattcatattgatgctaatgaatctaagacatatatacatttttcacattcatattgatgctaatgaatctaagacatgcatcaatatgaatgtgggaaatgctaaaatgacttatattgtgaaacagaggaagtacaaccataagtttaataagaaaaaggtaaagataaaaaatgtaaggggagaaatctaacgcaaaaatggtccagatgtccagcagttcagcaatcagcactctagactgaagtattgaagtcaatggcaatgcaatttcctgcatcgagtaattcagcagccaaggcaatttcctgtaaggaaccaatggatttacaggttttacagctactagccccgtctattcaaattcaggtacagatttcatcagtggtacaaactggactgtccaatcaacgtttatagagagactcccagaggacaccgaggtcaacattgcctccagaaacaatgatccctatcttactgctctcatgccaagcagagctttgcttaaactcgtcagagagggcggctgcgaggcctattgctccactcggctcaacagccaccttcagcatctcgtagcacattttcatggcgtccacaatggcattgtcatccacaacaatgatatcatccaccaagtcgcgcaccaccggcctaaaatgcagagatcaaatctaagaagttttcttgaagcatgactgcctgctgggtcaatagatatttcaaataaaaccgcataaatatttgcaaatgcatttggaaaagattgatgctgacaacaggttaacattttactatggttgtaattagtgtggggaatgcatttggagaagattgatgctgagaatcggttcaatgtataatgctttaccatgtcaggtcaccaagaaaagctcgaagtccatcagcaatggtgttggttgaaggcaatgttatgatctttccagcagccttggactgggcagaatcatcagcaccctttggttctgctgccagaatacgtattgaagggtttatggccttggcagccagtgccacaccagaaattaaaccaccacctgtagtgtagccaaaagtatatgcatgcgtcaaaatagaaaagaaagacttgtgttacagaagaagttaatacagtagagtacagaccactgattggaacaattattgtgtcaatttcagggacttcctccaaaagttcgagagacactgtaccttgaccactgaaagaaaacatcatatcagaatttgcatgattcactgaaaagttcatgtttgctattcaataagctaagagtacacattttaaagtggcaagacatggaaagaaactaaggttgttaaacacaagctgtatgaaatatgtcaagtagatattgccctttttagtctaggctggtatataaaaaaaatcatgaaacctggatgaaatatgatttaagagtaatgatatcatatacagtttgaattaagtgctgatttcatgaattgatagtgaaccaaggctactatcaagtaatttcatatactcgtaagaagaagagcctatcaaagttcaccccgctctgtccatttcaaatcccaaatggacttcttttgcatcaaagtagtaagctcaggaattgggactaccagataaacaatagagtactagtgacatgttcaatccacttagactttagcagcaccagtatctaggggtatgatatgttaaagcaaacagcttttagtctctgtacaatgtgttcatgatttgagatatgaacaaactttccgcatagcaacagagcaactcaataaaaaagaacttagaacagagaaatcatacctgatagtgtttttattattgaatgggtgaacaagaatagcaccagtttcctcctgaactcttttagcaacagattctcttgattcaatggagacatcactccagataatatggccaccgtaccgcttaacattgtcaaccttacatgccggtgcatttcttggaatgacaatgtaagcaggtattccgcgtagctttgcagcaagagccactgcagcagcatggttcccactgagaagaaaccatttcaatcagttcagttcactgtgatgcttcttaggattaggatgccaggtaacattgcaataactatgaagctagcactaacctgctatgcgtcacaacgcccttggatgcctcatcatcatcaagcgcaaatatcgaattggaagcgcctcggatcttgaacgcccctctacatcatatattcatatccccacacaagcaattagcagcaggtagaaattagcatggcagatatgccaaacaacacgcgggggggggggggggggcagtgactctcacgccttctggaagcactcgcacttgaagaacagctgcttccccactatggcatcgatcgatgttgatgacagaacgggcgtcttgtgcacgtatggtgcgatgcgagcctgcgcctccctgatggagtggatgtccgcggcatagccatggctttctgcgccatcgccgccacttccacctctgctccccatcaggccctagtaagtactcgtgttagctagcaccacatcaattctcaatattgtccttagctcagtgatatgggcttcaaattcagtgactgaaatactgcgcgcaagatagtaactagtattccatcaaaagaactgcacaaaaaataaaatctatcccattacattgaggggagggcaaacgcaaatggggactacatcagtggagtagtaactgcatcaccaggaaggcaatcaacagagaaaaatatcaagaactatatgattcgagcaggcaaggtgactcaagaaactaaccgaggatttggaggagcaggtgcagaaatcttgcgcggagaggaatccgaagcaaggagaaatcgcctaaccttgagtgacagtccgggcggagatttggaagttttttttttttcctatttgagcgatgaaatccaagaacctaacgagaagaagatggcgttgtggtgattgacgacttgaggggcagccgtgcagcctgcaggccactgtcttgtttgggctaaacttatctaatgggcctccattgttgatatctacgagatcgtgtttccgagcccatttaaagcaatttgcatctgctcagcccatatcgggtattaaccctaccgattctgagcaagaaagtcttcacctgaatctttcgcatttctgcttttacgtttgctccctggaatactagattcccagagcatcgagctgcgacaagtaatagctattaagccgataataattatactcgtcaagcatttcttgatcaatctgtgatcacgtaatggcggtagatacagaaagtattctagttttgcctttagggagtaatcgatcactgagtgtgagtcattcgcagatcaccatacgtaaggaaaggatcacagggaaacgctcatcactgtcagtgttccccagggaggtcatgaaatctgctcaatggggcacggcatagtgtattgcctctattttttacaagcatttgtcgcgcttgactaaaaaatgcacacattaaggaaatcactgtcatattaattttgacaaaaatgtcatctgctaatgctgttgcatgaaaaaatttgacagttatcatctgctaaaagagaataagagaccatattgatgattggctcctgctaagggtggagatcgctctatgcgggctgattccagagttgacattcacattttgcctgggcactaaattaactacggatagatacagcttagctggacgatgacttgccacttggaatgtcggatactgcttggcttttcttcagtgattccgtaggctactgctacaatcgatgtcagtagtgacacctgcctctacctgcagttcttcaggattcatgtactaagaacccactcaggaacaaccttcccctaaacgagctgaacagctagtcttaaacaaaccagttgtttaactagaaattaagcagccagctcaactgattgactgtcaggttaagctatcgcctatcggatgacgccacgatgcagtaaaacaaaaaacagcgccttgattaactatcacgcaactcgatcggattagctcccatgtgtttgacttttggatgccaactttgcgttaaatcgtccgagtttgaatttttcgcgcgattttaaacgaagatgccagatggctcttctctaaacaacgcttaaagataccatcagagcaagaaatctctgcgtggttcgagagattagctgttatccagggagaaccgtcacctgtttttgttactactccagttaaaaataacccaaacctgatttgacttcgattgtttttgaaacgccggccggttcgcttacacgtctgtgcttgaaaacaaattaatctgagttgaatttgattcgttgtttcaagaggatttcctggcagcatgcccaaccttgttcggctgttcccacatattctataattcaaaatttgatgcgaacgattgcagacgcaagtatgctggcaccacaagcgaacgaagcaaatccaggtcaaatttgaatttaaaactttttctatccaaagcgctccggtcatccaggcgtttaaatatttattcggggagtacttgacgtgtggaacgtttaaacgggaggcgtgatttcaaattgtaaacggcatctttgtcttttgtgtatgaatgtcttagcccgaaagacgtggacagatgcattttcaaaatgacctataccctccgtttatgaatctggacatacctaaatgtccagattcgttatgtcaaaattcgttgtattatactaggttaatctatttttgaaacgaatagagttattaaaaggctgcatgttaccgtcttccagagccttccagcccgctcaaaacaaaaagaaaggccctgaaaatgtcagcaaacggtagtgatccagcccacgtattcttgaggcccaagcccaagtttgattgtggaaaagaatctactatacgcacacacgtccataacaccggaacgcgcatcagcgcatcactgctagtgtttaatcagtgaaaaatgcctaggatgcataaaatttaataggcgttcatattccagctatatgaaaaataataacgctaaagtgtcaaacaagatttggtattactcgaagcacctcattttatctgtatgttaaaggcttattcacttctcctttgaaatggacactacattatcatttattttaaaagattgcaccaaagaaaaattcctatgcctccacttcaatcctttggatcgtttgctacacaaccataagaaattttcctatgtttttcaattcttaaaagtttgcacaagtattcccatactatttctacatttttttctattattacattttgaatatcctagaaacttaacaagccctaaacttataccattcacgttttgaatattaagtaaccatcgagttgtattttttgtgggggttgggggggtgtgataaatcttctcacactttggtttgtgtttaaagcttgaaaacctcctctcccattgacccatttatttgttgaaaccacgttttcgtatgggaactagaattgattacctgatgacaatgtaaccacatcacatctatttgtaacataccatacctgttaaataacttcccattataaagatcttaaataggagtacagtctaaataataatgcattgcaatctgaaaaaaaaaaacaccagtttcaagtggtgcacttaaccatgtcacaagcatatgctcgaaatgcaatggcgcctgacgtgtaccccaaccaggctgagagagcggtcatcggtcgacgtcccaactttcttttcacctcacgctacatgttgcagcgtttgcgccgttgcgctagcatttatgaggtgcacccataatttttcctactccaatgctgcgttcgcgagcactttcgtgttgcggttttccaatacgtaaccatgcgctagagcggtcgcgctctcttttttctttcttttttcattttttaccctctttttagtttttgagcgagcacgacgatccaccccaccaccccggcgcccctcacgccgccctccccgaccctataaattcggccatgtttaaaccatttcaccacaaaccagcagcaaatcaaacgatcaaattgtaagaaaggaaaataaaaacagaagccctcttccccaaactcgagggggtcacgcgaacacgctgccaatggcggcgagcactcgagccctcttcctctcctgcttccacggaagcggcggcggcggcggcacttccgaggtgagccgccgcctcgtgctgcggccgcggtacccgtccatgccgcggcgaccgaggtcggccgcggtcgccggagagggaggggaaggaggaggaggaggaggcgacggcgatctggaggcggcggccgtgggggcggaggaggaggagaaggtggcggtgttcgaggtgtccgggatgacgtgcgccgcgtgcgcgggctcggtggagaaggccgtcaagcggctccagggcatccacgacgccgccgtcgacgtcctcgggggccgcgcgcaggtcgtcttctacccggcgttcgtctcggtgagtatcgaaggctccgtcgctccgatttttccatatattttttttaaagcatgccgcgtttcttacgggctgcttgcttcccgcacgaccagattgatcagcctgtggatagctaggtaaatttaataaggggaaaaaaatgaatgatgctttgtgtgcgacatttttcggttcatactccataccgttagttgcgggtgcttatacgcaaagtggtttgatcttggaagtaggtacacgggaactttattaaattccaggctcccaggctccgggctcccagctatttagcgcgtagagacaaatacatagctgtgtaacattagcagtagatagacaggtagcatatcagacacactgattaaagcatgtttttatgaacatgttattagaaatgtccatacgcatagtatcacgaaaaaggatttgagtgagctttaattgatgctccacaagttcagaaatacttgaaatgtgaggtgggttcgtgaaaagttctctttgcggtttagaaggttacaagtagacatctttgcttgtgacgttgaactgctagctgcttttggggatcccttgaaacatggattggcctgttggatcccaccaactccttcagctgcaagtattaagatttgcacagacctgtagtttcaatatgaagacgtatttgataaaaaaatggacgtcctgcttattgtttgtagcagacaacctctgcttctggacagaaagtagaaaggaagaacaatctaatgtgcatgtgccatgtaattctaatttacctgatattcccaaaacgactgtttcaagttctttttactgaaatcagaatttcagatttaactaactaattttctgtaccacgtaaactttgtacttacctgttttgcttggcgacttttacactgttgcactcttcattctgttgcaaagttccaaattgttcatttggtgttccttccactagatgcaggcatatgcctgattagttactactaatactacaagttggaatatattttcttattcaggaacaatttgttactcacgtttatcatctcataattacgctctctgatcagtggcgcatttggggatgcaaaattgtaatcttattccccatcattattatcctgaatatattttcggaaaaactaatattttatttgatcaagatgtgtcgcttttaatcagtatcttgaaatttattagaacgaaagggggtgccttttctattattggatgtcattttcccactgtgcaaggctgtaagttcactgttaaagataatttcatttgatccccattgtaggacatgaaacaaaccaaagatatttcaacatagtggttgcttggtcatgcatttccttatttgtgtcaactctctctgcatctagtaacttttggtcagtaatagttagaagatgctggcacacttatggataaagtacattgcaaaggactgatattacaattcgagaaataatctttgatgtaaggattgaagttttgtttacaatcttttgagttgggtggcctgtataacacaaacagtatttcagttatctctgtcaggatcccactatgagctgaagcctgtctttgtcaccgtcccattggatagtgcctctttcttcgtagcgctttatattgattgggaattaaaaagaaagactatttgtgttttggatctgttgaatttctagaaaacatatattagttccattgcattttggataactttgttgttttctgtatttgatcaacatctaacagaacattttcatagtggtaccctttttccattttttcaatagttttacttcatgtttttacattacacatgtccacatgtttcaatccaatttttcttcctttcttatatgtttggaaattgtgctcatcaatgccatttgacaggaggaaaaaattagggaaaccatccaggatgtgggctttgaagctaagctgattgatgaggaagtcaaggaaaaaaacattctagtatgcaggctgcacataaaaggaatgacctgcacatcttgtgcgagcacagtggaatccatcttgcaagttgttcctggtgttcagagagcttctgtcgcattggctactgaagaggcagaaatccgttatgaccgtagaatcgttactgccagtcaactaacccatgcagttgaagagacgggttttgaagcaatactgatcaccactggagatgatcagagcaggatagacctcaaagtggatggcacactcaacgagagatcaatcatgatagtgaaaagctctgtccaagctcttcctggtgtggaagacataaaagttgatcctgagctccacaagatcaccatctcatacaaacctgaccagacaggtcctcgagacctcattgaagtcattgagtcagctgcctctggtgatcttactgtatcgatatacccagaagcagatggaaggcagcagcatagacatggggagatcaagcgatacaggcagtctttcttgtggagtttagtattcaccatcccggtattcctcacctccatggtgttcatgtacatcccagggctgaaggatgggctcgaaaagaaggttattaacatgatgagcattggtgagctcttgcggtggattttgtcaacgccagttcaatttgtaattggccgcagattttatactggtgcttataaagcgttatcccacggctcatcaaacatggatgtactcattgctcttgggaccaacacagcttacttctactcagtttactccatcctccgagctgcctcctcacataattacatggcaactgatttttttgaaactagttcaatgctcatatcgtttatccttcttggaaagtaccttgagatcttggcaaaagggaagacctctgaggctattgccaagcttatggatcttgcaccagaaactgcaactatgttgatatatgatcatgaagggaatgttgtgggcgagaaggaaattgacagtaggttgattcagaaaaatgatgtgatcaaagtagtcccaggtgggaaagttgcttctgatggctttgttatatggggacagagccatgtgaatgaaagcatgatcaccggagaatcacgacctgtggcaaagaggaagggtgacactgtcataggagggacggtgaatgagaatggtgtgcttcatgtccgtgcaacatttgttggatcagagagtgcccttgcacagattgtacggctagtagagtcagcgcaaatggcaaaagctcctgtacaaaagtttgctgatcagatatctagagtctttgttcccctggtaagttcagtttcatcgtggtaattcaacggatatcatttcttatcaattctaaatagtcttcttcatcctttcaggtcatcattctttctttgcttacttggcttgcttggttcttagctgggaggcttcatggttaccctaactcatggataccatcttccatggatagctttcaactagctctccaattcgggatatcagttatggttattgcatgcccttgcgccttagggcttgcaactccaacagctgtgatggttgctactggagttggtgcctcacaaggagttcttatcaagggtgggcaagctctggagagtgcacagaaggtccataaaaaaacattgtacttttagatgcacatgtttgcaaacatcaaattattgacaaattttttatggcatttataggtcgactgcatcgttttcgacaagacagggacactaaccattgggaagcctgttgtggtcaacacaagactgttaaaaaacatggtcttgcgtgaattctatgcttacgttgcagcagcagaggtatgctttcaagcttgctagatctttttgattcaatgcctttattacttgtagcaaaatatcattcctttgtgatatatgaaaaggttggttgagggcatagatgtatgcctagacccacccaagttcaagtcctcatcgaggcgaattcggatgcctatttcttcttaattaattaaaaatgtcacctagttcctcctaggttggttaaggttcttttgttgtgatttgtaaaaagaaacattgctcaaattttatcggttctggtcttcaggtcaacagtgagcacccactgggtaaggcagtcgtggagcatgccaagaagttccattcggaagagagccatgtctggactgaagcaagggatttcatttcagtgacagggcacggtgtcaaggcaaaaataagtggcagggctgttatggtgggaaacaagagctttatgttgacttcaggcattgatatcccggtggaagctttggaaatcctaacggaagaagaggagaaggcccaaacagcgatcattgtggctatggatcaagaagtcgtgggcattatctctgtatctgatccaataaaaccaaatgcccgcgaagtgatttcgtatctcaaatctatgaaggtggagagtataatggtgactggggacaactgggggactgccaatgccattagcaaagaggttggcattgagaacacagttgcagaagcgaaaccagagcagaaagctgagaaggtgaaagaacttcaggtgagctatcataaaatcttttgcatgtctcctggttttttttgccgtaccgttatttggttattcacaccctccgatttttttttactcttgcagtcggccggaaggaccgtggcaatggttggtgatggaatcaacgattctccagcgcttgtatcagccgacgttggcctggcgattggcgcaggcactgacgtcgccattgaagcggccgacatcgtcctcatgaagagcaacctggaagacgtgatcaccgccatcgatctgtccagaaaaaccttcttccgcatacggatgaactacgtctgggcgctcggctacaacatcatcggcataccgatcgctgccggggtgctcttcccgtcgacccggttccgcttgccgccatgggtcgccggcgctgcgatggctgcttcctccgttagcgtcgtctgctggtccctgctgttgaggtactacaagagcccaaaactgggccgttgatcatgcagtacacacgcatagcatttgcttagaataagaggtgtagatatctgttgacaatgtgctaatgtggttctaaaagaaatgtgctagtgtgtgttgtgtggcacctgaaatgtgtacattacctacgtatatatgcaccgtgtgtttacaagtgttaaatatggagcactttgccaacactagcaggtgatacgttgtagtgcaatccatctaatcttggcacttcctaacaatggaggggacaggtcgtcaatctcaaaagcagaaatgctaatgcttcgtgatgatgcccgggtttcccgtgcaacttggctaatcgacgttggtagttacctaactctttttctgggtggcatcatagtaacctaactaagcagtttagcacgcaacgcgcaattgagcacacttcgaaccaaaagatgccctgaactttactactactacctacgtggctcgcagtgggaacatttggtatctgagctgaaactttgcatgggaatttgggataatttggccacttgcattctgagctgaaagatagtgctccgactagggcagtggagctatcttgccgagagcaggcaaacacaactggttcagtcttcagcttagctacctatacaccttcgctcttgtggccgatcattgtcaagggccataacccagccaccgaattaaggcttctacctgatccactgacctcattgcacttgatgatagtatacgatcatacgactctggaaaacatgctcgatggctatcggttgcattattgaatttgttgcttgatccgccccatgaacaacagtaacccatcataaacattgggacctgtagtgagtttttatgggctccatagcctgttaaagcaaaaggttactttagatccttaaataaaggtctctcaaccacaaatctagatataaaataaccctaactattaaagccaatacaaatttaatccctcagtgagagatcgagcaggaattcctaacggcggtgacaccgagctaggatatcccctctcttcaaagtcgctgcagctcagggtaggtgtgctatacgctgttgggaagagagagggcgagggagtttaggctttttttttataatgtgaatgacatgtggatcttatatttttaaaagttttaatgtaccattattactaacatataggtcccattatatatttatttttattatttttttcagatggtgtcacacataaactccacgtcaaacaaagactaagtcaacgtgttatgtaggacaaaacaaccatctaaaaagatcaagagacttgatttgtataggttttgctagttgggctacgcattatagctggttttacaattgagggatacgattcaaaactcgactcctagacaaaggacctacaattggacgttatcccctgttaaaaggcacacggctagaccagaccagaccacctacgttgatcgttcatcgtgtccgaagcctaataaagcccaaacaaaggattttcggcccagcacagcctagctccacataggagaaagtacacccaaggtccctcaacttgtcatctaattacaaaatcgtcccccaaccgcaaaaccgcacacaaggcatccatcaacttacaaaaccattgtagactagatcactcggcggttttaaccctggttttgtccgaagtggtggctgagtcagcgtgagacccatgtgggacccacatgtcattgaaacattagtctattttcccacacttctttctatcccctcccttccaagcagatcggcaacggcgtggggagcggccgtccggccggcggagcgggcaggcgacggcgcggggagcggccgggcggcgggtgctcgtcctcctggtcatcgaggccagtggccggcatgctggtcggcaacgggcgcaagcaccaggctctgacgacgaggttctccaagacgggcgcttgtccccccggtctgcggcgaaacggcattcggcatggcggacgaaggcggcgcaacatccgggtgggggagaagcgagcggaggagggtggcggcgatgaagcggtggagggcggcggcgtccctccccctggtggcgatggagacccagcggcccttccacaggcggcgcaatgcacggtcatcggcaccaccatatgccggccgttcttgtgctgccgccaccgccaagccgacaccgacgccggcggcgagcgcggggaggcgttgaccgagctggaggaggacgacaagatggcgcgcggcgctggaggactcctcatgcgccgtttgccgcttcctccactccgccgccctgctcctcgtcgccgtccgctccatccctaaggagctctcccctcgcctcctctggacccccgccttcgagttcatcgccaacgaccgtggccaccccacctcctccattccacgcggtggagctcgccgacgactgatttggacttgggaggagctcgccggcctccccgcgcctcctctgggccctcgccttcgaactcatcgccgacgaccgcggccaccccgcctcctctctttccacgcggtggagctcgccggcgatgaacgatttggacttgggaggagctcaccggcctctccgcgcctccgccgtgcctccactctcgctcgttcgctggcctccgccgtgcctctgccgatgctcaaggggagaaatgggagagagagagagagaggagtaacggaggggagggagaagagaaagggtgttgacgtggcatcctgacatgtggggtccacatgggtcccacattgactcagccaccacatcggacaaaaccgtggtcaaaaccaccgagggattttgcaatggttttgtaagttggggatgcgttgtatccagttttgcagttgggggacgattttgtaattcgataacaagttgagggaccttgggtgtactttttccctccacatacgatattcgtgttgcggcccatgaggccatagaccatcagttaccccagcccgacccatcgtgctgcaagcctttgcaaccatcgacagttgagcaggccccccaaacgcgatgggcgtgggccgcgtggcgataatgtgtgcgccccgctcccctcatatccgtgtccgtgcacgagtgaacaacccaacccaaccgatgcgcgacgcagtgacgcaggcacagcgagttgaccggccgcgccacgtacggttggttcctcctcccaacacgcggcgggacccgtctccacgagccgccgttccctagaacgcggcggcaacgagcatcctcctccgcgtgggccacacgctgcgtttacaagcgttcacaccttcggcctggccttttttatactcccccccttccccaaggtgatcacgtctcgtctctgtctctcggcccaccgcttccatcgttcgtcctcgtctccacgctaccgtttcgcaaccacccgcttcctcctccggagaccgctcggccgccgctcgctccagcatggccgccgcgccgtccgccacctccgtccacgacttcaccgtcaaggtcagttcctcctctcggtcggcggcgctcccttctcgaagggatctgtcctgcagtgattgggatgggctttccaaaacccgaacccgctcgagcagtcgagccgtgcgtactttggggggtgggtgggggggggggtgcctgtaatccggggtggtgcttgacgtgaatttgttgagcagtagtaattgggtgtttcaccgaatttcttagcttgttttgcttggtgcgagggcgtgcaggatgcaagcggaaaagacgtgaacctgagcacctacaaggggaaggttctcctcatcgttaacgtcgcatcccaatggtacttaattcacttcattacgccccccattttatgatggaattttactactacaccgtctacacatcaacaggttgatgtaggattgttttagcggaatggctagctagaaaacttccgcaagtttttttttcccccaaaactttcagatttgttgtcttttgccaaagagaataataaactgctgcaaaacagaatatcactagcagattcagagcatccccagccctgttgagcagttgaactgaaccggtcccatatgaatcatgcaaatatcatgatacaagcacagctcattaactcattaactcgtattgtgaactgcgatactgtctttgtttggtctactgcaaagatggtccaaatcaataggtccactgctgcttattttatggaaccgttttctgcataattgtccttatctgacgtaggcagctctatatatatttttttatctatatggaaccatttcaccttacaccgctaagcattttcttcgaccaattatttcagtggcttaactaactccaactacactgagctgagccagctgtatgagaagtacaaggtccaaggtgtgtctttgacccgttgcctttgtatatctttgtatattgtaattgcctttgcatattgtactccttcaccatggaagttggaataattatctagttcatggtcacatggatcattaagctttagttattatatgtgctagtagttcttcactttaaacaattccggttgttgtggttcaaaccgctaaggaatattaccaatgtgtgatttgtaggctttgagatattggctttcccgtgcaatcagtttggagggcaggaacccggctccaatgaggagattgtccagtttgcttgcactcgcttcaaggctgagtatcccatttttgacaaggtaagttaacgcaatacttttaactcaatcagagtaattatcagtgtgaagcaaaatgatataagtcacatgttttatctatcgaagaggtgtttctgtggagtagcattgagtctcttttttttttatctgtcaggttgatgtcaacggtaacaatgctgcacccctgtacaagtatctgaagtctaacaaaggtgggcttttcggtgatagcatcaagtggaacttctccaaattcttggttgacaaggagggtcgcgtggtggatcgctatgcgcccaccacctcccctcttagtattgaggtaatgtcctgcactaccacttgcaatctctttctacaggctgaattgttaggctctcattataacatttccatactatctctgcagaaggatatcaagaagctgcttgggagctcttaaacctaaaggtcgggatctgtagagcaacctgcacttatgcactgtattcagcactgagagttgtattaataaattggtgacatgtacttcacaggttgcatttgcactatactccttgcatcctgaatctttattgtactctgtacctgtatagttttcatgtcaataaatttccttgctgtatctgtgtgtatgcatctcattggatcctttgtcggcgtgcactgtattgttcgtttattaagatagattcggccaaataaacatgcaagtatgcatttgagctgtcccaaccatggcaagcacaagaagttgcatggggggatgccttggtcatgcgttccaacagtttaagatgaatcagagcatactaatggcattgatgaacacaatctttccctaactttttcctcctgtcaaatggtattaccttgatcaatgtcatcaatgccacaaggatgctcagaaaaaatttgatttgttagatgcatttcataatcctgtgtttgtcttaaatatgactccatacaaatttcctggacatgcttctgaataagcttactatgtgtaagtgatccatttttttctgacattattagtttagtactcccttcgttttt

SEQ ID NO: 8623 - DNA, 56612 bp, Oryza sativa
gtcatctattaaaaaacggaggtagtattacttttcatgtgtaaaacaatgcccactccgcaggtaccattccctctacaaaatttatcagtgtaaagctatctccatatgtactccctccgtcccataaaatactaacctagaatgagatgtgacgtttcctagtttggttttttttttatgaacggaaggagtagtgcgctaacctttggtcaggtcaactagcttatgtctcatgtgcgattctaaccatcctataatgtgctatcaataataagttttaaaagaagttatgttgttttaagaaacatgtttatcttgtggacagtttaaaagaagtaacataaataattgtgactattatctggctttttacgggaaacgttgtaatgtatatcaattataatagccatgtatgctaaaatttaatgagataaataaagctataaattaaatttaatcttatttaaatatatagtttagaattttgccctaaaaataagcacgcaagttttcttctctatttattggttacatggtacaattataaatgatgattggggagagaataatgccatagattgagaaatcaaacttttcaaggtgttgaatgtaaatatgtgagaatgaatgggtacttttgcaaatattttcactgatcatcggagtgcactgtccttcccgagacttcaggagagaccatataatttccacatatccttcatcgtacggttacgattcattctagtgttgtttttatctgcttttcaatcacagtcatcatgcaccacatggcgtggctctttccgtttccatgatcagattgtattttcactttggcatgtcaatgccgcaatgcctaagctttatggatgcggcttccctgttcccaatttgctgttcccttccctgttccttcgaggtgcatgctcctttctcgagagatatatgacaccatagttaattttttccccatcggatcttttttttcccgatcggatctttttttagtacctaactattataataagtggcttaaatcacgttatttccaattaatttactactaatacaagacatgttgtttgtatgaggagcacacactgtgctgaggtccatcagaagttctaacaatcgtcttgtgacacctgaaaggaacagggaagcgaacagcaaattgggaacaggaagccgcatccaaaccttcaatgccagaacttgaggcagaagtgaaaagggcacatcagacactgcattaacaggatagcttgatcctttcaactcaggctctgtgtagttcccaaaagaaaattttttacactgacaaattgaatatttggacacatacatggagtattaacaattacatagattacgtgtaaattgcgagacgaatcttttaagcctaattgcgccatgatttgacaatgtgctgctacaataaacatttgctaatgatggattaattagtaggggtgaaaacggatcggattcgggtggatagtagtcataccatatcctataccatattttttaatcggattcggaggcggtgcggataatgtgcggatgcggatgcggagcggattattttggatgtcggaaatggtgcggagtcggtgcggactcggctcggaaacggataaaaataatcggatgtggcatgtatatacaatcgatacaacatctgatcatctgtacaatgagcaacaatgactcacaattcacatgactcatgaaagcaccgatcacatcataatataatgtcaagttgttaacgattgacttgtcttctgtccatgtaatcgacacatatagtattgacatcatgatatatcgcattcacataacacgtaagacatagaaattccacaaatattagaaaaaacaatatcacatgacatgggtgatagaacattggaggtccacaaatgatgtccaattctcatacagtactactaataagttgcatattgcatatgacataataacacatatgcagctaaggtcagaaggagatgatctagagaagtagacttcaattctgataataacacatacgacagagttggtgctggagatggcaggaggcgtcgccggcgccgagacggagacaaccaggtgactttggggtggagaaggtaggccgcggcgccggggtggagaaggcaggtggcggcggtggcgctgggtggagaagtcaggcggcggcgtgggaggaatggaagaagagaagtctcgatgaaaaaattggttgacacgacgccgacggagtcacggactgaactcctagatagattgatggataaggtggacgtggatgggctgaatgtttacacgatgaaaatgctcgtgtcaaatgggccaaattgagaggttatatgggctgtgaaattcggattatccgccaaaacgtttatcggataatccgcttaaaatagcggataatccatatccgccggatataaccgataccatatccgcatccgcatccgcatccggccggatatctaaaaacccttaccatatcctcacttcggacggattcggagcggataatatccgtttcgttttcacccctattaattaggcttaataaatttgtctcgcagtttccttacggaatatgtaatttgttttgttactagattacgtttaatactttaaatatataccgtatatccgatgtgacaaacaaacccaaaaattttccccaactaaacaaggcctcagtaagtttacttcatgatctgcccccaactaaacagggccactaaattgatcgagcagtggctgacatggaagcctgctgctgctcctatggccggaatggcgacgtggccagatgggccttgagatataagatggtggcctggcccaatggcaaagccaattggattaccagaacagaatcatcaattccaacgtggcaatctcggtacgtgattacctcgtgatgtaagcaacgaagtcatccaggtctttgcgcgacgaccgacgagccggcggcggccacggaggcgcggatggcatctccgagctcccgtgcacgttgtcgcatggctactcctccgttagaaagcatggcctcctcgatggcttcctggatgtccttcgccggcgtgacctcgttgtgcttctcccatggccgcacgaggacgccggccttgaggtacttgcagaggagctcggcgtcccatggctggtcgcagtgcatgggccaggcaagaatcagctacccgtggctcaggctctccatggtggagttccagccgcagtggctcatgaacgccgccgtggcgtcgtgcgccaggatctccagctgcggcgcccacccggtgatcaccagccccgtactcccttcgttgtgctgcgtgaactcgcgcagcagcttcgcgtggcggctgatgatctcgccggagtcctccgcgaatatgtctccgcggtcggcgtcccgcaacacccagatgaaccgctgattgctgccgcgcagcgccgatgcgagctcttcgatttgctccgctcgcagcgacgatgtcgtgccgaaggagacgtacagcaccgacgcagggggctgcttgtcgagccagtccaggcactcgtggcgctgccgctggtcgccctgcttcgacgcgttcccgtgcagcagtgggttcaacggtccgacggcgaaaaccttcttgccgtcggcggccaggttccccgcgacgacgtcgatgaactcgccctcgagcgcgcgacacgtgttggtcaggatacctctgggaggcgacatctccttggtcgccctcgtccgtctgatgtaatccacgaactcctccgttgcacagtcttccacggtgatgttggtgaggccgttctcgcgcaggatccgttggtgctcctggggagcaatcctcctagcgagcatcgacacggccaagcagtacatgacgaacgcctcgccgttgcgcagccgcgccgcctcctgtgcggcgaagtcgttgatgcggtcgtacacgacgacgacgcggcggtaggaggcggagagcttgtcgaggagagccgcgagcggggcgggcgcgccggcggtgtaggcttcccagaggggcatgaggtgggaggggaagggcgaggcggcggcggggtcgggaggcggtgaggcgtacgtggagatgccgaggtcgtggaaccggacggagcggagcgccgcgtcgtccccgccctgcacccgctcgcgggcctggcggacgtgagccgcgggcgccgcgtagtgcacgtccaccccgccgcgcgaggcgagctgcagcgacaggtgcaggagctggttgaggtggccctgcgccgggaacggcaccgccacgacggccaccggctccattgtaggctcgatgactgtgctcaaccttgatgggcagatgcggctatatgtaggctgcgggcactggcgtttgcgggtcagagtgagctcagccagtggtgaatcaaaaggcaacttggcatccgtgtggaaatgggttgcaccggaagcttccgctgcaccgctaacggctagaattgctccgatgcacagccgactagcaaataatattccacagtccacccggctccattgtgtgtcataccaccatttttctgcgggagaggattctaataactcgagtggatgtccacccgtttattgcatatgaactagatggttatgaaaaatttttaaaaaaattgacaagatatatcaatatgtaatatatcactccacaaacatgcaagttcaaattcaacttctacaggttgtaacaaaaataacaaatttaattgtaaatatacatatagtaatttgagttttgtttgttacaacttgtagaagttaaattttaacttctatgtttatgtattgatatattacatattgatctatcttattcatattttttttatttttttataactatttagataacatacaataaacgggtgaacgtccactcgagctgttaaacagtttcccatttttctgcgcctcgttcggcggcctatatatgaggttattttttcccaaagacaatgttgtacgtagtactacgtatatgcttacgtgcagacaccaccatacacatccatccatccatcctctcaagcatgcggttttgccggctgcagattggaccacgtggcaccgttaaaagttgagataaatacgagaaattacgaatggtaaaaaactccacagcggtaatttcgggtgtttggtctcgcgcggagagtcacgtccttgtcaatctctctcgtggatgggcttgatcagcccatgagcgtagccaggagccatgttggcccatcactatgcgtggacagtgcgggctgagccaacctcgtgcagtcgtgctgagctgcccagcctcccacgcacgtgggatgtggcttagccatgttggtgcacaaacattgctacgggctgaacgccaagccttgtggacagtataaacatgttgcagtatcaaatcctaaaataataataaagaagtgtggtattttgaaaattgaagattaaagatgtaggtgccaaaccaagctgttagggcatccacaatgtacttcaaaattaagtagtccataagcaatataatatttattcagctacctagcaacattgtggaattagtccataaaaaaaaataacaaaagctacccataagcatatgggttgcccatagagaataaaatatattatttgtctctatctcttctctcctactaatactatttgctatccatatagtttgtgaaggttacaatagttaaagttcatatatatgggtctcatctctatagactacttttgccatatacattgttgttgcccttagcatcctgtattatcaaagtaatattaacatacaaaccataaagtagcaaagcttttatccttccttcaaataacaaataaaatataaattgtaaattgtaaaaacatttaatgctaactctacgagttttactgtttagggaagtgtggatataaacaactccaagaaatacaatgggtgaaactgaaattcctaacaagcaagttaacaatgatgttatcctatatctatattcgtagagaatgaaaaaaaaaagaaccagagaatgcaaaacaatcagtactagtatatgtattttcttataattccccaaattcaaacagattatatgtaaatactttcaattcacaaaagtggcaaaagattccaaaaatacagttttctacattaaactaactaccaccttgaatgctttttaagcatatattactatcatactttcatttttttctcttcataattctacaaacatgaaactaagaacacactaaaacatacctttaaaagtatggtgtttataagaaattttatgagtatgtaactaactgctataaaaatgtaaattccaaaaaagatttaaatagcatatatataatctccaacaaataagataagacacatgcttaattagcgatcacgccaacaagcgcgcctatcttctagtacatctttctattattctatacacattcgtgagtatttctttctaattaatatattttgattttgaagatgtggaggctaacggtgaatttttgagctccactaaactctattaagatccgccatttggaccttcacatttcctaattgttatttccaattttttcgagtgccgggggtatatgttcgtaaataaataataacgtgtttctatatctgagtaagattgttcagaaaaaaacaaagactctgactcaccaccctcttccccgctgcccgccgaccttgccgctggtctgtcaccccggatctggacggcaccttctccgctgcctcggtgcacctgcccgctgtagtgtcctcgggggaaggaagggagctccgccgttgtgatccttgcggtcagctggcttgtcggtggcctgctcaagcagcggcgatgcggagaagaggagggaggtggcgggcgacgcgggcgcttggtcgccatctgatggggctggagcgagacacaggtagtcaggcagttcccttgaaaaaatatatatcataccaccgttcataaatataatcactttaggttgtttagcgaaatttgaagataagagaaaatattagttttcagtgattgatcaaattttaaatttggaattgttagtatccccctggtaggatcctcatagtctgaaaataatttgaatccccgtaaattgagatcagtatttcagaaatgcttatattgctgacataatttgaattctacaaatacttatatttgataacagagagagtagtacatatattttcctactgtgagcatttttcaaatttaatatattttgacgaatgattcaaatctactccctccgtccagatgtgatacatcctagtactacgaatccggatatacatgtctagatttatagtgctataatatgttacatcatgttctagatttgtttttaataggacggagtatagtatatccgaccgctcgaagaattagagacattcctgcttcatcttgtgatgtagccaacgaagtcatccaagcctttccgcgaggacccgccgtctgccacagacgcgcggacggcctcgccgagctcctttgcccgccgccgtattgtcatccctttctcaggcagcatcgcctcctcaatgacctcctggatggcctccgccgggaccacctcgctgtgcttctcccatggcctcacgaggaggccagccttgaggtatttgcacaccagctctgcgtcccatggctggtcggagtgcatgggccacgcaagaatcggcttcccgtaactcaggctctccatggtcgagttccagccgcagtggctcatgaacgccgccgtggcgccgtgcgcgaggatctccagctgcggcgcccacccggtgatcaccaaccccactccctcggtttctgcggtgaaccgggacagcagctccgcgtgccggctctcgccggagtcggcgaatatgttggcgcggtcggcatcgcgaagcacccagatgaacctctgcttgctgcccttcagcgccgcggcgagctccgcgacttgatcgccacggagggacgacgttgtgccgaatgacacgtagaggacggacgccagcggctgcttgtcgagccagtccatgcactcgtgccgcgtctggcctggcgtccgggcggtcgcgtcgagcagtgggttcagtggaccggccgcgaaaagcttcagctctttgaacatcgggtgcgtcgcgatctcgtcgatgaactcggcctcgagcgcccgggacgtgttcatgagtatgccggagctggccgcgttctcttcgtcctgctctgcccggctgatgagctccacgaattcctttgtcatgcaggcctccacggggtggaacttgaggccgtgctcgcgtacgagccggtgctcggggtccaaccacccgatgttgtacgacatggccacgcactgcagcccgaacgcctcgccgttcggcagacgcgccgcctgggcggcggcgaaggagttcaaccggtcgtacacgacgaccacgcgtcggtagctggccgacagcctctcgagcagcgcggcgagagggacgcgcgccgcgacggcgaagctctccagcatgggcatcaggtgggacgggaagggcggggcggtcgggtcggggggcggggactcgtaggcggggacgtcgaggtcgtggaagcggatggagcggagcgcgtcggggtcccagccgtgcaggcgcaaccgcgcctgccggaggtgcgccggcggcgccgcgtagtgcacgtccagcccccgcgacgcgagcagcagagacaggtgcatgagctggttcaggtggccctgcgccgggaagggcaccgcgacgacggccaccgattccaccgtgccaatcgccatcgagtgctcttgtcactggttgcttgtttatgcttgtctatttctaggatttttaatgccccgtagcctatacacttttacaggttatatatagagttataggcacacacgcacgaacagtcgaagacaaatatgtggggaaaaagttacatcagtagcttccaattcccattgctgatatcgcgcagatccagagcatcagagattcgagggctgacacggacgcacatctgttcccgccccctcgcgctcatccgcccttcctagaatgctcgtcagcaacaacggcgcttccagccgctggctcaatcattgtcagagactgcaggagcgtggcgcgctcgtcatcagtgacgactaacgacggcgtcggcgggccgatcgcttgtatcgcggcctctccaaaacggtacgtaccgccctgttgcggctctgcgatgatatcgttttgtataccattttggcatgtgctctgtatctcgattctcgaggcagagaagttgttggttggttccagggaatcttactgtttaaattgtactacgactaatgcactgttgtcatgtgatgttttagttcactaatagtatatgcacttttggtgcattagttaaacttgcagcaaattcatgtgtggaactgtggatcgacgaccagggcgtcgcacatcgcacatcaggctgattggatactacagtactactcccgtgcgatgaggctcttggaccagaccggcctccttcttcgttacgtacgttacgcgaagatgccatcgtccggcagtcggcagagtcccagagattactacatagccgttctcaccgtgtggtttgtttcttcctccctcgcgcgcatgcagcaaacgcgaagaatctaccgcacggtccgcaccgcgtttaattttctgcatggtcgtcgccgtccttgctgcggacccttgcctctgcgtcgttgtccaaattgggtgccacgaaaaaaaggcccaactggctgatcaccacttgccaattgtaggtcgagcgccggcaggcaagttgctcgactgctgcacttgccaacttgcatttattgtacttactcctatcctacaaaatgtatgtcgttatagcagtaggggtaaaacgattatataaaacgaaaaacgagataagttattaacggatgattagggttcaattcattttctaactgaagattattactggtacgtaaaatgagataagttattaatggatgattaattaaatataaactattataaattataaaaaaatatataaatatacctattgtttaaccgttcattaagaatgttaattgaaaataaggaaaagtcaaaacagagatgttgaaacgaactcaaccttacaaaatgtaacaaatgctgtactattttatgggggttgctatatgttttttcgattttttttttgcgctctccccatttgctggcgcgttttccttttctcgatcttttaatctttagcgagtgtttttttatttttaatgtattttacaatttagatattttatctcaactttcaaaacattctatttaaaactttcaacttaaaattcaaaacttaaataaatcttgagttgaaagtttttaaatcttaactcgaaagtttaaattttgagtcaaaaattttcaaaatttgacttgaaagttcaaattttgagttgaaagttttaaaaatttgagttgaaagttttaaaaatatgaaatgtaagtttatatacatgtatgtatgtatgtgtgtgtattagtagtgctatttgtagtatagtagtagtactactaccaccaccacctagcagcagcaacagcaatgctagtagttctagctgcgcgtggggcccactagtagcagcagaagcgctagtaggcgctagtaataacagtagtaatctcttcatgttgtaagactttcaagcattgtttatattcatttagaagttatgtgtctagatttattaacatctatatgaatatgggtaatgctagaaagtcttacagaggaagtagtagactggtactctagtagtagtactagtagactagtagtagtagtaggagcgaactgttcatgtgcccacaccctgcgcgaccagtcgcgcattagcccccccccggaaaacttgtctgtcggcctgtacacgggccacgtgtggaggggaggaaaggaataagttcaccagccgtcccttaagctttatgtcgagtttgtataacatccctaatccttaatactagaaattttcactcctaaactatataaaaccgtgcaatttatatcttatagcagtactgatctctagtttcacttacgtggcatcctagtaacaaaaaaaaaaattataggacccatatgtaagagagaagaagaaaatgtagggtccacatctcttattttttctcttttctcttttcttttctactctctcttatcttcttcagcgagcctgggaggccgtcggtggcaaaggggggagaggtggttcaacggttctgggagagagggggaggtgtccggtgagcccgtccgagctctgccaccgccttgagctccatgcgaagggaggagggaacggggtagatgtagagattgacgaaaatcttggcatggtagacgctggacagggtggcaggtgaggatgacatgtgggcccgcatattttgttttaattttttagtttctagttttgctcctaatgccacatcagccactgcggacttaccatgcatcgagggaccttgtttgaatgattttgaaagttgggggcctcgtttgcatgattcatggacgattttgaaactcaacgacaaagcgagagacctcgagtgaactttttcttttcaccatggtagagcaatgtgagcccattagaatatgctgggcctgttggcccgtccggcatacatctaagcacctgtaggtttttgtttagaaaaagaaaaagataagaccaaatatttcgtttcaatcaccttatatcaaattttaaattgttaaaatcccctcatagcacttgattgtctgaagatgatttgaatttccatacaatggaatcagtatttcagaaatggctactgcatacagaatttgaatccgggaaatgcttatttgagaatggagggagtggtacacatattttcctacttaggccattttttaaaatttgatatgtttcgacgtaagattaatatttatagcatatccgaccactcgaagaatcacaggatattcctgcttcatcttgtgatgtagccaacgaagtcatccaggtctttccgcgaggacccgccgtctgccacggacgcgcggacgacttcgccgagctccattgcccgccgccgtattgccatccctttctcaggcagcatcgcctcttcgatgacctcttggatggcctccgccgggaccacctcgctgtgcttctccaatggtctcacgagcagaccagccttgaggtatttgcacaccagctctgcgtcccatggctggtcggagtgcatgggccacgcaagaatcggcttcccatggctcaggctctccatcgtcgagttccagccacagtggctcatgaacgccgcagtggcgccgtgcgcgaggatctccagctgcggcgcccacccggtgatcaccagccccactccctcggtttctgcggtgaaccgggacagcagctccgcgtgccggctctcgccggagtcggcgaatatgtcggcgcggtcggcgtcgcgaagcacccagatgaacctctgcttgctgcccttcagcgccgcggcgagctccgcgacttgatcgccacggagggacgacgttgtgccgaatgacacgtagaggacggacgccgccggctgcttgtcgagccagtccatgcactcgtgccgcgtctggcctggcgtccgggcggtcgcgtcgagcagtgggttcagtggaccgaccgcgaaaagcttcatctctttgaacatcgggtgcgcggcgatctcgtcgatgaactcggcctcgatcgcccgggacgtgttcatgagcatgccggagctggtcgcgttctcttcgtcctgctcttcccggctgatgaactccacgaattcctttggcatgcaggcctccacggggtggaacttgaggccgtgctcgcgtacgagccggttctcggggtccaaccacccgatgttgtacgacatggccacgcactgcagcccgaacgcctcgccgttcggcagacgcgccgcctgggcggcggcgaaggagttcaaccggtcgtacacgacaaccacgcggctatagctggccgagatcctctcgagcagcgcggcgaacggggcgcgcgccgcgacggcgaagctctggatcatgggcatcatgtgggacgggaacggcggggcggtcgggtcgggcggcggggactcgtaggcggggacgtcgaggtcgtggaagcggatggagcggagcgcgtcggggtcccagccgtgcaggcgcgaccgcgcctgccggaggtgcgccggcggcgccgcgtagtgcacgtccagcccacgcgacgcgagcagcagggacaggtgcatgagctggttcaggtggccctgcgccgggaagggcaccgcgacaacggccacggattccaccgagccaatcgccattgagcgcttatgtcgtcactgatatatggttgtttatgcttgtctaccttccagaattctagtgcccagtagcctctagacttgcaggctttatataggcacacaataatgaggctgtgtttagttccacgctaaaattaaaagtttaaagaaattaaaacgatgtgacggaaaagttaaaagtttgtgtgtgtaggaaagttcgatgtgacgaaaaagttagaaatttgaagaaaaataggtgaatagttaatttagcccctcaagtttcagcgaaggctcaatttgatccttcacctattattttgtccacatagatacttcaaatatttgttttggcttgaaatcatccttggatccacttaatatgccatatggctatttctagtcaatatttctattagaaaatgtcctttttgcccccaatttatatacatctatatactagaaaagagaaagccaacataaataaacaacattacagatctacttcccattatttcaacatgtgcacatgaaacttaagcaattgctatcgtatacacttgctaatacatatttttttttcgttttacataatatactatgtattatctataaaaaaaattcaagcatgcaatttctctcttatatatgtgaatgatgaggggtataagtatcatttatgaagagagttgttggttaaggataagtttgaactaaaatgaaaacttgaaggactaatatggatagattgaaatatcaaggactaaactgagcctcagatgaaatttggaggaccactttgcctattcacccaataaaaaatattagaatctaaacagggcaagagttggagtataagagccccatcggtagaactaaaaatcaataagcaaaagtcaaaatttaaattttcaaacttaatttttaagtagcatattcttataccagatgtgacatattcttgtatcacaaatatgaatatatgtatgtatatattcgtagtgttagaatgtgtcatatctaacattatagtttggttttttatgctactgagggagtacaacagtagccgttctcagttctcaccgtggtttctttctccctgcgcgcatgaatggtgcaaaggcgaagagtcaccacgccgcgtttaactttctcattctcaccgtggtttcttcctccctgcgtgcatgaaccgcgaaaggcgaagagtcaccacgccgcgtttaactttctgcatggtcgccggacccttggctctgcgtcgttctccaaatcgggtgccacgaaagagaggctgagtggctggatcttgtagtattggctgactgttgctcgctggtttaatttgggagtttaggacggtagcggctggatgagatggagatagccggacagggaggtgataccggccggatatatgacactgccgggagatttcgacatttattttgtagaccttgcagttgtggataaacggaagtagcttgctgcaggctgcaccgtttgattgattggaagagtgtggcattcaccccatctcaatcgatccacaactgctatttattggctggagttacgtttctgatggagagatttaaataaatgtatcaattatgtcctgcacatcagcatcattgggtccatagctcagtggtagagcatttgactgcagatcaagaggtcaccggttcgaacccggttgggccctatttaacaatttcacatttttacttttgacggtgaagtttttttttttccacagtgattttgttgctgccctggcctatgtttgacggtgaagttttttttttccacagtgattttgttgctgccctggcctatttgagctccaaaaggagagatccatggagttttttttccacagtgattttgttgctgccctggcctatttgagctccaaaaggagatatccatggaattttccctacaatctctttgttgatgttctgatgaagccgcaaacgatttacatttgacggtgaagcttttttttttccacataagcccagttagggaggtgattttgttgctgccctggcctatttgagctgcaaaaggagagctccatggaattttaccaacaatctctttgctgatgttctgatgaagcggcaaacattttttcctacatttttgtcccgatgatgctacaaacaattgaataatagcccactagagaaactatattttctaaactttattttcattgtggctaaatttgtttcccattccagaaggagccacaaaagactaaataatagtccactagaaaagttatcttttatacaccttatttccctcgtggagctacggacgttgaataattttctttcctgatggagccacaaacgtttgaataatataagtgaaagtgatcattgaaaattattattattttcttcttcttcttctgagaagatcgctgcaatttttccgcacgtggtgcttttggcctgtaggagatcactaaaattgcttgtgcatggtttcgtacatcttttttttttaaggaatcaacatgagattgtactatttcattatttcattagatatagacgtaaaaaaaaacttcccctagaagtaaaaaagagctgtacaaaattacataagcgccgtagttaagttgggatgaattcttcaagtcgccttgcgcttaccattatccaggttcttgcctcttcctttatttttgccataaggttggagactgccgttttcttttgctcgaagatcttttgattcctttctttctagatttctcaggctatgagtaggattaaggatcataactctttcttggacactttttttttttgatagtaacctccaaaacagttctgaggaatgttgtgcacagtagcacggcaggtaataggaaccccaccctgagcatagtgccgtggtggcgccgtgcaaacaaagcttaaggcctattcgtttttgaagaatttcaaatgattcagattcttgaggattaattcctctgaacgctatttagttcataggaatgtagctatagaaaaaacaaagaaattttcctttcctacaagttgtaaagagaaggtatagtgaatttttcatccactcagaactcatggaaaagttcatatggatagaaatgtgtatgcattcatattccttcatttttcttttttctatgtgtcataattccttcaaaacagatctacccttaagggtccataatgtgatgaaaaactaggtattaagcattgaatgcactcttgctaccaggtggcaaccattgtaaaagtcataagcaactaataccttatcatagagctactaccggtacataagaaataaatatcatcatttgtacagtaaatgagtagtagaagtaaatctggcacatgcaagtaaaatattagtagaagaaaccatggagtcattgtttcgcaccgttcacaggaatcaacttttaagtggatcctaccagtagcgcaggtaaggggagtgccaaagggtgccaacacccccctatccaaacactaccaccactatacccctatgtttttactctatattaagttagctaagataagtatctatctagtttattttgtgtagcttgaaagtattatcagtttagttagttagcaagtctaaaaatattagcaagaaacatgatttacaaaactagtttgtgatttctcatatttttcaaagtaaaatagatgatacttatttgtgagattattttatagtttacattaaaagaatttagcaataaagactagttttaaacttccaatgatattattaaagagctaaaattcaagtttttcttaaagaactagtttacatattgcttgttattgacggtgactatttgatctcctttactatcaatattagttatttggtctcacggtttatctttatcccacaccccctaatctcaaatcctggcttcgcccctgatcctaccttacttctcactcacacaaataagcattgtgggtaacttcatatactactatcacctgtatcttgggcccacgttactactgagtctggcaagatacgttgctcatgccctaaaagaaacatatcgctgcaacaaagtgacagatgtaggatctggctagaaaaaacatcacaaccagttcagacatgagtaacatagaaaagttaagcccggccatcgtggccgccgcagccgccgccgccgtcgtggtggtggcaaccattgttatccttgaagtcaccatcgagcaccgccgccactggatccgtccccttcaccatcaccgccgccgcagcctccacctcctttgccaaagagatggaatatataagctagtatatcatattcttgcaaaaaaaaaagcattatcacaaattccaagaaagatataccatcccaacttcaattttagcaacaactaaaggcatgttcaaatcactgccaaaatgaataatgatatggtttagaaacatccatatatttattaattttatcaataatggtatgctttaaattggcatctatgtgaacggggccctaaatcactcggtccgtggagcgaccggtgagtcacgtgactcacgttgacgatcgttgccttctgcggacgcgctcccatccggcgccacctccgtagttgccacctccgcggaacgcttctcgccatcatcgttgcaccgtactgcgtcggagcacggctgctgcggcgcctgcgccggcggcgtcatcatcagccgttcttgctcagctgcagcagcggcttgagcctgatcgatacgtcgttggcggaagagctccttcacgagctgccaaagcacacgcctcgcgtgcatctcgggcgtctcctgcgcgggccgtggctggacgacggacggcgacggcggtcgtcgcatcaccagtgtccgatcaaaggagttgccggagttagtaggcgctgccgttgccgggcgaggacgcaatggcgtcggagggacgttgttgaatggccgcgcctgcggccgctgcacatgcgccgggcagttgcatgccgccggcgcccgttgcgccgacgacttcgtctctccgttttgttccacctccgccccctgcgctggcatcatcgcttgcggctgttgtgccgacgtcgtgtgtgccaccacctctctcccctgtagatgctgcgcctggaggttgtacgccattgccgcctgctgctgctgctgctgttgcagaagcatctggtgatactggtagttgttgtacgccgctgccattgccgcccgctgtcgttgtaccggcgacatctgtccgttgcttgccacctgcgatccctgaacaacaagcgcctgctggccgttgcacgccggcggcggccgttgcgaggacgaggcctgcccgttgtctgccaccaccatcccctgctggccattgcgtgccgccagctgttgcagaaacatcatttgccgtctgttgtttgcggccgtcgccatttgccgtcgcatcatcatctggtcgccgtataccacctgcccgttcggcattcgcatcgggccattgaccgtcgcgtgctgccgaggaggaggcgccgttgcgtggccggccggacgtgccatcgggtgcccggctcgattgtcgtgcacggccgttctcagcggcatttgcatgccgccggcgccgccgatgtacgacgcgggcggtggcggcggcgctcctcccatggtcagcttccgctgctgatgcggcctctgcgccacggcggcgtgctcctccgcaggcctcttattgcccgacgcctcttcgctggttcccattgccggcccgggctgcggcgaggagaattctccatcggaagaggcgatgctggcgattgcttggggcccgggctgcggcgaggggtgctcgacgagctcctccttcggctcgaaccggaacccgagggggaccttctccttcttgtctcctctgccaccggtgcccctcttctcctctccttctgccatatcggctattcaacctgcccaatcgaggttgcctggataatggctcaaataaatttttataatcacccgacgttaagtttgcaatttgagatgaactcaaactctatggatggcaggagcagctggagtccggaacaagacgggtttgattccaattcaattccaattcaaatcggtaaggaaacggtaagaacatgagcatatctatatttatacctataattaaaaaaatacgcaaggtttccgtaattttttttatttttcaccttttttctttttcttttatcatttcctttttttctccgtccttttttttctttctgtccgcttctttttttttcttttttatccgtcctttttttctttatttccgtccttctgaacctttttattttttttattttttttctgtttttttccatccattgtttttttcgtccgcctttttttcttcaccttttttctctttttttcatccacagtttttttacttttttctaggcctttttactgggttttttttcatactttttttctttgtttatgtttttttagttgcattttttcgcatgcggtaaggatttttttacgtgccatattttttttgtcgcccggtgttaacagtgaaatttggtaagtccggagtagtcatcggctttgaagttctgagattagccgatgagagttgtcaagtcgtcagttgtcggattcttgctatattcggttaaggagattgatctactaaatgaagcttatccagaaaagaccgagttcaaagagaatgcggcatggcaagttatctattaattagaaataatttgttagtttccttttatctttaggaaagtttctttcttgtccggcaagaacttgtatcaacacatgggtataaatatgtacacccggggtctatgtaatctatcttcacgatcaatacaattcggcgcatcgccaccttttaccttttctactttattttatcgtccggcggaacttggcacctgacgcggggctgcatcggtgttcgatctccggctaaggggtaagtccaatgtttcgctggcccgggcaattgtatcatttacgtcggcgtcgttcaaggctgcatcagtacattcgacctctttgattgctctggtttggatgatatatttgcctacctatttatcatatgtctatgttaatctagtcttagcatatcaatttagctctatcgactgcttctctttttagggtttctgccggtatcggctaaatcgcgttgttagattagattagcttagacatctaccaccctccaccctgaaaactcagtcaacggcttgattgcctagatattatgtttcttttcatacttagtgctgcatcaattaagtttgatctactaagtcgtgtttagaaccataatctctaggctgcttcttgattgccaataagggtttcatcgaggtttcagccaatgagttatctggatgttgcatcagctcataaggattgtatatacatataagctggatttagccgatgacaacaaaggtttcactgtttaatctaatcttgtggatttcatgacatcagacctccagccgatgtgtgctctaaccttcggatcgatgcttatttatcatatcattatttgccgattggtttatactggattatattgttattttatttcatcatcatcagccgattgcctttatatcattatctacattggacatatagccgatcgcttaaaccctatcgctatcggctggtatcggcatcggctattatcggctatcggctggaactactccatcggcttgtcagccgattggctgtttgatctactgtttgcatatcttgtcagttgcaggatcaaactgactggcatggctgcatctcatcaagatttggacctgcacaggagctaagcagatctcccaggccggtgtgttcaattttttcgtcaacacccggctaaacactagcgccaccacctcgtcgatctgccttcccatgcgttccctcctccaattgattgccaaaaatcaattccccgctactccctaaccattttactatgatttccccttttaactccgctttaattcactgaatttaatctccatttaaaattcaccctttttatcccgagttttgtcgcttcgattttaataaaaacggaaagaggatatctcccgagttttgtagctccgattttaataaaaacgaggggattgagtgtatcaaaaaccctcaatcaattttggaagatcgagaaagattcaaccggatttgatggggaggatttgatcggatttgatggggaggatcggttttggcatgtacgaacacgacattgtcttacggaggttgaagacaacagtcggctctgcgagctggacctacaactccagttgacaaggaaggaatgaaatgaacttttggtacaaaatcaaagagtaaaatgtatagcgatccaaaaatatttctacccgttgcaacgcacggatatttttctagttatataatagtgggcattttttctagtttatataatagttttaagaacctcagcatatatgtacttttatggcattggatttactatggataataattaaagtttgattctgaatactatgccaagtcaaaccacgcgttataatttgagacatggcatagggagtactgtatcattatatatgcaggggtgaaaacggtagggataaatatcataaattccggccacagatcgcttccacattccaccagccaattcaatcagccatttcattaattgtctaaaacattgttgattactacaccggtgtatgaaaaaatgaatttaaacagggagaagcgacagttgactctggcatctttaggacctgactaacaaaacaaatcagctgcacctgcatgaggagaatttcatgtacaatattgtggtaccttgggcctagtttgaaattattttttccaaaacttgagttgaatcttgaaagcttgtaagcaatcccttatttagggtgatttctgttttcctgcaactgataatcgtctggaaggaccatacattggagttttcagcagcacacactgaagagcacttcggacgccgtccactgccagggtttgagcaagattgacaaatataagcgacaatatgaaatcagatacttccttgtaagttgccaaaaaaaaaacaaaaaacaaaggaaggaaaagtagtcggacacttctaacttgttaagcaagagcatacatcactatatcagcgttgccatgcgcttacattacttgatttttccatttctgaacagaaaaacatagcaagagcgcttggctcatacagtttactacaagaaaaacatgatatctagtggtgattgatcctgtagggagcgatcaaaagcattcaaaagttgctttctattgatactaccatgccttaccatgtcatatatatcattctgaggtgtcatccgctgctcaataatatcggatcggctaccagcaaataattgtgctattgtcccaggaatatctgaaagtacggtattagtttgactgcctttacttgttagattgctggggggtaggatcatggcatttcattttgcagattgacgtgccaaccactctgatctggttaaaccacagtaccttgtgctacttccaggccacataaggaaattccagccaatgggagatccaccgacaatataagatccttgcaaacattgtcctgatttctttgtagaatctgttacactcggtttggcatcatgcttaatgtccacaggattgagtggtaccttctcaccagaactatgcataaaggatgcagcctggtctgctggacgaacttgattcttctctccgggtgggattttccctgcaggcatatttctggcatctcttgatgtaggctcatccatcagttttacaggcccagctgcagttgggagatcaagtcgcatttccttggataattccatgagaacttttatctctgcatagtgtgaaccaagggaagattgcttaaacttatcatcaataaacacatccagatataacattaagctccaggtgctcaacagattttgtaggccaaacaacagggatccactttggttgaccttttaactttacagataacatgtacattttcaaattgctaattatgattgggctaatgcaggatattatgaataagtacatcagtagccttttttacactaacagaatgaccgactaatgcactatatttcacttacttactaatgtagggtactaggcatcttattattggagtatgtaaccgatagttatgcttgcattaagaagcctaatacaatacatcatgtgacaatataagtaggaatttgtaaaagtgtataatgactataaacaacatgtttacaagttatagaaatgtaacaactgatgaaaaattgcaagtgtccaatcacaagggttttagatatcttaacagcacgaagtgactatggactacatctacagagaggcaatgactgtcaaatcacctgaggtaatcttagtgtgcaaaatatcaagagagaagtgtgcttttatgaaagaaggtgaaagtaaaattgttcgagtgatcaacataatctcctataccatactgatttctgtacttgcgagcatgatgataaaaaatagtcaaaaactcaaaatgtaatcaggacgttccgcatgtctgttcaaaaacaatataaattaggatttacctttcaggatctcaagagcggcatctttcttttgggtatcagtgcctttgcataacttcaaaacaacaaggaaaaagtaaacattttagagcggattcatgttcttcccagaacaaactgcatttacaattgtcaaaccaacagcaagcagggatatcaatttggtgtaagttatgatacaataatatgatttttctctggtccttgggaggtagagaggtatttttagtgttaatcgggaagtatagtctctactgagagcgaggtatacctcttgattaacaatatggggtaaaactctcaatacctcccaaagccacacatcagccatgaaaatgttcatttgcatagtaggacaatggtggcattaacaactcagttcagaatcatcacaccataaatttcagctagaaagagattacgcgcctaattgtattgagacttggcccaaaattcaacttcaactttaatttaaattctcccagagtttcaccagcaagcacagcacggagcaaatagcttcgagctctcgaactcgaaccattgatcacacttatccacgtcaagcaaaatcatcccatacacgttgcgctagaacacgggaacatgacctgttcagttgattgtgctgctgctgctgctgctgccatggcagagcagagaaatgccactcaacaaatatcttagggttcgaggtgggggagacctgaatgaagcggccgcggaggttggcgacggctgctctgatgttgtagtagggtgagtgatgaaaccccacctcctccagcttccgcttcttcggtgccgcggtcgaagacgtcggcggcggaggcgggggctttgggtcgctggtaggcgtggactctgacggcggcggcggaggaggaggcggggtggtggtcgtcggagcgaccatcgcggtagcggcggagcgtggggtttttctgcaaccttccctgcctactttggaacaaaggaatttttatcccctctatctcaagaggagtgtcagagcattagcggtatatagatatatagaacaccattaatattaaataaaatttaaataatatggataagaaaacatagagattcgtctgatgatttttatacaatatataggatgcatgtaactctatagagcccaagtccaataagtgttaaggtggatgtttgtaaaaaatatcaattttttatttgagatatcaggtctaagcaaagagcccatttgctccatttggtgcttaagatctacatttacaatatactgataagattcccttaggatatcccaataacatggttcatagataatataatattacatcagtcatacagtaacattgtacaataaatcaatacgaagaaaataatgaaagatatccattgggctattcggcaagcggacaacatcggctgtggctatgctaccgctgcgtgtgtgcggcattgttggtgcagctacagcgcaaccataaatctagtagccaaacaaaccctatatgcatatggactacccatataaaataaacaatactcctattatctatctctcctaatgttatctcgtgtatattactatatttaaagtccatgtatgtgagtcccatatatattaatcactttttgctatatacattgctgatgctgtgattactcttattcccacattgtagatactgctatactccctccgttccataatataaaggattatgaccttttacttgtactgtttgaccactcgtcttattaaaaaaaattatgcaaatataaaaaatgaaaagttgcgtttaaagtactttggataataaagccagtcacaaataaaataaataataattctaaattatttttgaataatataaaatcctaaaatataacactttttagttatgcatataaacaagcaatcacttattcatatttcttaccgcagaagcttatatttaaaatctgctttgaggctttttttggaacaacatattattgaaagaatttaagaggtttgcattcctctagaaattttccgtatagacttgtttgagacaaaggaaagatgttgaattaataaatgcatcaagaaaaaaaaaatctcacagctctttaactgtatggcgcaaaataatcgttggacagctgactatggcaaaataaccggaactggttcgacacaacttttcatgggcctctgggcgcaccgctcacacatgccgatacaacttcccatggcccatcgagaaccgcgagcgcctcaacttcccctgggcctccccgccgtttcgtttccgttctgctctcactgacaaagtggcccacaccgcagcaggccccacctgccattgtcgtgcggagaccgtgtccgggacgaactggagaggcagccgcccacacggccacacgtctgtcggcttatccgggtggggaagccatggccattggccaccaccacccaaggggagcgcaagcgcagaggacaagagcgcctcctcgtctggtctgcttcggccccccgctcgctcctcctgccgaagcactcactcttcggctgctcatcctcctcctcctcctcaggtcagcaagattcatccggtttcacttggattgtctgggatttggtagttgaagcatttggctattcttgttttgcgcatgctcctagttcgtctgcgtgggagaaaatactgaaaagggggtagttcgtgtgtgtgtgtgagcatgccccattgtttggcattttgttggagctgtatatatgtgtcattggctagaactttgcaatgtcactacctgcttaagctcagcaattgtgcttcagttcgtgcaaccttttgtactaagctgaacttttattttttcctctcctggtacctacaataaccttgtctcagatgcaaaaggatctctttagtaaaaggcactttgcttcatgtagtattattgctgtcagatgctggcaaacattattggggctcggcattcttttctttctcgaactcaaattagcagtttggaagagtgcgtcctacaagtagcaatcgtataccgcaatagtgtgaagtaagttgcaaatcaaatgcatatggcaatctagtatattgacaacttttgccgctatgcaagttttttgggagaacttaagctccccaaatataagttgcacgttttgcggaacttgcattgtccaggagaacccccaacctcccacaaaaactttgagtgacttaacttaagattgatgatttatagggccttctgttccctctaatatagttgcgcatttttgtacttgtactgatttctttgtttttaagacaggtcaagtttgattcttctcttgttctctttgttctttataggagcagaaccagacttgccacgaaggatttgataatctaggggttcgggacgagatgatattttcagtcagcttatttggtagttcccaccagtccattcacaaactttacaggaaatgctggtcaagtaactcacattctacactgaatgtgctttcacttgcaaaaactgtgggtcaaagtatgagaatgaagaggatacgtgtcaagcctcatgccactgacctgaagaatcgcccccaggcccatgaggataatgtgttctacaaattggtttataggctccctgaaaacctcagctggctgttggcgtcaccagaaatggctagaagaccaccctcaaagaagaaactaaagaaggaagaaatggtaagtagtaatcaatttggtgtgatcttggagtgggaaggagttgttgtggaagatgatgatccagatttggagcctcgagtttggtacgtgttatcacttgaagaggcaaagtcttttcctccagatgcagtgctgaaggaaattgaggggatgaggactgatcaggctattttagaagtcttacattggtcagaagatccacaagaagtacaaaggctggcagcacgcaaggaggtaatatataaaacattacgtggtagattctaccaactgcgaccaggtgttcttgatttcctgaacacccttgtggattttgacattccaatagcaatcacaactcctcgcccacggttgagcctagaagaagggataaaagctgttggtcttcaaggctactttgatgctatagtggcagcagaggatttctgccgagggaaacccgagggggagatgtttgaggtcacagcagggcaacttggtcttgagcctgatgtttgtcttgtgctgggtaactcaaattcgacaatagaatctgcgcatactgctgggatgaggtgtgttgcggttgcaagccgataccctgcctatgagctccaagcagcaaaccatgttgtaagatggcttgatcagctatctgtcgctgacctgcaaaggattgccaatggcgagattcttgggctcaggggcagaagatctgacatggacatggacatggagattgtgatcgaggagtgatttttctatatgtatggtgtgctaatattgccctatgtatatagctccaattgcaacctaggtaatgcattacattttgttaacagatcaagctgattaacattggccgttagcttgttaactgcttggtttcttgtaatgcagaaatggaacttttgtagcctagatgctttcgatctctagaagaattggaagctaagaaaaactcccaatctgtatctcttttaccaatgtaatatataatttatatagattattatgccttgtattttgttccactccaacttttgtgcagaaatgaatggagaagatctaagagcaatactggtaagctctaaataattttctatctaaaaaaactctagataactgaaaagagttcagctgttgtatttgcgacttcaatgtttccttagaataaaaacaataatttctaattctgtaaaactagtctttgcaggatcacaaaacattaggtcaccattcattgttgtgcaggattatcttaagcaaagttacatgtggtattcctctattttcttccttcccaccagcatctataattctgagtttctataacgtttatttttccttagcaatcaggttgagcaaaactcaacaaacttcagaacatgctgagcttactaatataatgtttatttttaacacacatcatccatgatcaactttactcacatttacgccaactgccactcatgacaaacggaagaacttccgaagaagaagtaagtatgtgggattgcttgtatgcatacaaaccaattagtttgtagagagtacctttgtacgaataaattcagagaaagcatatggtggaggcaatgcagtgcccaagttcacgtgtagagcttttctcagaatcacatttcagcagatctcatgccgtcatgcagtgcttaaaaaaaatgtcgacaaggccgcatacaatgaataggtgccacattcctgtacactttaagtgactgatcatatcgcataatcgctataaggtggggtgatgaccgcataaaactgcttacactttaagtgaccgattatatcgcataaacattataggtgggtgaccgcacaaaactgattaccgatttgatacttttttggaacattgaattctcatgtgagacagtaagcgtttcttgttcttttgtatctgcacaaacgatgaaataagatgcaaacaatctactacagatttgacagccgtgctgattttgtttcacatatgtactgtcataataattaaactcacaatagtcaactgtgtaaaatgtttggacttgtttctttttttttctttccttttttttaaaagaaaaacgtcaaacttcattgctaactggaaacacatcagacatcagagtctccccagtagaaggacgggtttcagaaaaaccaagtgttgaaacttgtcgatagcccctggtttgcactttgttattaacatgctaagcgtgtctatgatattttgccttggatctgatacctttgtcttcagttgatatgcctatttggatgttgaactgcataatttgggaaatgtatcttgtacacgcaagttttcacgtgtatacaccatacacagtaactaatacataggaatagaaatcaactaattttttttagataatggattataaaaaacccggcctctacaccttgtgagggtgtacacagcctaaaagtcacaaacacgagtacataagactctcccgttacatgggtaaaacataaataagttttaaagatggataacaagtaagaggaattaaaagctaagcttcaatccttttctaaagttccacctaaaagtagagaagagctccatcatacgcttctctaaaagcttggacttcgcgattacttcaatgacttcgtcttccttaagaagcaaagaccgaagccttgacaactgagttgctttgaaaattacctgagagagggtcgagattcatccacgccttcctggacttagccttttcaagtgaatgtctcccgctgctgcccatcaacctctcgctagccctttttggtgtcatcgacacctctccaacattagccagctgaacaatcttttcctgctgcacccctgcctcattttcctccaattcctccctctctaccctttcatacacctcttccaacacatcttggacagccacatccaagatattttcagccatcatagaaaaatccatttctttcgctaaatcagcaccttcctgtgcctctttactcccttcacccctatcatgattgtcatcggttaccatatcatcaacctttgacatttttggtcccttctcccttccttcattgtcttctccactttcctctccctctacattaccatcctcctcatctccatcccaatcctccaaattaaactccacttcttccccattctcatcgactcctttcttctccacctcaaattttaactcaaaataatgatccccaattaccacatcaagcaccttaggaatcaattttgggttaaggatagccacaaacaatatcccaaaaacattctttttagtagttttcatatcaaccaattatgttgcccctaaaagagagcctactgcccataaagttaaatattcccttagtttcttccttagtccaaaaaccttaacccataccttaggtagaagaaaaccctcttcttccacaaaccactcttcaaactccaccctcactcccatggctacccctccttccttcacatctgcacccccaaagttgatggcccattgcaattcgccctttgaagggaaaagaacaacaaaagcgtccttcccgtgcggcaccggctcccacttccatttagttggacacaacttgtggagaagagtgaccaacctttccaccgaaagagcaccaccaaccacacgcacaagagccttcttcgtgtttttcttgttcctttgaagcggttgatgtgggatgtgctgaaaccctaggccttcaaccgcatacccaaccgcctgcaccaccggctttggaagctttaggactggacatttgtggttgacatgctcgctacagtcgcagatatcgcaataaacatccaccttacaatcagcaacaccatgtcccttttgagtgcacctagagcaaactttcacccgtgcaccacccttttgatcatcccctttcttgtcgctaatcacccgcggctccttatcgaattccaacaaatcatcttcatcatcatcaaactcagaaacataattctttcctttcttgacttctgaatttaccgagacaaccacatctcctaccttgatctgacccggtttcttgcttcctcctccaccttttgcctcctccttcgtctgcgtcatctcaccggtccccctgctgccgccgccctccttcattagaaatcaactaataggaatagaaattgacatcccaagatcatattacagcccttctggaaatccaatgttccagtggaggagtgatatctgggtgagcgtcaagtataaatcttttctatttaagtcgacaatcgttgatttaatcgtggaaaagggctaattattttcttgagtttttgccggttgggctagaagaatagctatggtgcagagccaaaacaaccatcctatttaaactagcgataatgatgactcaagcttcttttcctatggagaagaaggacctgggactgggagaggcagcggatgatgtcaagggagaggataggggtggggaaatagaagtggatagtgatgccaacagtgatgatcgggtcaagcaagagaagagccgagaaggaattgatcctggatgctaatgaaaacacatcttctccgtttatataacttgtttaaaaaacatttataaaacttgcccattaaaacattatacaggctggaccattgatatttcctaatggttggcctattacgctgctttgttgcgtttcttttctagtaccttatgaatatgggtaaagtgggtattattatctctatacccaaaacttaaatggatgattcatctttactcataacctcccaaaacaatatagatatgggcaacaaatacctagttgcagccacagcagaccactttgtgatgcagcaatgttctctctatgttactattcactcaatctcgttcgagagataattgaacttgtgtgcaatacacaagtcaatgagcgttagaaatgtatttcgactagggtttaggcccatgggccaagctaagcactaggattcccggttccatggctagtggtccctgagcatcttctaggaatattgggattattctttccttcgtgaagagcgttgtctaagttttagcttgaatttcctttggcaattgtatgctcttcgaattacttgagagcttcgcgcgctttatccctcaagtgtattattgaagagttttcgatcctttgaggactcgactttaggccatcgtatttgatatgcagaaatccaatggtcttcaataaaccaccaatatggtcccttgtatccttggtggctttctttagcggatggggtaattgatggggatctctactccaacacttattacttatcagctactataaaagaggagtttcatccgttcgcctttcctacctccatagcttgcatggcatatacttctcctctcctgtaacaaaactgaataacaagtaggggtgggcagaaataaaccgtggaccgaacaccgaatcgaatcgagccgaactagtggtttctccagttttcgggagaaggctcaatttttactttgcgctgcttcggtcctcggtttagagatcagttttatcacgcatgaaccgaactcccaataaaaccgaagtagtcgtcctcagcggctggagcgcgcactatatcccgtcccgtcgtgagttctgggaaatgttgctccatttgaaggatgcataagccctcataggcccattgtgtacataatgttcttgtggggtctgagcaaacaatggcccaaccagaccactagtacgactgcacctccatgggtagagacagagcgcttggttggcttgatcggtagaaaccgacaccgtacttgtcaacgagtgatactcgcggactggatgaatagagtattaaggtacgttggagcaggggtctacgtagtacgacatcaaaacagacaaaagacaagaattatactggttcaggccccttatcaagtaataaccctagtccagtttatatgtgattgatgatgatgagaacagattacaaagagagtaactgaaacaagtgataccgatgagatcgtagtcgagggattcgacgagatctcccggcgagttggttcccgtggactctggcttcgtaaactttggtgagtgtgttggtgatgagatgcgatgccctttgcctctccctaggggtcccttttataccgtggaataccttaacccccaagtaaaacttggagatatgtaaaccgacacgatatactagagattttaccctttccgagtaggacttcggaaattcctaaacttatagatatattttccataacttgagataaattcctaaagcgtatacggaaacaacccgtatacgtgaatgtataccttatcggtatattccataagtcatatgatagagggtatgccttatccgtaaccctgacagtaccgaagttattcgatttatctgggctcattttttaaaaaaattttctgatgaaatcggttggtatttttcaaaaaacgaacatccacaaaaccgtacaaaccgaactgggaaccccgaataaagcgaacgcccacccctaatgacaagctgaaaaaaaggccagaaccactcaaccaatcttatgtatagctaatataattttcaaaaaaaaataaaaaagataggaaaataaattatatgtttacttgatctattttgttgttccataatagtgcacgggtaataattaaccagttgtttaaataaatattatcatcaacgaccttctgactgtttttaaccgaattaaaaaaaaataaatactatagcacggtggatcgttggagcgaaaggtttatattaacatcaacatggtagtacatacatagcacataaagtatttcgttggaccattagtatagctagcgttgcggtcctcctgcgaaactagcttggcgaagacactagcgacagtgccaccccgtgccaaggcccaatggtcgacacatatagtatggtctacgactctactctactgcaggccaacgaagtgtttagttgtttacctaattttttttgacatatacggatacatatttaaagtattaaacgtagactaataacaaaacaaaagcaaaattggttatatagcatcgaaagttcacgtttttggttttatagcaccgaaagttaccggttcactttaatagcatccaaagttcaccctgttcctatttttagcacttccgtcaatttttccgtatgtcttgatcgttattgatccagccacacacatgatatgatatttctacccctcattgacatgcattatacttgtacttgtgaggggtagaaacgtcatatcgtgtgtgtggctggatcaagacggacggaaaacaatcgagaattgacggaagtgttaaaaatggaaacatggtgaactttgagtgctactaaagtgaaccggtagtattcggtgctataaaaccaaaaacgtgaactttcgatgctatataaccaattttgctaacaaaacaaattatagattttgcctgtaaactacaagacgaatctattaagtctaattaattcatcattaacaaatgtttgctgtagcaccatattgtcaaatcatgatgtaattaggtttaaaagatttgtctcgtaattcacatacaaactgtataattggtttttttttgtccacatttaatactctacgtatgtatgtagatatgacggaatttttgaaagttggaagggaactagacactgccgtgatctgacagagttacacagaagcatgtcaatgtcgtcgccatttatcgccactgatcagagaggcttcaatttatcgctgacacggatgtggctaaaaaaaaaaactgatagcaatccactgcggtagtcaaccaacgaagggtcggggaatcggtgatcggggatcggtcacggtcacaccctccagcttctgcgctggaggaaaccaacaaataaacggatgaaccaccccgtgtctcctctccgcgccgcaagcgggacaaccggcggcgacggagccaaccaggcaaaaccacacacaactagccggatttacaaaaatatactgtttgtggatttgttttgtaaaaatataccggatgaagaatgatttgcacaaatatactatcagtatcgtggcttgaaagagcgataccgagtttcgcgacaacaaatgcgataccgccactatcaactcgtgagggtgcatttgagctggcggtgtcacttgtagaaacaacgagaccgccacatgaaggaaccgacccgttgttgcgtcggtatcgtggtgtgcaagcgcgagagcgaaatcggtctcgtaatcccaacgcgcgagaccgagcacgtcgtgggacccacattggcgaaacgaccgggcacgagtggaccgccggtctcgcacacgcaaagatatcggtctcgctgtcccaatgcacgagaccgacacgcggtatcgctctagcaaagcgagagagcgctttgttatcgctcaatcaaaaatcgataccggctataccggcgaatacgtgcatatcgttagtgaatacggccgctgaatcgtgtccatgcaggccacaagtgaacatgccgtatatacgaatatgcatacacatatatatagccctcaaagatcatcttcttgttggctcatgcatgtatacgcatatacattagccaagcatgcatgtatatatggctgaacacacatatagatggacatatgccagtacgtgtatggctcatgcattccattagcaggtgggacgcgctctcgcgctgtcaaagagactgcttggggccctgccggtctgggttcgcgtcagacggccgcgaaattgctctacgatcgtgcgagaccgagtcgttctcgagcttttggaatgcgagactgatgcattagcgctcccgcggtttcaattagcaatagcgttggcgccttcgctaatccatgatgcgatatcgcgctctcgcttaatcaaagtgcgacgacggtatattttcgcaaatcttcccctatttagtatattcttgcaatttcggtaaaaaaattgtatattttcaatttttttctctactagcaatgatgtccatgcgttgcaacgagtaaaggtagttttaatcatgtatactggtgggaaaaaaatataaaggaataataataataataataataataataataataataataataataataataataataataataataataataataataataataataataataataataataataataatgaaataaaattgcagtgacctttggtcaatcaaaaagataaaaatatataattaattttccattaattccattagctaaaaataatataatacgaagtaggaaagttattctcaaattttagcaattttcaaaaagcttaaatagagcaaactaattatataaatgaaaacaaatttaatcacctaaataaaacaattagacctgtaattgaaaatctgttgtcagttcagttaaacatgagcctgtgggtgtgtgtggggtatatatctctcacttatatgtcgtggtctttttttgacatagaaaaaatacccgtgcgttgcgacgggtaattaaaattataacaaatataaaaatattatatgattaaggtttagttttacatgttatgagctctttaagaaaatatatttataatgaaataaaaaagttcagctgaagtgacataaagtgaacttgttccgtacggagggtacacatggtcaataaggcggcccaatagcgtgggcggcctaggaatagaatcggggaggaacaacttaagcgacctaaagtgaacttattccgtgtgggcggcctggaaatggcgttcggcctgacgcgggagaagccagagccgtccgatctgatagacggtcattccgacttatataaaagttcaacagcccaaaccctaaccctaaaatcatttcccctcctcccctctctctcaaaacaatgtggcagcggcccgacataccgacatccctgcgacggcggtggcggttcagaagcgacggcgacaccctccccttccggcgtcggcgttttcttagtgttcttgaatcttatctagtattcttgtagtagtgttttctttagaatttaggtccaaatttgatgcggtctctcattttttttctttcctttctttttttatcttttgccatcggaggggtattaaagcgggatcgatcgcacgtgcgatggcatttctataacccataagccatacaaattttcttaattaggtatatatagatattgaatcggactttccttttttttctttttttcgccattttttcattactacggatgtcagaaacatctttaattttttttaccacgtcacatataatcagattcgatttttttcgccgatttcttttttacgcttttttttgcggatggacgacggaaacactttttaatttttaagtagtagacatagagatagagatagagaaagagaaacggaaaacttttttcgcaactttttttttttggaatcggacagaaaaaaattttacgcttgttttttaccgcgtcgatggaatcggattcgatttgtttttttttaccacgccgtgtcacatataataggattcgattttctttggaatcggacatatactttttttctttttgcccttttctttaccgcgtcgacagagtcggattcgtttaattttttttccttttttcgcccttttttaccgtgtagaccgagtcagattagtttcttttttttctttatttcgcccctacttttttggatcggacttatttttttctttttttcctgtttttttccccttttttcgcccgtttgatcggactttgtttttttttacacggtttttttcgtccgcggatttttttttccgtccgtttttttatcggacatagttttttttgcacggtttttttcccacggtttttttacggacgatggaccatcatctcttatttttattttttattatataagtagtagagacgtacgtgtgccaacgactgcgagcgcgtcaagccgtcgtcaagcacggctgcgtgagcgcgcggccacaaacgcgatggccgagggacgtgtgcactgcagtgcgctgccccgggtgtacaggtgcgtgtggacggtttatatatagattatgtaaaattttaaccatgccattatatacgtcttcaatacagttagaccacatagtggtaatgaaaaggattaaaatcaaatgcagtttgctattgtaactgtctaatagcaactgcacataagtttaggctatctgttttttatccaacagttagagtgagtgctacagtaccaatataatagtaaatctctgttacagtatttttgttataataccgctatgtaccctagcctttattttattctagatcaagatgcacatatataactgcttaagttgcagttctaatatataacaaccactgcacaatatcctgatccaaatgaaagcgatacagatatcatacgtacggtacctcatcaacaccgtacagtatactaagaactaacaccttcatattttaatgtataacaccgttgacttttttccaacatttgacccttcgtcttattcaaaaaatttatgtaattattatttattttactgtaacttgatttatcgtcaaatgttctttaagcatgacataaatatttttatatttgtataaaaaatttgaataaaacgaatggtcaaacgttggtcgaaaagtcaacggcgtcatacattaaaatacggagggagtagtatgcatgaacatgaggatgtgattgaagctatcttccgaaacaaatatttttctggaccagcgagcatataataaataaaatttcacgaggatcgtattgtagttctgcacttctgcttctgcttcttgcatttcaaattcatctaacgtacgtgtgccgctctcgacgctagccaccgatagctttctggagagcttcgctgatcatcccaggtgccactgaaccagaacaagcaaactgcaacaacatacgaacagatcaccataactccatacggcaaaaaaacatataagcatcgttcagtactgcaattctacggcgcgatagaccttaccttagcttgtatcttcagtccaagaagaccatccggtgccgacgcctgcacggagagaacgtcaagacagaggctcttgatcgcgtcgaacactcgtgtcatcaccaactccttccatcggcactgcacctccaggagaaccaccttgtccgtgacggtgacattcacgtggtggtgttctctccctgcatcgccgccgccgctgacaccgatctcagagaccagctccttcccggtgatctcacagcgcctttgctgtcctgtttcggttgcgcgctgatgtgatggctcgctgctggactccaactctttcacccttttctccaacactttgaggtaggcaatcgtttcttcaaggatggatgctttgtccacctgtagtgacaaatcatctcgatgaataattcatataactttcagtataatatagaaccgttggaacactagattaattaattaaccttgtggatggaggggactattgacttcagaatcaggaacatctcattgagcttctctcggcgccttctctctgatatgacatggttcttgatgccactctcttgagttagcgctgctctactaccacgaccagtgctcatccgtgcaccacagtccacaactttcttcagcaacttctgtgactctataccggtgacgaccggcacagccatctcgtttgacttcgcgctcttccaagccatgaagcacgacacttgagaattcgcaacaccgtcgacatcattagccgccgccgccgccgccaccgcctccgttgacgacgccgggaccagttgaaaagagctggggttcacaggccagccattatcctcgagaaagcgcacggtgtccaggtccaggtccatgtccaggtccaggtcctcgtagatgctgtagagctcgtcgatctccatggtgattggatcgcggttggcgttggacacgcactcatcagagacaaccatctgcccctcttcgatggcgttgtgagtgatgaggccttcggacacgatgtcggcatcttccgtttcgttcggagaagggctagtgctcattagtacctctaagcatatcggaaactgaagctcctggaaatatgcaacgattcggtttaccaactttgggtcctccaaaacctgggaattcaatagcactccacatataattagttgtgaagagctgacttatactgagtggaacagcaaaaactacatcttcgaatgttgcaccctctagttttcataaacataacatttagtggaatatgtctacctttgcttgtagctcaaatgagaaactattctaaactatcgaggggacatcctctcattattttcatattattaaaatggttatagaaaaaattaaaaattttaaaaatagattaatatgtgataaatcacttcataaacatgtaatgttaaatacaacttctacatgttgcaatgagaaaaacaaatttaacagtgaatatacgttaactagccatagtttaatttgttctttttgcaactcacagaaattgaattagtttacatgtttatggagtgatctatgacatattaatatatcttgttgttttttttaaaaaaatctcataaccattttgatgacatgcaaataacaagaggatgtcccctcgagaatttagaatcccctcctgtagctcaatagtttgcaaaatgttattctgttcattaaaggtatgttctcttgtcttacatgtagtggtaaagcaagtatctaattattatggagaccaacctgacaagtgatgtcaatcataaaaaatacagtgtaacaaatatacacaaatttcaacatttcccacaggtaatttatcgtatgaacttaaaaaatcacatatagtagaaaaagaaaggcatcataagcggtggtaatatcatagagctaaaactgtaaattaccaggcaaacaatacgggaaaaaaacctatatcttagcaaaataagcaacaaactattatcttctgcaagtattaattagctaatattttaggaatataaattaaaatggagaggtaaattatgttagctacctacctaattgtaacatttcagggagagaacgcgggggaggggggggggtggtttgttgttattgggctattggaaaagagaaattttacagtccttaaaaggctaaaaaattctagtgcaaattttcatacctcctaatactgagagtaccaaattttacactacaaaatatggacctccagtacctttttaaaaattgtaaaatcattcattgagaaaggccaggaccccttcagccctaatagctgcgctttcttacatgttattgaaatagttataaacaaattgtgaaaaacaaatatgataataagggtatatctgtatatgcacttgcattataaattgtctttcctacctgttccatgttgtggcaggcatatgctataatgaaagtctaaaacatgatgtaacataccgagagactaccgctcggacgtccgatgcaacgcaaaatatcggacgctatcagagtactatatcagcaagctgaccacataactgctacctgatgatactatatgcatgtattgattaacatatattagtaacctttgagatgatttattttccaaaccatttatcttattgtcattttgatcatatggttgtattccttataattaaacctttacaacaagatctcatacggttatattttgattgaaaaattatatatgtttcaatcattaagatttaatgtttcacgtgttagaaataaatgtttcatatataatttgattatgttgcacattttaagctttttatccgaatgatgttttaccgttgtacacgggatcaataaatatattatgatgtttcattacttatttgtgaatgttgcacatcatattatttgaatgtttcatcaagtatattattatgtgcaactgtcataaagaaatagtaaacataagaaaatatctattaaaacatctaaataatactatgagcaacattttgttgcaacagtaaacttaaaatttattacaaagtgaaattccagttgaaacactatttctcacacatgaaaaatccatttacacctaatgaaaaacacacatatatattttttcattagaaatataatcatatgagatcttattacagtgatcttgctagaacatggaaaaacaccaagtgcaacattacaaataactatgtgaaacatcaaccaatatttattgaaacattccattaacactgtgcaacactaaaaagagtcagaaaaaaagtcatcggaatacaatgatgtgagatcttgttccgaagatttaattataatgaatcaaattatataatttattcatagtttggataaatagttggaggaaaaaaaacgtttgaattctcaatcattatgaatagttttcctaaatctgactgtatgcacctatcccaagtgatgtgaacgtccgatttttgccttccgcccggacggctgatttgaagcattttccatggaatctcgggtgttacggaatagtgctttactgtgctagactcaaaatgtgagatggtaataacataaaaagaatgtgggatataaaaagaagcttagcatcaataatatttaggaaagacgcaactatatcatatttataattttaggaaatggtgacttggtgagtacgaagaatcacaccctgccgcccaatggctttgtcgctccttgccagttgagcaaaacgaaccccggacatgctataacatattgagcacgtgatattctctcatatatacaccttagtttattaatatataggatattgttgatttttaaaataatatttgatcatttatcttatttaaaagattaatgtaaatatgcttaaagtatatatcatacttaaaaattctttaatgattaaacatgttatagcaaaaataaataatcgttatataatttttttataagatgaataatcaaatggagtaatacatacttcctctatcctagaaaaaatatcgtaaacgcattccagaaaaaatgcccttctaaggatgaattctaaggatgaatatggataagtgtttgttaagatatatatattatatatatttttaaaatgtgttaagattcattctcaaaagtgttttttagatggaggaattatgttgttctatatcactggacgattgagctagctatagctccatgcatagttgttcgtgctgaacaatcgatgagcttaccggatcagtggtccccagctcaagcacgccactcgtgaaggggatgcagatgattgtctgtaagatgtatagatatttagatggagtcagagatatcgatcgacgtacacgtacatatcaatttgaaagctaaaatacttcctccttctaaaagtttaaatcctatttctttttcattaagactaatgtatagttaactctttcactatgtgataaaactaataaatatgcaaccaataagtactaaaatgattttttgggtttcgataaaaaaattaatatagcacatagtgactacaaatagaacttagacttttaaaaaaaaccaaagaatgaaatatgacttagacttttggaaggagggagtactatgtacaactctacctacatatatacctgaatagacgcgctctgcagcattcgacgacattatattggtgcatgcatggagagcgtgcgatcgagtcagatcatgacattatatatggagtaaataattaaatatgatgattatatggaggatatataatgcatgaacattatctttgtttgaaggcatcatggttgacatgccatgatcgagcagcacagcatggaaatatataggtaccttagctaatagcgagcgtagaaatgttttgctatctgcagactgagcattgcgcagccaaacagatgcattgcttgcatagcttttgcctggcagcctgcagacagaatgtaccccagcagatcaataacaacactacagtacagcaatgtatatcttgttattaagatgtcatgagagacatttccaggctggtttacccagcttttgttttctcctattattggagttgctatcaagctagcagatcaaccgacaagtttgatcagtcatgtgtataggcacagatcgatcaacagatcatctcgtatgtgtgtattggcatcaagctagcagatgaaatactcacccttggccgggttggaaggagtaggtcatgcagacgacgtagtaccattctgtgtctgcgagatcttccggcgatagcgcggcaatgggcctcctcgcccggtggtcgcactcgccggacaggagagagtagtaaagctccctcagttgctcgcttctctgcacgacgagctgaccagccgtgaggtctgctgagttggatatcttcctcgtctttaccacgccgttgtagaacccatcattccaagtcaaaactctacaggtaatattttttaggtattatataatttagtatataaatactgggagataatatctaacggaacgtatattatgtaagtaagggaatatcaggtaaataaaatcaaataagtgaaaaaagggtaaaaatcggattaaaagttttctaaattcataaaacaaattacttaaaaattcagtggcaattaatatagttcatgcctacatccgtctctatttttttagatgaatttagaaagctcataggtccagtttttatcggtttttatttatttgatggttttcattggatatttccccatataggtaatagattaagtccttgatgagctggctagtgcacaatggtttactaagcttgatcccaggtatggttatcaccagatcaggttgttaaaccaagatgagcacaaaacaacttttaaaagacgccaaggcctttatgaatttagggtgaagccatttggcctgactaatgcttcaaccactttgcagggcctcatgaatactatctttactaccctaataggaaaatgtgtgcttctatctatttgtggatgacatattcaattacagcgaaaaccttgaggagcacgtgcaacacctaaaggaagtttttgctatcttatagcagtacaaactgtttaacaaggcatataattggtgtcaatgcagtggctatagatccatagaaaatcaaggttgtgcaaaattcgtcagtgccaacaacctcaaacaactaagtggattctaagggttggttgcttactacataaagttcatgaaaaactacggagtggtcatcaaacccttgacagagttggtcaaaaaagatgttaagtataaatggattgaatcattgcaacaaacttttaattacgttaagttggctttggtacaagcaccaattctaggattgccagatttctttcatgagtccattgtgaagacagatgcctatgataaggtattgttgttatgttgctttagaatgagcatccacttccatacattagcatgcaaggctctgggtgttaaggctctagcaccacccatttattacaaggaacatttggccatttagctagcagtaaacaaatgaaggaacagtaatggactagaggggggagcgtcacgcaaggggaggggcgcatgcctagtcaccgattagggtcccctgttgggcagtgccagccagggaggcaaagtgctgacaaggcatgcaggttgtagattggaccatcggaggcaggcggacttcagttgaaggttgggtgcttcttgtaaaatcaaaaacacggcggtcagatcggcggcatcgcggcggtcataccggtgggcacacgacggtcaaaccagcgtcggcaacaggaggcagcgacaagttttggcggttagaccggaatatcaacactggtcagaccggcggctacgcttcggtcagactggctagtctactccggtcagaccgatcggttttcggtttttgggtataccaatcattcacccccctctggttggcttagttgttgtgattcgatcctacacttctctcatttgtaattgtgaatttgtgatcctttgccgttttttatttcgagatttgataactgagaagctgatagaagaggaaagggaaaggctcaaggacattgggaattttgtcgatttagcatcaaattgaataattgatcaacattcgtcattgcttcctgttttgttgaattattttttcattcgtacttttatgtgcttttgccaatgaatcgtggttgttgccctgtcgaattttgaccttcttgtgttccaataatatcatgcaattgagaatatgttgtttttctctttgttcttcttgagtaatcactctagcacttgtctatggtccgtactttttttctccttacctgcgccactggtctacaactagttactaccttccttcataaatataagggattataatatttttaagtaaagaattaaggaaataacaaaatgtcacgtcatagtggtatacgggagaataaagtagtactccttccatcccagcttaaaatttttgaggtcttcccaaaatgatcatcatctaacaagtgtcttttcgtttatttatgcaaatagttttttatgaaatgaacttatgcaaacagtaaatgcacatcattaaatgtgttgtatgcaaccaaccaagattaatttatattggtgcaatgacatgtaatatttaaaacatgggaatccacgggacatgaagcgatgaaacaccttaactgtaattaactgtaatgattaatttgagaatgatgcatattttgatgtccttagttttggtgctttttgcttagggaatgattaaattgggattgagggagtacatataaactatggtaggtgaggaacaaattagtacaaaagttgataggtatgaaataaaatagtacaaaattatgtctcaggataacaaatcttttatatttatggataaattaaaataccataatcttttatatttgtgaacaatatcaccaagcaactgcattcgtattgaactaattattaccctgggcaactggttgaaatggaccaaaagatcgcataactccaactgatgctcctcacagcagcagcaagcaggctcctgaagtggttcgtccctggctgtaggggttcttcctgaactggaggagcagatgccatcaccacacaagtctagaaacctatctagctgtttaatttcctgcataggtgtgcgcaaaatcaaggaaagaatcagacaagcagataaagctgacaagcatatggtaatgacactgtcatcagtacggaggggcgaatgcaggcctagggcacagccatcaccacactagaagtagaaacttatagtagctgtttaatgtcctgtatataatgcatctgtcccaaaataagtgtttatacatatacttatcaattaaaatttgaattttcaaccttaaatttagagttaatttcaggatttttcatatcgaagtttatttttcagcctttgcttttaggctaagaatacgtatataaaaatttattcacaaattatttttcgtttgtgagatgggcgtatgtatgtgcaaaataaggaaagaagatgacaaacatatggtgatgatactgtcatgtacgcaggggcttatgcaggtctaaagtagtcttatctctaaaattaagtttatatctctttaaatcataatgtaaattttagataaaatctaacaacccatcaattgagatatagtttagctctaaccttcagtaaattttggctctgccactgtcagtacgtacaagcaaaagaagcgtagaatgaaggaggttacgaattaattcacaagttacagtcatatatatcaagcgtagtatatggttatccctaattgtttcgtatagctagctagctagcttaggctagcggtaagctctacatgtaattaattaatcaagtaccttataatctgtagttttgcactaaagctgatctacaaaacatggcgagaccgcgagatagcctgtaagttagctggtagactgctatgctagcttgctgttcgatctcttgttgatcacgaagaacaagaacaagctgctgaaggtactggaatggacaaattaaagaaataacctgcaatttaagataacccatgcatatagacggagaaaaacaaagggaaaattaacgctagcttactctttccagtctgcccaccaatgcaagaaggactccagctagctagctggctgctctagctgccaactatccaagttcactcttctgcaacccgccgttcttccagagggaggagctatatataatcgaaatatatagtttatatatatgctgtttatatataatagttcctttttcttttctcttttgcgatcacacacggaggagggcgtacgcatatatgcacaagccactacatgcacccctgaatatgtacacctatagagaagggatgcactaaaatcatatattgacagtgcaccatgtatatgcttatgtgcactaaaatttactgtaaatctttggtggatagaatcatatatatacactacgaattcgttaccgtactacgcattacttgttggtaacacatgcattcgtaattaacaaaaagttgtattagggtaataagtattttttttatttttagttttatatttttagatttacagcattattaattttataattttaaattttagaacagtacgtgcgttaattcatgcaaaaagtaatctttttcccacgagtacacaacacaacacacggtgtaaaaatccttccacccccaccccatcatactgaggcgttattgactgtatacaacaccttatgcgtgttctaatagttctaattttttaaattaacaaatataagtttttatgttttttaaagaatgttttaccgttctagacactcattctaatcagtattctctctatcccaaaatttaagctgcattttattttaacactctctttaacgtatactttaagtattaatttcttttgtactatattattagcaactactcatatgaaagtatttttaagagtaaattttataaaaccacatgtactatggtccaagttaattatataaaattacagggcttttagcacgtgatacataaccctatgtagtatcatgttgaaatagttctataaagggaagtgcttcaatgctcatcgaatagaaacctgcacagaaattaaagcgcatcaatggtgggataaaagtggactaagagcatgccaacaaatacccaaaaatctattctaaaattatgtttttgaaattcctaattaaaatttaaggtgtaaataaatttttgtcttcaagagatactttaaatcaacttccaataataaaaggtggacccactggccgtaactaccaactgatacatgaacataaattgttttaccccatccctccccatgcgtgagctctcctcacgtatcgccttctagaaattgggagcgagaaagcgtctcccaacttgtgaagagcaagaaaggaggataagggaattctaatttttagatacaattttagagaaactgttggagcaagtttttcacaaaagaaaccctaattttaaaattgggtttcatttagggatatatacgttggccattctccaacagagtaatatccaattccccattagccaggggcattttcaaccataaaaacttgaacccttacgattcaaggcagcagaccgacaattcgctcgcagcgccacccccttcctctgatgagcagcgccactgccccttactccagtctccacctagccccttccgcctctctgctgcccaaactcgttctgcttgccagctaccgagtgtctccgcgttcgaggcggcatggtagacgggccagatggtggtggtcgtccatgatgatggaacaacaatcggccgagtacccgtattgtacatggcaacctaatttcatctagagatcccaacagttgttttatgtgatcaccaattaaccaccactttacgtcctttcagacctaaattttaacaaatattaatttgcataaggtagataggggagctttggattgatcgatgggttttgggttgctatacacactgatatagaaccgggaatcgtgaatggctcaacagtgacaacggctaacgacctggtacataggcactaagatatgacatgaaaaaaaaatccccattgaagattgggtctcacggtcaaacccatcactgatgatccctcatctttgatgagtaatctacatcgccgtcactgtataaactttttttcacccattatctacaattggtgacggaatgggacctgacccatatgagattttcacatcactgacgactcattcatgacgaggcacccatccttgatcagacgtctatttattacaaatgagtgttacaactcgttacgaatgaccttcatagtagtgaaaagaatgtactccgtaagatgtaactctcaagttcaatatactccctctatcctataaaaaaataatctatgagggaatgtgacacaacctagtacaatataaatctagataattctccctttagatttgttatactagttatgtcacattctttgttaggctgagtttagtttcaaaatttttcttcaaatttttaacttttccatcatatcaaaacattcctacacacacaaacttttaacttttccatcacatcattcaaatttcaattaaaattttaattttgatgtgaaaaacacaccctagtctaatattattgggatggagggggcagttattgcggtttggttgttatttcagatttactagcatgtgctattctgctgtccagcagtgccttaaggttgtactcctaggtttggagcatacggagtacgagtagtacatagctaattgatagctgtactgactctgcatcgagaggaggccacggcctggtgcctaactgactaactgcctactcctactgcctcagaagaagctacaggaaccggactcgtggtgccatcaactagaagctaggaagcttaacgcttccttatatctttaaccgtgtaaaccatactccgtcggtggttgctgatttcacctaggggtggataacgagccagtcggctcgttaaggctcaacacgtttcagatcgtttttttaacactcgtttcattaatcttaattagttaaagcctagcttaactcagcttacgagctggctcgttaatataaatttattccaccttcatatattttttttcggggaccaccctcataattttaaatttactattttatcatatactacctttgtttcaggttataagactttctagcattacccacattcatatagatgttatctagctgggtggcccgcgcaattgtgcggctagcatccaaacaaaatcatatatatttttaggatttttttacttaaaatttattaaatagctatctcattgtctttaagacttcgaaagaccaaatcttatcatccccgtgtttctaattatatagttttttaaagtcacaccagttgctaccccttatgtcatctccttctttatttacttggtcgatctaccactatttctcttcattcttcttgtaacctttaaaaattggatcttaaagttttatagtttatcgttatgttgggtttcgtttttataatttctagatgtcccgtcaaacattgtcattatattcctctatgacccgtccactgtctcttctctttattgacattgcgattttaaaaatctaatataattatcgtttgggttcattttttacattctagaagtcccgccaaaccgtcagcggctttaccattgcacttctctacggctcgcctgctgcctcccttctttattgtcattgagattttaaaattgaacatgattatcattgttttttttacttttagaagttccgaacctttaaaaattagaccctatagtttttaaagtttattgtcttgtttgggttttattttttatgatttttagaagtctcgtccaacgatgccactatgctccttcatggcccgtccgccgtctactctttattgtcattgtgattctaaaaatcgaacataactatcgttggaattttttttttgtctagaagtcccgtcaaccgttggcggctctataactatactcctatacaccccgtccgctgcttctcctttttattgttatttagattttaaaaatcgaatataattatcaatggttttttttactttctagaagtcccggcactgccttgctcgtttgcttcatggtctgcctgtcatccctcattttaatcgtcattaggattctatttggtgttttattaacagtttttatacgtcgtatcaacctccaccactttactccttttataggtctattacttaatttatctcgtcatgtgttttagatggtattttctttcaatagtctttatttttatcccaattttagttatttataaattgtattcctaattgaaatcttattttttttctaatttcagaatttttatttcaaatttaattaatatcgtattgtgttcttttaatatttttattttttattttcaattttagttgtttaagaattatattcctacttgaactctcttttaatttttctaattttggatattattttatttttttttctaaattttaattaatctcgtattgggttcttatatggatacttatttcaatattgcttatttttaatttcgaatttcagctaattttaaattgtattcctacttgaactcttcttttatttgttttgctaatttcgaattttatttttatttttattctaaattttaattaatctcgtattgggttcttatatggactcctcttttaatattccttatttttaactccaaatttcagctatttttaaattgtatttttttggattttattttattttatttcgaattttgattaatctcgtattgggttattaatgtatacttctttcaatattgcttatttttaattccgaattttaaatatttttaaattgtatttatacttggactctccttttttttttctattttggattttattttatttttattttgaattttgattaatctcgtattgggttcttgtcactcccaatccggcaccgccgtacaacggcacctgacaggagcgtgtcgtaggaaaaacggcgcgaaccgcttcctacgaaaccgcgatcacagtaccagtcccaggacatagtgttggtacccacggtgacaaatatgaatcattgcaatccttaaaataaatagaggacttatttaccttaacttaggttgcagctcagaacagcccgagaatgcaaccgacgacacggacgaggaaacaccaacaacagcagcagtagcggaaccaacggactaacacccaacaccacaggcgacggctgggaaccaggacgaaaccatattcttcactccacttcatcttctctttaaggcggaggaactatatatatttatatagagcaagggtgagtactttcgtactcagcaagtcacgggaattttaggtgtttaatgcaagcttggaagagaggcaaggttgttttgtaaatcttttgttttgaaatcatttttgaaatcactaagtggtttacttctttctaagtttgggccgaaaagagacttgcgtctcgattcgacttttaagagatgtttttcaacaactcaattggtaatgtaccgacctcccgggtcagatcattacttctcggctcccagagccatttcacttgattagtcggctcccagagccttttcattttctcggattcccagagtccaactgcccagcagcacaacaatccgcttccactcgggaagcctagtctatgatgcccgtagacatcccgaatcacacagattcgtttcttgaccactcaggtcatccatctgccacataggctgattctggtaacgattcccacagcacaacaacttttcacaaagcataggcaaacaaatctatgctacaggaaacacctcacatccacccatgaccgtgggcacgactgttcgaacagttagttaacctctgcagagggggtacactttacccacacgacattactaacccggatcacccagtccgtgagatcagccacgtcgggagaccttaaggctttcatgacaaggcatttcgagagccgacacaggtttaccatatgccgacgagaggggtcccagaccaacaacaggtttggtcccagaccatactgtgccaggaagcccaggggtcctacccgacaccaccctggagaatccacttctcttggcatcaaggctcccctaattagctaattactcagccaggggtgtcccattgcacccgtgtggtcgcacttgttatatgctcggatgaatttcccacagtaatcggtccttatatgcaaatatgggacagtgccacataggcacaacccccgcatcgcaagttttcacattttattttattttcaaacacgccgacaccacatgacgggttttaaaggcttctcaaacccatttcccaagtttttacaaacaacggtgtatgtgggatatttggtatacgcgctcagagagcacagataccgaggtaccacaaaggtggggcgacaaggaatcagggtagtacagcctacaggaataagtgcgactactgggtaggtccgtcggtttggcacgcaaactgaggccaagcaagttgagtgtgtgattctaataatgcaagttggaaacaaaataataatgattttccaattataggagcaattggtcaaagggtgacttgccttgctcaaggtcttcacgaagcttcacgtatcttcgagaattcccacgattgacgaaaatccggtaaccgcaactatacacaaacaattaaaaacctacacaagacccaaaagaaagatcctatttagcctaattaatagtgccattaaatagatctcaattttagagaaaaactggaagtggaacggagtcaatcggaattacgcgagatatgaattttggaagattaattggaatttctggacaagggaagatattttgtggaacaaggggaaattgatttttgaaatttatagaaataatattctcaagaatattattgacagtcattgacatgcgggaccaaggaaaatgattcatggaattttggaatataggaaaatgatttatggaacaagggtggaaaggaaatcaaggagggatatatattagacttgtttcgggtggcattggtgtggcccaaaggagattggcccattagagcccgggtggggagagagaggcggtccggtggaccaagttcacttcgcggggtcccgagtggggcccgcttgtcggtgagacggtccacggaagaatgggcgcacgcgggacgcg

SEQ ID NO: 8624 - DNA, 3919 bp, Oryza sativa
ctttcgactgcagctgcctgtgcgacgctggcaatcagccggagtggtgtggcaatgggcgagagggtgggcgttggagcggcagcggtgggaaaaccatggacggcatcatggccgtgccaagtatatacggtagggaaaaccactgtccaggagctgtactggcaatctggagctcaccggcgaggagaaggaaaccgtgcggaagctgatggacgaacacagcggaaaggttgatctcggaacgtatctctgggagaacaacctcaccatgacattctcctccaacctcgccagcgcatcgccacagccaccgcttctgcggaggccacctacttcgacaggagcaccacactgcgggtgctctgtagccatggccagctggcgcaggcgcgctctggctcctcgagtcctcctcggagccgcccgacgaggatgcctacgtcgcgctgttccggctccgcgaatggcaccgcgcggtcgacggtgggatgcagggtgtgcgcatgtggatgccgagcacccgagcttggttctctgcctcaggaacaccatgctgagcacgctcgtcaggttcggggccatatggtacgcgtggagggtgttcaccgaatgcctgagagggacgtctcaaagagccagaaagaaatagcagtggagtctaagcaaactatatagagttacagtccatgctgatcacggacaagaacgacgcgctgatgagcacggagtaggaggccatgctgagcacgggccgcatgccagggtgccgagctgggggctcgtcggactccacgtgcttgtccaggtacggggtgagcatcgacgcgtcgaggtccgactacagtggtggtcggaagctcgaggccggcgccggaggtgatgagaggaagaaggagcagatgaagaatattatgcgaacactcaaggggatcatcctggcggcagcaagatggacgcgcccaccgtcctccacaaggccgtcaggtacctcaagttgctcaaggtggaggtcaagaagctcggtgtgcgtagctcaagcagctaagtgtgctaccgacagacccgacatcgacaatgaccttgctcaacggctgacggggacgcggatggagtcaagatggagagggcggcgggtagaggcaccagagagaaggccgcaagccaccacacacttctccatgccatctttctctctatcgagtgacgtccttctcctctcccgttgaccgttgggcgccgccccttttccccgccactcgtgatgccgtccttcccgacagttgtcaccttacagggcaaaggggagagagagaagagaggggaaagggaagagaggggagaagagagtgttagccactgacatgtgggccccgcatgggtcccacgttgactcggcttgccacgtcagctaaaagccgagcatgatactgtctacgatatcggatgatcagattttataaattaagggatccattatatctggtatttcgattaaggacaaattccaggctcgacgacaaaatgagggacctagagtgaacttatccttcctatatggacccaagaggcccagactgggtcaatcctaagagcaggtacaatagcagactattagccagctacaaacatattttaatgagataaaagataagagagaagagcagcaagctacatatctgtagccagttgcagcacggactccaagatgcaatgtgtgtataacaggtgggaccatatactaatagtatagtaagcaattattgtatgaattggctatagatgaattggagctagtagtgggctatattattaaacttgctctaacagtgacagtcaaaaggggccagcaccggcgtcggtggtggcaagggaagagcgagcgcggtggacacaatggtggtgttgacgggagctcgacagcgttggaagatcggaagagcgagcgcggtgttggcctgttgggaagatttcggctccgactccggcgagggcattggtggaatgcggcggcggggacacgtgaggaggagcgaggaggcgcggaggcggagtcttcggacgggcgaaaatcgcggtcgtggtggaggagggggtaaaatcgtgggtggacggtacggattagggattagacgatgcggaggcgatgcaaatgaggatggatggtagggattaatgcagatgatttggcatgtaggattagagggtgcaactcctccttttttatattagtatagatttgtgtagaaattatcattgcaagagagatggctcattcacgagtgcagatcctctacagtactactggtgcagtagcagtggctgacgtgtggacaccagcattactacaggcaatccccgttgctcattcactatttcatcccttttctcttccgagctgttggccacttggcccaatagctgggcgtgtatcagtgcatgcatactgaagtagtactccagtacggagtaccagtgtaccacagctcttctgttcgctcgccctgccacgattttggcgccgtgtgctgtgcctgtgcgctgtactgtgatgatcaggttcacctcgtcatacggcgacagcgtcatgtcaggtgtcttcatctctgtcgccatcatttggcccgttttcggtgctttcatctggttgcagcttggtgggctggtccagtaggtaggttacgggctggcctggttcttccatactcaggtccactaattcaacccacatatgaaaaactggaaatggagtaaagctgcgtgaactgtactattattaaagaggacatatccggtgaaaatgagctaagtgttgaaaactcgtgaaaatcatacttaaaagtttcgtaaattcatgaaaaaaatattagagatagatgtagatataaaatacattctcaccaaatctcaactccaaactcaagttcgtttatgagaaacaaaaaaaacaaatttcaggtgaatagtgtcctgttattattcacctgaaatttgtcttttttgttacttctaaacgaagttgagtttgaacttgagatttggtgagaatgtatttcatatctacacctatctctaatatttttttcatgaatttacaaaacttttaggtatgattttcacgagttttcaacacttagctcattttcaccggatatgtccccattattaaactactaggtgatctcccgcactttgttgcaaaaattactaaacaattctcaatatatattttgagacaatgaatataggagttaaaatgaaaaaaaatgaaattctggtttatcagtacttatcatgaaacaaacaaatgatacccgcactttaatgtgaaacatattgataagtataatttaaatattataaaaatgatagataggtttgttaaaatattgtgtaaatgatgtaatggttgataattggatatggttacatgttgatttatagaattaaataaattgtagatgaagtatgcttgcattatgttaaatatgtaattattgatagtgagtgatgatgtgttattgttgcgcgttgagttgtaaatttagcggactataactttattatagaaaatataaataggtagatacatcatatcatcattagtggtaatcataaagcttagcatagttgtaaatgttactacttcctccgttccgataaaaaacaaatctaaataaaaatgtgacatcacctataatgaaccggataatctcaggtggtatcacacttccatctagattggtgtttttttttttgacagaggtagtactatgtgtttacacaggcgagttgaacaaaatactagttgtatttttttacagaggtttcgcggtgaggaccaaggggttgattgggaaaatatatagtacaaaccacatatatagtggaaacttagaaattaccattggatcgagaa

SEQ ID NO: 8625 - DNA, 13496 bp, Oryza sativa
  unsure (1)..(13496): unsure at all n locations
ctctgttgacatgtaaggatggaacccccaggccccatcacatccaccagtaatcgctttgatcgattgtgaaacacagagggtgctgaatactcttcaaatgaatcaattcaataagcatatcttgcaaccaaggagatgaatagagtcacaaacaaaactctgcacaaacttatcagcggttatcatcattaaacagcaccttgtaaaacttcctcctctcctccctcttctcagcactatccaaccgcgctgcttcctcatcgtcctcctcctcttcctcctttatctcaatctctcctctcctcctcttcttctccaaattatccgaacgccgccgctgattatactcatgcagcccctcctgcatcagctccccgagcctatccttcgccgctaccaccggatccttctccctaagctccgacccctcgtaaccctcccggagcaccaccgtgtgtatcttgtacctgtttgagacgtagaagaggcacggatgccgatgcagcatcctcgccgtgtcctccggcaacccgaactccctcctgaaatgctccagcttcagaaccgacatctttttccacaatgtgagcgagaggagctcgtgcaccaccgccaccgctcgcttctcggcgtcggcgtccgtgcctatcgccgcccatctctccgagtacggcgagatgtacggcgtggaattgaattcctccatcttggcatgagacttggcccaggagggcggcagcgagcaggtgaaccgcgggcggaggagtcggcggcggaggcggccgccgcctcgacggaggagacggcgagggaagggacccaccggagaagctccagctcggcggcgttgcggcggtgcgggtaagggttgccagtccgaanaggtcggtccggcggggaggagcgnnagcaggtagtcgtcgggaggcccgagcgggccccgcagcgcggcgagctggacacctggaggcgncggccgcgggcgagcatgagcacccgcgcgaggcggtcggccatcgccggctcggacgccgcgacggccgcctcctcggcgtcgaccagcaccgccatccgcttggtgaacccgaagcaggcctcctccccgccatcgccatcgccgccggcgccgccgtggaagaggtcgaagcaggaagggtacttgcggagccagttggcggctcggccgaggaggtcgagcgtcttgaagcgggactggaggaggcggacgggggcggtgcgggacgggaagcggaggaggaggcgcttgatctggttgttcacgatccagcggcggttgcggcggagcgcggcctccagcgccgggtccttcggggaggaccaccgtgccatgcggcggcgctccggcgacggcggcggcggcgggagggaaggggtgtgagagtgtggtgagccgcgtcggagtgttggacggctgagattggcttgcgataatgggctgtaggattgtaaaaatgggccttgcatatttctttaatgggcctgtttgttggcaattggaataggttcactttagattcctcttcttgacgtcgagtttaaatcacgccctgaaccgcaataccagaaatcatgactcccaacttgcatcccgggttaaattaggtcctctagcagcatagatttgatttggtagatgaaagttataaatttgtactagtactaataattatctcaaccgtttaatttggtagatggaagttataaaaaatttagatgcattcatagcatgacatgtcagtgttagtactaagaatttacgtaaccatcgtttctcttattcgcgaaataagcaaaacggtatattcgcaaatgaaaagtaatttgtgaataaaacttttatatatgtgttcttaacgatctaaaagcaaatgctgaaaattaaacttcaatgaaaaaaaccttaaattcaactccaaatttatggttgaaaatttaaattttggctgataagtataaatataagtgaaaagttgagacccttagttagaaaaagttactccatgtttatatatatttttcctatttttttaggttatagttgacttgtagtattaagggggtgttcgggagagtttagtcccttttgatagggattaaagttttggtgggagagagatagtccctctctcccaaacagcccctaaacttgctcttatggaaagaggtagtacgtactgtacgaaccaagtgcaagtttgaagtttcccaacacgatggcaacatcaggcacggcgatgcgaggtggcgctaacgtccaccgtgccgaccggtttggagcctcctccccgcttgcaacgcaggggacgaggagttaggctctgttcgttctgggggacagaggagattgtgtcccgtcttccaagcgcacatttttcaaactattaaacggtgtattttttttaaaataaaattctatatgaaagttgatttaaaaaatcatattaatccatttttaaaatttaaaatagttaatactcaattaatcatgagctaatggcttacctcgttttgtgtatactcccaatctccttaatccccttctgctcaaacacacccttaggccaccagctacatgcaagaactgcaagctgcagttattaggggtatgtttagtttcaaagttttttttaaaactttcaactttccatcacatcaaatcttttatatatatagtaatttttcagtcacatcgtctctaattttaattaaattttaaactttggttgaaactaaacacactctagatgatgatgcgatgaattctgaaccgggggcctactaccgtctaccactagtctggtccttcccctcgagtaataaacgatccaggcgctgctgctatgctgctgcctgctgctcaatggccagggccagcctgatcctgcagatgatgagtgtggtagagagacagagagaaagccagctaggctatgcatggcagaaagtagtataggagtatgtgcctctaggcacaagtacgtactgtactcctacaggtacagtagagtaactggacggatagatggacgggatcgtcactgtcctcaccctcgtagattgcaccccaaggcacaaaactagggctttgcgtcaaaatggccagagacccgtgccgcggtggtccacgaaagaatctgagagcgcatgtacgtatgagtatcatcttaaggatatgaatgtgttcaaagattatacgttatgttttttaaaagtgtgtttaggcccattattagaattagattttttttataggacggagggagtaattggtaactaagctaggcctaagttactaatactctccctaaataactcaaaccctagcttcccaaggagttttcaaggaaaaaacaaaatagcacaatacccttaattaatgtgaattagttgggtgcccgcgcaattgcacggctagcaccctataaaattatctattttttacatatgattttatttaaaaatatcattattatgtttctaattttatagtttttaaaagtcatgtcaatcgctacacctcactcctttgtcacccctttatttgcttactcgatctaccactacttctattcattctctttacaactttaaaaattagaccttgtagattttagagttcattgtccggtcaaacgtcgtcaatgtactcatttaccacccgttcgctgcctcatctctttattgttattgggattttaaaaaccgaacataattattgtgtgtgttcttttttactttctaagagtcccaccaaaccgtcagcagcttcgtcactacagtcctctacggctctaccgctgcctcccatccttattatcattgagattttttaaaaccgaacatgtttatcattggctttttttttttactttctttaagtcccgccaaccgccataactatgttgtttaacgggctcgtcatttctcctcttaatcatcattgggattctatttttcaatagcctttattttttatgatgaaattttatttatttataaaatgtattcctaattgaaatattatttttctttttctaatttcaggatttagtttattttttgtttcaaattttaattaatattctatatggactattatttttaatattcattatttttttatttcaaatttcagttgtttcaaaattgtattcctacgtgaactctcttttttatttttctaattttggattttattttatttatttttattataaattagttaatcttgtattgggtttttatataaactcttctttcaatattgcttactttaatttcaaattttagttatttttaaattgtatttctacttgaactcttattctatttttcttaatttcggattttattttatttttattctgaattttaattaatctcgtgttgggttattacatggactcttattttttattttgaatttcagttatttttaaatcgtattttgatttggctcttcttttctttttcttggattaaacccgcgcgattgcgctcatacaaaattactcaaatgattttggtgagctaatattatttcttttccaaacgtatacgcaaagagtggatttttttttaaaaaataatacaccaaaccgtagatatataccctacccagaatgttaggaggaacaacgaacggtgctattttcaattggattgctgctagcactttagctttgtaattttcgagcgccagccacatcatgtgctgttatgccttgagaattgtcgtccaattgtccatgctgccagtgccaggcaccacaacgtcaacggtgaagggatgacttagcactatcggtagctttctcgaccaatgctacaaatacataaagcgggagggaaggggacttctaatttgttttatcttctccgtttacgatttctcttcaaacttctgtatgtaatgtactcgatctgattaattacttttcttgatatgactctacatacggactgtatctataaatcttttttctactttctataaataagattatattatgtattaatctccaccatcaaaatagagatcttctacaatctaacgattaatatctttttctttttcttcgattaatatgggaatttctaacgctcacagcgaacgtggtgtcttctttcaaagctgttttaataatataatagatagatgttgtattgaatgatgggtaggtgaggggtattgaagtaataaaatttctcgttttgcagattggtggaacttcgtaggcaagaagtttgaagttggagttggtttattttaagacaaatttgaactttagaagttgatttattttgggattttaggatttaaattttatcccaaaagcatgttattttagagtaatttttatcacatcaatcacctcgaattcaaagttttctttattctactctcaactatcatctcactcccaaccccatatcatttatcataatcatttttgttaaaatttagattttactatcttcgtcccaaaataagtacagctgtgggtatccatgtcaaacgtttgaccgtccgtcttattttaaaaattaaaaaattaattgcacataaagtactattcacattttatcatctaataacaataaaaatactaatcataaaaaatttcaaataagtaggatggtaaatcgtttgatatgaacagtataaaactaactaaacaacctcaaatgataattattgtaggacggaggtggtacatattgaaacggagggagtaaattttatactcctgcgtagtaatagtactagtagttgtaatcttttactcactttgtccaaaaaaaacttaagctaggtgaagatgggatccatcattctatccaaatttcttgtaatataatagattgcatttccacctagattggtttattttatggaggagaagtgtacactatgactgtttgtttatgataagatgcataatttaccttaattattgttagcacgattttcaaactattaaataatgtgtcttgcaccaaaactttttgtaaatgatgctctaaaatataaataaattcatttttaagtttgtaataattagtatttaatttattattcacccatagcttatctcgtattatgtgcatcaaaaaatcttttatcttaacctataacaaacgaggccgtcattccatctagaccccatttgttataggtggagtgacagccttgctttattcggcaatagtttaatctcgtattgtgtgagttaaagaaaatatttatcttgacctacaacaacgaggttgtgtttaggctgtgtttagttccacgctaaaattaaaagtttgaagaaattggaacaatggtacggaaaagttgaaagtttgtgtggaggaaagttcgatgtgacagaaaagttggaaatttgaagaaaaaagttggaatctaaacagggtcttagaactgctggttcacatctcctatttctcgttttttgtgcacacgatttttaaactgttaaacagtgtgtttttttgccaaaattttctatacgaaagttattttaaaaaaatctgtgcatgctaggtaggcatggtttagttcctaactttttcttcaaacttccaacttttccatcacattaaaactttcctatacaccaaacttttagcttttccatcatatcattcaattttaatcaaactttcaattttaacgtgaactatataacacaccctcctattgttgcgaacacagccagttggagtggcgggctcgctctactcctagatccaccagattcgcatcaaaatactctgatgcctagtataccagtagatactcccaggtatacttacactgtttctcggtactcccatttactggggtagtactcgtagcacgaagtaccagtacactctactcctattcgtacctcttactcgtaaagctgtagcctgtaggagtatttatttttctccgtccacgcaacgcattgcattgcaggctacagtacgagaagcaaaaaaaaaaaaaagctttcagagccaaagtcgtgacaacataatctcaaaagggaaaaaaaacaaaagaaacaacggggaaaggaaatgaatcgccatcaatgcaacgcaacgcaacacaacgcaatgcacccccccccccccgccctctccccgggccagtttcgccgtgcccaaatcatgacctcgcgcacgcacacgaacccgcaaacacaaacacacgcgcgcacgcatcgcttcgcactcgcaggcgcagcgcgcaggcggtgatccatccatcatcccaatacatccagcgcgtcgtcaccgcgggaagccagcgtgcggcaacggcaagcggatcggagctcccccgtccatccatggcaaccacctgccgcggccgggctgctgcgcgcctgcgcctgcgcctgcgtgcagcgatgctcctgtcgtcctgtggctctgctgctatcgtcatttccgcagtaattgcggggctgtccagtgtccatcgcttcccgcgaaaagtgggaagcaaatgcggtggcagctctgccatctctgggcgctagctgctgctctgccttgcctgcctagcttccgtttctcctcgcacgcatcagcagcagcagcagcagcagcagcaggtcgcatgcgccacacatttcccgtaacttgatacagccactaggggtacgctggtcgcagtcgcagagcaactagctggcccgcgcgggcagcagagtgcagaagaagaggtgggggtggaggggttcacggcttgatagcgaaaagaaaacaatgcccactttcctctttcaaactccacgcactctctcggtttctcgtgacacaaactatggatgatcggataacgtaactttcccttgccttggtggccgacatatcggcccgatagtggtgaggcttacagtacatatttcacggtgaatagtcacgtcagacgatccttttccgataatagagcatcaacggagttgtttgaaatgcttgatccagagattaatttttagtctttatcacatcggatgtttggacactaatttaaagtattaaatatagactaataatagaactaattgtataaatgatagctaattcgtgagacaaattttttaagcctaattaatctataattagcacatatttactgtagcatcacataggctaattagagattaattaggctcaatagattcgtctcacgaattagtccagggttatggaatgggttttatcattagtacgtttaatacttctaattagtatcaagcatccgattggacattgactaaaaattggttataaagaaaaaaaatcagtcatgtccgtttggcgcacacactctctctaaattcaatgcatggttattttatctccaactacctgggtggcccgcgcgattgcacggttagcacataaaaaaatcatatattttttagtatgattttacttaaaatttattaaatagctaactcgttgtcttcaaactttgaaataccaaatgttatcatccccgtgtttctaattatatagtttttaaaagtcacagtcgctaccccttacttctgacatctcctttatttatttgctcgatctaccactatttatattcattcttcttggaacctttaaaaattggatcttatagtttttagagtttattgccttgttgggtttctttttataatttctagaagtcccatcaaatgttgctattatactcctttatggcccgttgacggagctcgtggcccctcaccgggagaccgcacaggcccccctttgccggttcggccgggggctcagggtgagatctcaagctctcgctgtagatgacggaaagatcgccacctctcaagagaacatgaaacacaagcgatgtatacaggttcgggccgctgagaagcgtaataccctactcctgtgttttggtggatctgtgtatggaggagctacaaagtgtgagccgacctctccctcgttctaggctctgaatctggaaagaatcaaccaacccctttctctatgggcaaggtcctccttttatacttcaaggggataccacatgcacccctccctttccaaactggacttttcttcttttcataaatggacggagatttgcacggtcgtcctccgaacatcctcctgacgggacggcacatacctacctccacttctgcctgaggcgggcacgtcgtgggaaggtggctgtgtgctgacgacatgagcagtgtcagaccggtcacaaatcggtcattcttgtccaccaagcgtcggctcagcaacgtgcatgtttgcccttcttcacacaacatcttgcttgtaatggttaggatgaagcctggcatatatcgatcggggctaacgtgtcatctctgggatgtaacacgctagctccagccgggaacgagtgcctagaagctctcgtcttgacaggatggggcgaagcatgcgtctgaccgcctgtcgccacctaacccgcgatttgaccggtctgtgactggtcacagaccggataatcgagtgcactgcaccgcacttcgtgcggcgtgacacgcttagccgaggcgcaataaatgcggttaggtgagccctgctgtgctcacctaacccatacacgtggagtagaaaacgcgaggggtcagggcgcctcggccctcgggggcgaggctggagtggtccgacccccccctcggggagaccaagaggtgggcgcacacatcaccctcgggcccgacgtcccccgagggtgccaggccacgtgggcgattgtgtctgcctcaagcctcgagtcatgatactcccagtcccatgtcaccgacagtagcccccggcgttatgccagggcgatcgcccttcttatgggaagcggccgggcgtgacgccactcctaaagcctggtgacaggtgggaccggtctccatggttgggcaaaaacccaacggtctcaaaccatgcacaccggtaatggtaatttggctgtcaataatgggcggtctcttcaagactgccacatcacctgagcggcgcacgaatctgggcgagccgatttgcctcgcctggagatacggtaatgtcgcttcggtcggcgagcgtaattaacgcgcgcacgatacgatctatctcgactgccgcaaccgcatatccatctcacgcgccgcaagcgggcgaatgggattagtggaagcgtgggcgcgagaaacgagggggcgaaataatgggcgcgagaaacgaggagccgggcacagcgttggcaagggtataaaggcactgaggatgagatttgtctccttcctttcgccatcatttcccttgccttcgccgcttgcgtcctaactccttcttccctgcgcccttctttcgccacacgcgctcgctctgaggatctggctgcgctcactgcatgtttgcaatgaggacaccgttggggcgtgtcctcattgatggaggagcagccctcaatatcctttcccccgcagcctttgatgccatcaaggccccggggatgatgctccggccgtcccagccaatcatcggcgtgacgccggggcacacttggccgctaggtcatatcgacctcccggtcacctttggtggacccgccaatttccgcacggagcgggtgaacttcgatgtggcggacctcagtctgccctacaatgcggtcctggggaggcccgcgttggtgaagttcatggcggctgtccactacgcctacctccagatgaagatgccgggccccgacggccccatctctgtccatggcgacctcaaagtcgcgcttgcttgtatggagcagcgtgcggaccgcctcgccgtcgtgtccaagcccgagggcggcgacgagaggcttgacacatccgcccccgccgccccgaagcagcggatagtcacgtccgatgaggtcccggtcaaggaggtcacactgggcgacggcccgtccaagaccacacggatcggtggtcttttggacggcaaataggaagacgcgctcgtctccttcctgcgggcaaacgctgacgtcttcgcatggagaccggcggatatgcccggggtccccagggaggtgattgagcaccgtctcgccgtgcggccgggcgcaaggccggtccggcagaaagtgcggcgccaggccccggaacgtcaagccttcatccgcgaggaggtggcgcgacttctggaggccggattcatccgcgaggtcatccacccggagtggctggcgaacccggtggtcgttcccaaggcgaacggcaagcttcggatgtgcatcgactacaccgaccttaacaaggcatgtcctaaggatccttaccccttgcctcgcatagatcagattgtcgactccacagcagggtgcgaccttttgtgttttctagatgcatattctggttaccatcagattcgcatggctagggaagatgaggaaaaaactgcgttcattactcccataggaacttattgttatacgacaatgccctttgggttaaagaatgcaggtcctacttttcaacgtactactcgaatttctttgggtagccaattaggacgtaatgttgaggcttatgtcgatgacttggttgtaaaaacgcgcaaccaggaaacgttgctttcagatttagcggaaacttttgagagcctccgctccgcccgcataaaactgaaccccgataagtgtgtgtttggtgtacctgcgggcaagcttctcgggttcttggtctctgcccgaggcatcgaggccaaccccgagaagatacgagctatagagcggatgcgcccccccagtaaacttagggatgtgcaatgtgtcaccggttgcatggccgccctaagtcggttcatatcgaaactgggagagaaggcgctacccttatttaagctcctcaagcgctccgggccgtttacttggacggaggaagctgaacgcgccctcactcagttgaaagcatatctcagctctcctccggttctagtcgccccggagccaaacgagcccctgctactctacttagcggcgaccccccaagtagttagtgcagcgttggttgtggagcgcgatgagggcaatcctcattccgcgcacccccaccctgtgctaacttggcccgggagcgagcagggaggagaggccccgagccgaacggtggcctaaggcccctggcgaccggagtcggccctctccccgctcgtcagatggtgctgggcgcccccgaccctcaggaaggccccgaggccactgcgggaaggctgcacctatcgccctctgaccccgaggctaaccctgtaccgattcgacccgggagggagcagggagaagaggcccccgagccgaacggtggcctaaggcccctgacgaccagggttggccctttgcccgcttgtccgacgacgccaggagcccccgacccccaggacggccccgaggccactgcgggaaggccgcccctgtcgtcctccgaccccgaggtcatcggcacagaagacgagtgcgccccgaggggccacttggacgaggagcgccccggggatatggcccttagcgaaggggatcggccccaccgaagggtgcagcggcctgtctactttgttagcgaggccctccgggacgccaagacccgataccctcaggcccagaagatgctttacgctattctgatggcctcgaggaaactgcgccattatttccaggcgcatcgggtcactgtggttacgtcttaccccctcggtcaaatcttgcataatcgagagggtacaggacgagtggtaaaatgggcaatcgagctttctgagttcgatctgcactttgaaccacgccacgctatcaagagccaggccctcgccgattttgtggcagagtggaccccggctccagagaccgtctcaatccccgaggccagcacggacccctctcagctgcctcacaccgcccactgggtgatgcagttcgacggttctctgtctctccagggcgccggtgcgggggtcatgttgacctctccgaacggagacgtcctcagatacttggtccgtctcgactttcgagcgaccaataatatggcagagtacgagggactccttgccggactcagagtggcagctggactggggatccgccgtctcttggtgttaggcgactcccagctagtcgttaaccaagtctgtaaggagtaccggtgctctgacccgcaaatggacgcttacgtacgccaagtgcggtgtatggagcgccattttgacgggatagagcttcggcatgtgcccagacgggataacatgattaccgacgaactctcacggctcgcgtcctcgcgagcccagaccccaccgggcacctttgaagaaaggcttacccagccgtcggcgcgacccgaccccctaggggagacggatgtgcctgaccggcccccgaggtccgtcggagtccaggcctcgggacccgaagggagcgctgcaagctcccttagattgattgc

SEQ ID NO: 8626 - DNA, 35190 bp, Oryza sativa
aaatccaaaaaagcggtctgtttgacaaaagaaaacaagtagacatgtttatgacacttccattttctagtaatcttgttctccaagaacattttctgataatctcgaaaaaaatctaaggcttgatgacatactgtatatgcacggatagtttaacctgccatatttcattatttgtattccacaaatttctaaagcagaagaagcatatctgcatatctcacctcatatatatttctgaatacacataggtaaaagagaaatgcattcttcagtctaggtgagaaaaaatgaatagttaggaagattagattcatttactatggacttaaccaaaaaaaatagtttattactacacagctttagtaccgctgataccatcgatccattttgtccattctcttcgctgttacagtattgctgcaaattactgaacagttgtgacaagaaaagttgtattttctcttagggatggcagttgaaaattataggaacatgagcatgccattctcaagtagtctatatgtactgatgtttggtcaaatttgttcaatctgaaaacatacatgtaactgaatatggcctaggattttgaaggtaacatgaataaaatagacaccatgccttttggcttggttacaacaaatagcactaaagataagaatacacactacagatggttgacatctagaaatgtagatggctgttgtagaattagcttattaatatatgcgatcaatggaggaacaatattgagagcaacttaccttgcctgtgggcaggattgatggactacgggggccgggtgaggcatcccgctgatcttgatcaatcaattgtgaagctggtgagcagacaaaagatcagtctgcaaatataaattaatatatcaatgatccaatttgtagtaatctgttgcaagcatacaaaaggtagaattttgctatggaataaatttagcacagtatccacctaaatgaaaaccaattcagcgagagcaaaaaaaaaaataccgctgacctcctaaatcagcatgaacacttatagcaaaacaaacttcattcagtttggatattttcacttgtaatttcacgagtctggacactaccataatgatctcatctacaatgtagagaagacatggtcagcacatcggtagtacctttctcccaaaattcaaggcagaaccagaattggacaacgataattaaaattttataccttacttggattgactcgtagcacatataaatagaaaggttaggccatgcaatttaggctactgttgattctataaagcaatgggggaaaatagttgataagggtcagggttgccatggaggtgatgccatggtgagacagcagttaaagtaatcagtaaagcatttttattgtatcgacggctgacatttaagatgcacaacaatccaacggctgctatatttctgatgatgtggcttcacatgatcccagctaatggtgattccgatagtagatggatataattgaatcacactcagtttcagcaaatacattatacacaaaatggcatgtatttccaaggttggccacagtaatcagaggaactttggattcgcaggcagtatagctgtatttgaaggtaagagtacagggtaaaaccaagcatcatgctatcagggttaactgcagctgttgtgccctctctagaacaaataaaacttacatatatcaaaaaatagattgactgtggcagagaacgagagcaagaactccttaccagccagggtcagctgcatgccgccatgcccgcatctgcacacccgtatggtattttgcctccatgccatcgcaatcgcagccacggcagcggaatccgccggtgcgaccacagttgacggggaacactgtcacgatcctaacttcttcccgaggaattgctagctaatcggaatcggagatagatttgaggagagaattggattcgagagagaagagcaaaagggaaagaacgaacagaggaggaagacgatagaagcagcagagagatttgaattgatttctgtttgtgtattacaaaagtacgtaatctctctctctctcgctgccggctttatagcaatgtgccaaaaagcctctctctctatctgtggacccagccaatctctactgagtccactcactcacagggaaacgcttgctgggctgacggagtcaaacgggccgctccttggtgcagcccaagttctcctggtctgaacctcttgcttaggggtggacaggaagctcgtggctcgttagctcgctcggctcgtgacaggctcggctcggctcggctcggctcgtttgagataacgagccagctcgagctggctcgcgagccgctcgcgagccttaacgagccagagcagatgaggcccaggcgcctagcccagcccaacagcccatcacctagcccatcaccttgtgaaaaccctagagtcaatccccttctggcttgtccccatcctcaatccccacccaagccaccgccggcctcatggctgccgctcgcccgtgcctatcctccccggcgccgacgccgccgcccccgcctctcctccccggcgccgacgccgccggccatggacgccgccgcccgcgccgctccttcccgccgccgccgccaccgcccgcgcctctcctccccggcgccgacgcggccggccgtggacgccgccgctcgcgccgctcctccccggcgccgacgccgccgcccccgcctctcctccccggcgctgacgccgccggccatggacgccgccgcccgcgccgctcctccccggcgccgccgcctcggctcctccccttgttcgctttctctcttgtccccaaagctcacgagcctaacgagctggctcgagctttcaaacgagccgagccgagctgggtttctagctcgttaggataacgagccgagccgagctagctcgttatcctaacgagccagaccgagccgagccagctcgacatccacccctactcttgctatccgaggtgttgccgccgccgtgacaaacacgcgggtgacccgacggctgacaggatgggggtgcggcgaggtcggcggatcccgtcgattcggcggcggcgcaggtgggcgcggcgctgtgcggcgaggtcggcggctcccgtcgacttggcggcggcgcagtggagatgctgccgtcggcgggtgagcagggtagggggaagccggaggaatggatgcgggatggaagggccgcgatgggtggggatgctggcggagggagcggtcggcgatagagggatctgcggggcggaggatgctagggtttggagtcggcgcgacgcggggagagggaggggcagaatgcggaggtggacgacggtggactcgatatcatgaaaggacggcgatgatggcggatgcggtttctgtgggatggggaatacggtgattccgcaagaggtgtgagtggtgcgcggtgggaggtgggagagctctggttcgtttgatctgacgcgttggatgatctggaccgttggatttgatgaatgagtaatgtaggtgtaagagtgagttgatgaattatagggtagataggtgtaagagtgagttgatgaattatagggtagatacggctgtccatgcgaagaaggatcatcctgttagccgtccagcagcggtgtttcaattaatgccaatcaaagaaagagcttgcatttgattggcccaccgagttggttcgtgcaaaggaaggacggctgcccgacaaagaaggcatgaaacgccgtcgccaacaatgaccatagttgatgcacggaacatggaagtaattccttcgtttctcttcaatccttttttctatatatagaaagtaaccaaacaaagccgtaagataagagtagaacgagtgctccctgcacctgagccggactcctctggcggtcactgcactctatctggcacgtcgctgtaatctatcaggcactagtttagctctagttgttactagttctgttgtaacaactcctagcttctaccattgacaaacaacctgtaagtacaacactaatgccaatattgaccgatactagcttatgtgggtgctacctttttcactagaaagaaaaatttcaaaaatcacataaatatgagttttggacatattgaagtgggttgggtgtgttcgttttgaaaaatctctttgtgactcgtgcggctaacttttgtcatttaatgtcaatattgaccgatattagcacacacatgggtgcgatgtttttcaccggaacgaaaaagttcaaaaaccaccaaaacatgaattatcattgttgctttcactctttcatggtagagcggtgcttccgtccagcacgtaataccgacgggtgttgaatcaaatccatccgtccatcgtgagggggtaggatcgggaaacgtcacgagcccatcgcgcagggcccaatctccttggcgctttttttctccctcacccaacaatccccatccctcagcgcaggatcaatgatgccatcagcacggcagtccgagtcccttatcccccctcgatggctccagcaagtacctgccctgctgctctccctcccttggtgcatgagcaatggagctgccgtcggcactgcctaggcccctaaccagtttagggtttcctcccaagtggtgctcaagatgtatgtgattttctagcacacaaaatactcagaaatcataccaaatctcatagtagtttgtttgattttagatgatttatgagtattttgtgtgtctttattttgatagatttggtatgggtgatgaaatgtgagacaacttagaagaacaagaggagtacaaaacgatgatttctatcagatgtatgagacttatgaagtgaatttaatttattttcagcaaagtagaagacgatgtatgagacctaagaagtgtttctttgcaccggtggaagttgaatcaggagttctttgcacttgtggaagtagaattttaatgtttgatttccatgtgtgggaagttgtgttgttggacagtcaattatatattgtttgcctctatcagactatgagacttatgagcgtgtgtcctgtagacacttatgctggtgcagtgcttttgtatggtctagttattttggaatgaactactcaatcaaccatgcttcttgtattgaatctgtgaaaagagcacaagcttatgatggacacattttgttgttgaatgggaaaatttgagcttattttggacagagcatgatcttctgtcatctttatgtctgtttgtgtgtttgttctggaaaatttggatatgtgcacctgaacttgtttgaaggttaacaaatttgttttctagcgaacctagaacctatcttgcaaggcttatggtaccacatagtacaatcaggcttggccctgaggagcatgagatgagcagccagcagccgaaatcaacaaacttgtctcctgttgcgatggcaactttatgcatcgagttaaaaatggatattgatattgtaagttggggaatatattgtgagttagcatggctaaatgatatctagaaataagattccaatatgattcaaataatttcatgagaaggagcacaactagaactattgttccaatgacccaattaattctaaaccaatttctaatatcatcagtctcctttttctgcttggacaacttcttctaaaagacggtcgtctttcagccatttcctgctttagcttcgtcctctcttgttccgcctttgttttttcaacataacaggtccactcaatacgtagcctacccaattggcacgttccagcaagtgccaaaactgctcgaacgtcttttatactcttggatgccactctggatctactcaaatcagagtgtcgcattactcatcctcctaaaaaaacaggactgttatattgacatgcatgactaaaataaaagaaaatttacctatactaaattaccactaaaaatgacatatgcttggaatgaaacttcaacgaaaaacttatgtaacaccactgcacatcggcaatctcctcgaccaccggcatcgctgcaacagcaaacggagagtcctacagcttcggaggacaactggagcaccgccactacaccgccatggctgccaagtcgccaacgccccagccacagcattgacgactccaggaccacctcgccgctacagctgccaaagtccccgccgtcgccgccacatcgtcggctccgacgactccacgaccacctcgacaccatgcccagtagcacctcgctccatgaccacctcgtcactgcaaccgccaaagcccctgccgctgccgccatatcgccggctctgacgactccatgaccacctcgacaccacacaccgcagccgccatggtcacccacgcaccagctgccgctgccgccaacaccacctcgtcatcacggtcgctgccacgttcgcccatggaccaaccatcgccgttaccactcatcggacagaggggattcaagtagtacctacaaatatagtattatctttccacccctctcaacactgtcggtaccacctcatgggcaaatatgtatctggcggtaccgcaccttgccaattgtccgattggacagaatgaagggctgagatttggtaccgggctacccgctgaacagaagaaaatgtcttcatggtatgagatacccactgatccagctatcatctgctcttccaccgcggcagatcctgccatggctgaccccaaacctactcccgctttcgcactcatttctaacatcaaaaaccacatcccccctcacactccaactctatacatggtgtaaacttctctttgttcttggccgtttcaatctcaaggcacacatcgatggctcacccaaaccagccaacgctcaattacaaacaaaaggctgtgggtgtcgtagcatgaagaaaaataccacggaagtctttaggaatcagctgctatgttacattaattcatacatggaaccagtaaatttcaacagttccaccttctcctccttagtcagcaggccctttgtaaagggctgctctacttcgtgcagcttcgggccgtccgatatgctcacgacctgcatggatgaaagagcgcgcgatccaccgatggatgacagctccgagcacgacttgagaatcaggcatttgacccgaagatttgtgcctagcggaatggactccatgttgttacaggcacgaaaatgcaggatgtcgagagaggtgaggctctgtaggtaggccgggaaatcaagcttacggcaattcacaatagagagtcgtcggagtgagggtggcaaaaccattccttgcggacacaccaatttgcagcgccatattttcatctcttgtaggtgttcgaatcccacgaaactatcgacatgtattgacagtcctagatggctggatttgttgatctctgtgcactcgatggatggcaagtattccggggacaagcacccatcaagattctgtagctgataacagttgacaagacgtatagtagtgagtcctctaaggcatgcagtgcagttgctgctactgctgcttgtatgcttcgtcttttcaccaccagttgaaccaccaagaattgttactgcttccatccgtaaatttgcttctagcattagccgttcgagagaaggtaacgatgcgatcgatagatttttcaagccatcacacttggaaagctccagactccttaaattcaacaggcattctggtctaaaccaactaggagaaaagctatcacccccaaaaccttggactttaaggcgtacaattcttggtggaggacgcaaggcttcgaccactccattctcactgctcttccctatctctttgccatgccctcgccagagtagaactagttcctggaggtattgtttttcaacaaggctagcctcagcggcttctttatcattcttaacattacaaataaactgatagttagcgttccactgagctgattcatgcccctcagctcaccaatttttcgcccatccccttttccaactctaaaatgttttaagttccatagacgagacaaatttccaagcctacttatctctgataactttggagagcaactcactggcaatgctagacgacgcaagttgattagctttatgacatccagactaattgctttcagactagaacgacttgcatcaacaacctgtaggctgtaaaggctacagaatttcttcggcaattcttgtacaccgctacgagaaatatcaagataacggagactgttcaactcgcctatgctctcaggtagcttgaccagcttacaaccctttaggctcaaatataggatgttggagagctgattgaaccaggtaatctcaacattgagtttgattccaaacctaagtgaatgcaatttgttcaaatcctgaatgcctctcattccgttcttcagggattcatcagccaccttcacggacatatggcgaactacatgtagcattctcctctcattccgagacctcaaatcttgcatcaagaggcattcatccacataaacggattgtgccatatcatggatcaagtcatgcattacatatctagtttgatcagggtacatgggatcggtttgaaaaagaaacctgctcctcaaatcatccaaatacctaattcccatatcttcaagacgcatgattcctcctgacgcaacaaagccctcggccacccaaatgtcaacgatctcatctcgttcaaagctataatcttttggaaacatggagcaaaatgcaaagcatctcttaagttcttgtgggagatataagtagctcagctggagggccggtaatatctcattgtctcgatgtggcagctcccacaattcactgttctgaacagtctcccaatgttgcacagtcagcttcatattcaacaaacgtccagtagttttggcaactaaaggagacccacataacctagaggcaatgctccgaccaatatcttgtaattgaggatatgattctggacactcttctccgaatgcacacttgctaaagaactcccaaaatatatctctatccaagccttcgagttggataggcttacaattgttggtggcaacacgatcaacaacagttgtaaatcttgtagttactaagatcatactgcctttaggtccgttcttgaatggtgtataaaatgactcccactcgtcaatagcttcttgccaaatgtcatccaacaccaaaaggaacttttgcctctccagctgctccatcaattccacctgaagagcatctaaaccgcaaagtggcttatactcttccctattgaaagactcaatgatctcgtttgttactcttttcttgtcaaagaggtctgaaacacagacccataccctcctattgccaaagtgagcttgcacccttggatcattgtagatgaactgagccagggtagtcttccccaccccaccaatgccaaaaatcggcaagacgggaacattgtcgatgcatttggcctcagcaagtctgggtcttgccctagtatctcttttcagttgcttcgctctggatgatgctgatgtgttgccaatgaccggggctgctgctctctttcctttagcccgtgctcgtgcaacaccacttctggtgatcagtggcacacccagtaactcaatcacatgatctcgttgactgtcacatccaatcatcgaacacacacccagcttctcaatcactagatctcgttctttgtcacggccaaacacctgagacacacatatgactgaacttgtctctggcatgtgttgaactgcctcgatactaacacccactgaattaagcactccttctaaatcagccacagccttgtcgagcttctctcgggcctcctttatttttgttttgctaccacggatcaaaatttttgcaagatttagaatggaagaatagcgtttaccgaaccagttccggtcagcatcctccatcttttgccgcagcgcctgatcatcggactcgcggagaagatcctcggcgtcgtaggtggtgtccttgagctgtgacagaaggagcgccatgtccttgttcttgaacctgccccactcgccgcgattgatgaggaagcgagccttgggcaaggtggcctggaggcgggacagttcattgctcagctgggtcgcttcatggatgttgatcccggttgagatgatcgtttccacggcgtccatcgctgctgccgtagtcctcgattacttctccggatttgatcttgccctcgctacttcgatgagatcgaacgagcgtatcgattgagatcacaaggagattatggggtggagaagtaggagcaactaggtcaagtcaatggacctcctcggttatggacttcctgtagaatccaccaactccacaaggtgacgtggccaccttgacagccacgagctctccctaacaccccgaattaattaatcaatcaattaataaatatacttaacactaacacagctaacgaccccactaatctctccctctccctctcgtcgaaattccaattccactcgcctcgcctcgcctcccccaccttccgattcgctcgcgtattatattgcgccgtctcgagacttctagatccttccagtggaacccgccgccgcttctggatccttctcctgcccctcattttaagcgccacctcccccgcccccccacgccaccgaccgagctgccggcggaggtgcgaagccatcgaggtgagtggaagcttctggaaccttaccctcctttttcctttctatctcgctgcggttggcttaatttgcctctgcgggcgcgtcgcggttttgcttctagaaccttctagttcttgtggtggtatgaagtttctccgtgagtgtcaaatgtggatccgccattagagatggatttgagttcgctgtgctttgtgacgataggcttgtttcggtggagatttcatggataggtcgacgacgagttcatagaaggaggggctttatatgcattagatgaacggcttccaacagtttccgtagcaagaagcttctatggtttaatctaattctaggagggcggtaggggtgatgtttgtgtgccgaagtcttgctaacctggatcaatggaatgcgcttgttgtgcaatgcagttggaaactgtggagtagcccgtgtgacagtgtgagttaattacttggttgcttatttgaggattaggatacacacaggaggtcatgagatgttgtttggttaaactgaacatttaatttgtagtctattaggctgaaaggaaaataaagaaccattcagcctagttgcaagactagtttttctttgtaacgttggtgaattgtactgtgtttaagccaaactaagttgttaaaggtttagactgacgtccccttatgtgatgtttatctttgttgttgttgtcatattttgaaaattgtgcattcaccatctctaaaatagctcatagggcattaacgagtgatttcaatcgaggtgccttgtttacaactattgctttgcatattctgatcattgcaatgttttcaaccagttattgcatatggtggcaccaagcatgaggttacaactgcattacttgcaagggaatcacaagtcacaagaaacacatgttattacaatggatgtaagatttttttattcccagtttattttcccatgattttgcgacagtgaatagttttattttttttaaataaaatgaacttacatgatcattgatgttgtctttaacaacaactcaccaatgaacaaccatacattgtcatatgtgaactctggttaaagagtatctttttgtaacttaagataaatgggcatctgtcctgcaaatggagatggaaagtttgcatagaagtaacagtgatatgctattctgcttataatcacctttccagatatatgttgtgctgtactagcagtctaatacatactatatgatgtctgttgttaatattcagaaaatgaccctgttttttgccaccataagtttccaacttttcaggctatcatatttcagtatgctgtgatagataagtgaacctctttgtgtgtaaatgtttcatggtctgatggataaacaagataattgtgtacagaacccagcttgcagcatatctgcattaagcagatgtagttttgctgcaagcaaagcatggcttattgctataccattgcctttgtgagtggaatggtatatcttctaaattaaggaaaagatgactttctccttttctggagctatgttggggttggctctgttcaagatcagagggagtatattcctcctctcaagagctcaaaacttttcttgtgaataagtttccatgttaaggactgcatagagccccttttccattgataggtacacccaaggcagcgggcagtctcattatataaaattatgttggtatggtcaaagcgcaccatcagcaggttgaaccttcctacttagttcttcaattccttgtgtcaaaggtggtcctatggcagaagattgattgcttcaatctaaatggaattaaaacaaagttgcagatattaatgaagcacatgctaaggtgaccttcatctgagatgtgactattgacatcacatacgctcattttgagttggttctctaaattccagagatctcttgcatttaggccagcaagctcctgtccatatttatcaataaacacaggacggagttgatttaacattctgagaaaaattgtcacaatttgatttcttatacatgtattctttctcactaacttactaatattatggaagagaagctgcttcactttccattgcagaatatttcatttacatataaaacgattcattcctgacctgaacgtatttatctttacacttttgtttcatacagttcttacatgattttgctattgcctgaaaaaatataattgacttgaaaaagcattagcttcgttattgacctgtgatttaactctttgcagaatcaatgggtcatcatactatgactttcttgcaagttgtgcagttgttgcctcaagcttgctgcctccgtctgtcagaactgcaactaagctaggaagttcaatcagttttttttttttttatcttgaacagtaaattcaatgttgacaattaatgtagtaatgatttcttaaggaatgaatactaattttgtgttcatggggatcgatagtcttttttaaacatcatgtttaaacacgatcattactggtgctttgagtagagcctaatactgcattactatttattgcttgctgttatagtttgttacgtaccatgtccattccttaaggaagctaacaatagatctatcttttgtattttcctcttcgtgacacctttttcaattggatacgtgcagtataaaactatcgaattcacattaagagtgcgatatattttgggatcttcattctccttatttgaatcatgatcttgttcacagtatatattctatgtaatatgagtatgactacatggaacacctactatgtcctcgataaattataagtagcttttgatcctcctaagatttttatcttatgaacacatgactaccattgactgttttcttgggaaaaaaattaacatgacccgcttgtttcaggtcagcttgtgacctgtattgtacgttagtattattgttttatggtgtaattgctagtagttatcaacccatgcacctgtacgggctagaaatttaaaacatgtttgcctagtgccgaataatttaggatttactaaatactaccacatcgtctggcagatgtactatttccactactatgccaaattttcacaagaattcgaactttcttattctcaaagccatgtgtgtgctaactgtcgaaacagaaccaagcgtagcatgcctatgaacatttaacttaggcatttaaatattatgctagatgttctggctggactgatcccccgatgatggtgttctgtgttttgtttgatcatggctgtgtgcaactgtgcatacatccacaactggttatgcacttttgatcgtcagcgtacggtggaagatgatgagacaggactggcaagtgaagtggtgaccaaatgatgtgaacgtcatttggcacctcagaggtacatcagaggtacatgtatgaatcttagtgttaattgttcaaacataggttttctcttcctccaagaggaattggtttattttgggatgaagggttttttttggccgcctcctcttcttcttcttttttttttttgagatgtctgtcatttggatcagtaatgttgaaacatgtgttatgtgaaaactctgtaaatagttttttgttgcacgcgtctattacttggtacagtaaatggtaatggatacattcggcccaaatatgtgtacattggtccaaaggtgcgcataagctggcccgattcggtctaatttctcgagtgggcttcgtgcggttcattcaaaattagttgtgggccaaatttccttgcagctactattgactgtaggccaaaatttggctcatatttgaccatctgttggcacgtggactaaaataggaatgagtctatttgcctgactaaaattggcatgataggaagggtgttaggtgcctccctcatctcttaactgcttattgaatcgtctccctcaatttcaaaaccgcgtataatgccttctcctcttcaaaaaccagagcggagagcagtttctgtggacgtagtaggttgatcacagttgacttgttaagtcagtaggtgcctaggtgggacatacatgccaatgactttctccttatatcatccttttgctcacctctccctgttctctctttcctctcttccctcttcctctctctcaccttccatcaacagtagacgtcgggagggtggtgacaatggtgagccagacctaaggaaggcggtggtagaggcgagccggagccgtgcgttgttaggggtttgtatcgggctaggcaactggctgcgtcgcatgataggaagggtgttaggtggctactggcaaaggacttgcagtgagtgttgctcggtggtcaagcgtgaaggtgagcggctgtccgcaccctcctcacttgtgcaggaagccgaggaggcacgagggcatgctgcaatttggttttctgtagacacgccaaatggatgatgtggcggcggaggagcttggaggtggcgacgcaatagacaatggtgacgacgtccgaccacgccacgatccccagcaacacgtccatcgaaatctgaatctaatccgtggacgcatggtggtgcttccatggtggcatcttcatatcaccttgctatcatccatgtcatgcctgctcgacctcgacctattgtcgtgcaattaggacagtggcgactacgcgctgcaccacgtcgcggacacgctgcaccgattcgcctccgacgagcatgaccaaagatgagtggactcaatgggaggaggcaacccattggaaagctcaactgcttcgggggaccgtcttcctcgtctttggctcaccaccactgctgccctccccagatctagctcgccaccgccgttgccctcctaggctctaccccttctggaaggtgaaagagaggaagagggagtcaatttgcacaggcttccgaagatggagaagcgttatatctggttttttggttgagaattgtgattcaattaggatcaatagaatgagagaggcaaaatagacttgttccatgaaaatatcattccatcttaaatgtttagatggcctattttctggctaagatcaagcagttgtgggcttaatctcacgctgttacaaataattgtgggctttaatttcttaattcctccccagcgtacatatgagaatttattaattatttgtagttattttgatggtcgctttagtagcaagtggagattacgggtgaggctcaaaggcacctgcatgcgctggatattctttctggttggtcgtttatctctgtatacgatgagaaaatccttttttaaagcaaattgtatgggcgttacatgaacttactatatggatgcaatcatgtacataaatttgcaaagcatgaatttgatagtgcgtatgacccaaaaccaaaattgcacatcataactaattttgataggtttgacacagattagaagaacacaacataggcccgttcttgtgtacgatgaactaactcaaagaacatactctatctaaattcattaacatcaatataaatatgggaaatgctagaatgacttacattgtgaaacggaggaagtaacatttttccctcttcaaaaaccccccacaaagtcacaatgtttttggctgcctctgattctctcctttttctggaggtctggacaaatacaacaatgacaaactagggattctcttgagctgaacaaaagcaagagtcgtgttacttgtgtaatcctgtaacaacacccatcttgtaagttgtaaatttagatgcgcattagcacgagggaatcccaggtattttggccttataggattgatgaaattttagaaactatgagtttttgttatactacgaaatcccgatgagtaaattctttatttttgcccccaataccaacttgttttaggtacttcaaaaacatggcaaaacacggataaattatgttctttgttttatttggtacacgcagcccttgcaactagtttttttccacctcatgattgcttagtctttctaaaccaaaaagaggggaaaaaaagaaaatttgctgtagcatgtgatttatctcccatatcctgtgccacaaggatatttgccacccatccttcttaaaaagtctaaaacttgtaaccgtctaacagtgcagtcctagttctatttcttcaaaaacctcatacccataccccttttctttagcttacatgatatagattatcgcagaaacacactttccaagctcctaaattgtacgattcttttagaaaaacttatcctttggcatttcttagagaacttttttaaatcagcattttaacttgctttctaatatttaattctctccttaaataattatcataaactcggtttcatccatcatctatcaacaaagaaaaaacaaaaagagaccatactactcccatatcagcaatcaactcaaggccatggtccatactactaccaagcagtccaaaaggattgcaatctgctgcaagttgcagctagctagctaactagctaggaacgatatgaacaatcagcaggttttttcttcttttaaaaggaaggtaacagcttctcgtatattgatagagtaggaatcatcagggttggtgagccggcagcacacagacgacgacccggccatttcttcaacgcaaattgtactcactcgctactactcgtagcgaaatagcgatgcagtggccgctttcacgacagctcaagccgtgtgctgctagctttggacctcggctcgttcagggcacgcacacatctgcgtcaaccttacctccttttatctgcttgctgaaaaggcaggagttattttctctgcttgttactgcttctattccaaaatataaaagtctaaaatcatataagacattttatagaaaatacatattcagatttatagtaatagaaaatatttcatccgattctaagtctttatattttcggacggaaggagtattaatattccatccgtttcatattataagtcattttgatttttttctagtcaattttctttatatttgactaagattttatctataacactaaattagtaacattgaatatattattgtgatatgtttggcttttttattgaaagtgctactatatttttctataaatttaatcaactttaaaagtttgattagaaaaaaatcacaacaacttaatataaaatagagcgactatatgcacttgtcgccttctgcatacgttgtctgaaaacgagcaaggagaggtgaaatactgaaaatgcatatagtccttttctgcttcctgccatgatgggagcatatatgatgctttaatatgttccctatttggttattaggatttaggagtagttttttgaatttaatttgaagtaactactgtgtatcttaattttgcacttatccacattgcaaacaggacatatatatatagtgtattgctataatctagcatatgtttcctaatctgaatttaagaaatctctagatatacgtcatcgattagtatattaagttcggctctaatctctagctacctgctcttgtaattgtatttttttggctatggaccaaaccatgcatgataactttgaatggtggtacctaccttatcttgacaagatgagtgatgagttggaactaaaaacagattctaccggctttctcactgaccaattgtatgctgccagccactcttctactgagatacggtggttcatataattttctgcaaccgaagccgtttaaatatcagaattgtttttaaacatctagattttatgaataaaaaatcatattagtagttccccatataactttatcgggggtatttttacattctgaatgtaacggaaggtatcatattgtttttaagtaaaacttggtaactccaagtattaggtatttcaagataagaaaatttttagaataaaatttatatatattgaggtactttctcaagtacaataaactttttttttgtttgccggggtttgcaactattttactaccgaaattaacggtcaaatttgcaagtcgaagaccgtgtcaacatataaaatgacatgttgcagtggccacattgccaggggcgtctttctttcagcgtaattgaagctgtcacttttgctttagcttctgggcaagttgcaatcagatcattaccatctcttccttttggaaccttggatcataatcatctgacatctctgactgatgtatatatgctgaaagaacagtaagtgctaagctagcgcttcactcgctgccttcaccaaaagtgagcatgaaacttcctagcttccgttcacaactttacatagatgttcctaataatgtcacacagagttagaatataggactgtctcgaatcttcctcaagtaccaatttagaaatgcagagacatttgctggctacctgctctaggagataagaaccatatattcttagtagcacacttattcggtttttacaaaccttttcatctccaaaatggtggagtacacctatgtcggtctcgaaacggttgcgtgcatcacatgatgtagaggctgggatatataaatattttgttgtctagaaaaagtgccggtcgcgaaacgttgaatttgatcttgctcttgacttctggcagtaacattttctgcagctaaagattttgacattcatgtcaacaacttcattttccattttttttctttttctcccggaatcatctcaacaacttcaatagttcatatgccacactctgacatcatatcacacaaatgcaggtgcacttacagaaaaggcaggcaggcactgaaacctgaggctgacctcacaacaaattcgtaggagtcggcaggtataaatctactgtttggtcccattacccaaatcaacatatgtttttccttgcaatcagagcattttacaagctccttgctaaggtactataaatcatttggtactgaatatttagaggatgatttgtaggttgggattgttcttggtagggttgtttcactttgatgtaattagctgagttcaataaatctttcattatagaagagagagagcgcgcatatgattcttatgataacttcacagtactttgaatattacattcattcttctttttttcgacaatgaaaatcaatccagcctctacataaagtgataaagatgtatctggtatctttggcatttgacactatacaaatcttgtttggttgagaagtatgaagtcaaaaccataggtccatagctaccgacatactcgacgttcaggccatgagcagattgctgttctacctgtctcaactctgaagaaggtgtcaacatccattaacagccaaagtcttctgaataaataactgcaattgtcgccttccaattacgcaagcctgaaaacaggcaacgagacagcgttttcttccttgaatgattgagtcatgttgtcttgtatctcaacaattctccaatgcatgtaggacgaacaaaaccttgtttatggttacccaatttcatttaaaaacatattcaggcactgcactctgaaaaaaataagtctatagaccactgcatctctgaatgattgttctctttttgtttgtttcttttttgacacagatggataacagcagcaatgtagcatccttggttatctacagttgcaaactactgacatcgatgctggtttgagtagtcccatagaattcttcagcaatctcagtcagttcctgtaatactactctagcagagaagcatgtaccaggaataattccttgactgacaaagatacagtgatactagattactactagtattagattacatcaaaatcacacattttctagtgcggttaaccttaagggaggcaattagactccatgatgcaaatcacgcaggacctcaaataatgcactgggaaaagaggggaaaagcagacactgaaactgaaacaaaaactgaaactgactgcacaacaacgattctgaatcagcaggcaggtagctaccgcttggtgccactgccagacacccaaaaaatcagcacaaactttttttcaaccaacttatttttattttcttgaatcgaatgtgcagatcaaaaatcttcagaacactttttatgatctgctgagctttattaggtgtgagagaggtttaagcgtcagcatttgagtgactttttttttggtgtgcttttgttgtgttcatgcgtctcctaatcgagttgattctggaacactcaaaggggagaggcaacgacggtgaaaccgacgctgcagccgccatggatacatgcttgcagattgcagctatcctctaccttaagacatgcgactttaagtcactggtacttacattgcagattagcatcaatatgaacgtggaaaatgctagaatgacttgcattgtgaaacggaaggagtatgtgggttcatagcaaagagaacatatatgtgtgtcatatgatttactctcaacgtaccaaaatataagagatttgggctgaatgggacatatcctaatactacaaatctggacaggttcttagtccacattcataatattagaatgtgtcacatccgactaaaatactttatattttggaacagagggtattttggatcagagggagtaagttagagaatctcaatttggaaatgggcagtggatcgttcaaacaaaaaaagagagatgggcagtggagtttgatgctgaatcgtcactgtctcggtatcttttctctggtggttgtatcctaccgttttgtcagcaggcatcctgtccgaggatcttatagttcagctagcatcgtgtttgtgcgttgcaactttcggatattgtttagacaaaatgtactgcaggatctaaataaatgcactataggatctcaatttggagtgcaaataattattcttagataaaaaatgtgcaatgatgtatgcaaggttgttaaaatcgcagattctaaatcggatcggaaagcttacgataggatcttaactattgaatcgtaaaatcatgtagattctattgactagaatcatagaaacaatcctacatggctacaatcgagttggatcgtaaaatcatagtcacacaataaaatcaagattttgacaaccataaatgcacgagattcttaccactgatagtgagtactcccctgtcccaaaaaaagacaaaccctgggttttcgtgtcaacgtttgactgtccgtattatatgaaatttttttataataagtattttcattgttgttagatgataaaacatgattaatactttatgcgtgacttatctttttaatttttttataattttttcaaataagacggacggtcaaacgttggacacggaaaccagggtttatcttttttttttgggacggagggagtaaaactgactttgacatttattggtcacacactttgtttaactcaactaaaggctgagtttggttgtttactttcccaactcatttctctcattttccgtgtatacgttttttcaaactgtaaacgatgtatttttttaaaaaaaatatcatattaatcttttgaaaaaatagctaatacttatttaattaggtgctaataagtcactccgttttacttaccggaaattagttttcaacccataaaaaaacagagactaaggcgggtcaagagatacccacagagtaacacatgcccgttactaaattatcagtaatttagtgatatacaaaaccatggattgacacggctaaaaaaattgcttccgactgcatggtcaggcgactccttaccgtcagcagtaaaaaaatgatcgatagatcaggtgtattccccaaatatttttatcaacttatgaaaaggtagatgtataaaaacggccaaaagcctaaaaggtgctgtgtcatagttattagacgacggtcaatagattatgtggatcatggatgaaattaaactggagaactacacaatggtagctaggacaagagctagcagctaagaacgccgtcagctaagcctatagctaactatacacatatccgtcagatagagcaactacaaattttagtaaattaacaatgatatgtgttgattgcatcttgcttaggatgcaaatctcaggcaaacgcgctagctaggcggctatagagacctctacaaaaagcttatttagcttagttatcttagaaactaaaggttagcttttaattatttgcattggcttcttctgctctaccgatgtcatcaaggaagaccatctaatcatgcaatcaagcccgttttggattatgcgttcaactcgctttaggtgactagtttttaataaaaggaataacaaaggaatccaatatagcaaacttttgttgaatttctctctgacattgactctcaacccgaaataatgtacgattacaagccgattgattaacaattagaacaaaatttccgccttctcgaaaaaaaattagaacatttgaaatcctcggtggatcccgggaggatgttctataccatccaaaaaaaaaaaagaatgttttttcattttaacaaaaaaaattcaaatttatcaaaatttgtccaaaacttgaaaaatattagtagatttctgaatccccccctctccctaaaatttccgaaatttcgacgatgtattctgaaataatcctggatatattcaatgcatcacaaatccacagccacgcacagggctatgcatatatgctcgccaataaaatggacatattatatatcaattccaccatttgtgaataaattacatgcttaaaactgacaaaacgccatcatcacgcaaccctgtgctaccaactctcatgccacaaacccaattacggccaagatacaagccgccacgagacacaaatgataaggacaggcagagacatcataataataagagaacaacgagctagtcatgagagagtagcaagtttttccgtgtcatcttaatttggagaaagaaaaatgctttttttcatgtcgtaattttccaattaaattctgcttgaagagagctcatgtgtccatatataatgtgaaagggaggaaaaaaaagagatagatgaaaaagacggaaaagaatttcaaagaaaatgaaaatgccatccatataatgttattcacaaaaagtcagatcgaattgacagcaaattaatttccagaaaacttgaatatcaaatcatttatgggcttgtttggtttagtgccgtaccaaaacattggtaatgctaaaacctacgtatgttttggtactaccaataatttagtagggtagaatttttattgatgtgtttggattgataccaattgatagccaaattttatgttatggataaattaagcataggcattaccattcatttggcttcaaaccaaacaatcatatttactatttaaactaccaaaatattaacatggcacattttggcatcaatccaaagtggccctatctgtccttttacataaagcaagacaactcaaatagcgctacagtacttttttttaaataaagagattacctccagcttttatagcatttattcagtacacatgccatttagttttcttgtaggtgtgtggttgtttaccgttttggttggaaagtacttgcgttgtgttcttgcgagaatgcaattgtaaagatgatggcaattatatcgtgcattttatggtcatagctggtacaaattgagagtactactaattaattgttgaaaaaaaatgacaaacggggtataatagagacaaagatggtggaatataacaaatactaatttatttgatgggaataagaggagcaggaggcaagacggccagcctatattcattcaaactcaagtggcataataacagcaaaaccaaattccagcacacaacaaatgtgggacaaaatagggcaggagaaggtacatgcatcatgcatggcaaacaaaacttaaatttgcttttaagaatggagaattaatttacacctccggactttgtacatatagccagaaaacaataataaaaaaaagtatatgatggatgatcacaagtactcctaggaaacaaagctaactatctaataaatcggtgaacatcttaatcctaggggtggggggagctcatttagctggctcagtggaacagtttaaaattgccctgattgatttggataaaaattattcaattttgaatgaaagtagtttttacaatggctctccttagctcgttaagaataaatatatgctgaactgataaggtaaaatataataaattatataaaagtaatttgaagaaagctcgataaaaaagccgaccaagcttttttcccccactgatcatgacagtcattgagaaaaacaaacaacacatgctagctcataacccatataagaaaaaaaaaaccctctaataagcgatcggactatatgcttctctaactataaatacatgacaattatcaatcttaacaaattcaatacatgtattttttttcagagaatgcgagaagattaccttataaattgacgtatctttaaaccaacgttaagaaaagaacaaattccattttaaaaatccgggtcaagcattttattatgtccctcagaacaactcaccagacacgtcaatccacattacagctgggtggtgaaaggttggaaggcaataaaaaagtttcattttcaaagggaccaaatatattactaggtgatgtgtaggtgtgtacacccccaaaccaatcacccaccggttgatcaccacaccagcagcaaacccagcattccataaccaaagtgtgtggccagatatcagatgccaccacccttggctacaaactgcaaccggccacgaaacgacaacgaccagcaatcaccaaaccccccacagcgacacccatgctgcatacgtggacgacccagcacgaatctccgcgctaaatattgttttaaaataattgtcttgattttttttaataatgatgaaaactgattcatatctgtggtatataaaagacacagccgataagttataaaaatttagggggaggggggggattaatgtcatgggataaattcacccatcccttcaaatgatagccagctgaaatataaaaaaaatgatcatatagtaaattctataatgaaagtctgaaagtattatgccatccaaaatagaataaattatttccaacaactgattccaaaattgtgcgacgtagtatcttactccttttgtgaaaacattaaacaccaaaggtggatcaaactagtagaagatgtgaagatgacatgtatttggctggacaatttttcgttttcaccactaaaaatttcttacatggttgtattacgataaacaaaggttcaagcttttataatttgagaataatattgttttgaatatttgaaaaccttgtttagaaaaataagtggcatcagtctaaaaaatacgagtggctaaaatctaaagataaatagtttcacttattatttatttcagtaaaagaaagtttcccttatataaaaagggatgtgaagtatttgagtttttttttgcgccaaaaagtatagcaccacttcgcaatacttttatatatttaagatgcaatataatttggtaatatgcttgtctaaaatatttgaaaatatttttttttataaaaatccgactggttaaaattttgaagagggatagtttcacctattctccagctaaaagaaatactccctccgtttcaggttacaagacgttttgattttggtcaaatttaaactaatctaagtttgactaattttgtaaaaaaaatagtaatatttttaacccaagacaaatatattatgaaaatttattcaattatagatttaatgaaactatgctagtgttataaatattactaattttttctacaaagttagttaaatttagagtagtttgactttggtcaaagttaaaacatcttccaatctaaaagggattgagtagtatatatatatcacttatatttagaaacggagttaggagtatttctttgagtatttttctaccttttgaggggcatccctatcgcagaagtcaaaccgggcggggcccattcgcgaaaaaaagcccaaacccgcgcccgtaaatataccaaatccacccccctcatcctcgccgccgcgactcccaaacctttcgatcatctcttcgacttcgtcggagtcggagtccgagtccaccgcctcgccggagatggagcacgcctcctcgccgcgcgcccatggcgtggtggtgatcgcggtcgccccggaccacgacgacgacagcggcaagaaggggtggcgtctcgccgccgccgccgcccccgccttcggggacgaggcggggttcggggtggaggaagaggaggaggagggggaggaggaggaggaggaggtgaggtggagggagcggcgggtggcgtcgctgtggcgcgtggccggggcgctgctggtggtcgcggcgctcgcggtggcggggcactactgcctgtaccacgacccggcggcgttctcgcgggaggaggggaggtcgtcgttcttgctgccgctgtacccgaagtccagcgggggcggcgcggcgggggagtcggccggtagcgtcaagccggacggcgccggcgcggaggcgagggagaattcgtcggcgctgctcccgatcagaggcaatgtgttccccgacgggtgcgtgcagccggtgcaagaactcgattccatttcgtatgaaacagtagagttttgatcctttctctcttccgaagaacaaattactggagttctttttcgcgatcggatgctggttggtcatgattcctttttattgggcggggttattcatctattcttgctttaggtagaatttcggattcttttgagtttgatttgaggtggatttttttttggtttaacctgcttgggctttggaaaaggtagaactacggtgactcgagtttcttggaaaaagttgatggtttgatttattacctgttcttttacaacaatgatttcacatgaaacagttgaaatttttaaataaatttggaaacattcctgctttcctacatctctgtcctgtcactttgattgggatgttttgactgtcatatcaaattgcatataagtcttgactatacaaattgtctgtttatactagtatttatttgtgattagtttaagttgaagtaggaaggcttctaatgtgctggctcatgggtcaacgtttgatgttcatattcttctttctctttgtatgatatgtttaatctttggcagttcatgttcattgatgttacctaccagaatgcagtgaattgcaaatactaacatggaattggtgcccttctgggtattctgcttttaatctgcaggcaatattacacttctatgtacattgggaatcctccaagaccttattttcttgatgttgataccggaagcgacttgacatggatacagtgtgatgcaccctgcacaaactgtgcaaaggtatgctccaaattcaatcactttctttttttttgtcctgtttttaatttggctttttagctttattagaatgagtttaagttagcatggatatcttatttcaccatcttattatgagtctaaatttcccaatttcattgtgtgtttgtgtaatgatcatccaacgttgttgcagggacctcatcctctgtataagcctgagaaaccaaatgtggttcctccgagagattcatattgtcaagaactgcagggcaaccagaactatggtgacactagcaagcaatgtgactatgagatcacttatgccgatcggagctcctctatgggaatccttgcaagggacaacatgcaactgatcactgcagacggtgaaagggaaaatttggacttcgtatttgggtatgacttgatttccgataactaattctctgaaatttgtgaagatgggatgctcttttctgaatggtaaccatctgccatctgtgtaccatctgcaggtgtggatatgatcagcaaggaaatcttttgtcgtcgccagcaaacactgatgggatcctgggcttgagcaatgcagcaataagccttcctacccagctagccagccaagggataatttccaatgtttttggccattgcatcgcggcagatcccagcaatggtggatatatgtttcttggtgacgattacgttcctagatggggaatgacatggatgcctatcagaaatggtccagagtaagtcccatccttttgtttgtgaaagtttcattacttttcccttggatactatgcatcatttttactagatataatatgctctgtctgcaaaagatcttgagaaatcctaaccaactcttgtcaccctcaagactgaaagtacaggggaaattttgcccaactgctctttgatataatatttttaactttttgcagttttgcactgatgctagatatagatttattttttttacactagtaatagtaatcgcattgatgattcgatcatacttccaagaaatgtcatgaaacttatcacaaaaaaaaaaaagaaatgtcatgaaactggcaaaatgctctgcatattatcactcttataattcacctaatctttttgctgtaaaagatggggcgagcctatatgttcagatgtcagaaaattagcataagttccagcaaaaataaagaaatgatgccatacgaggctggtatttccttttagcattgatatgatctatgtaactgaaacttgtcccttttcattctgtcaggaacctatacagcacagaagtccagaaagtgaactatggagatcagcagcttaatgtgcgacgaaaggcagggaagttaactcaagtgatatttgacagtgggagctcatatacgtatttaccacacgacgactacacaaacctgattgcttcagtgagtgcctctattaattcccttacatatggagccagttcaatctcatcttactcatgtttacttgcaatttttaacagcttaaaagtctctctccaagccttttacaagatgagtcggatcgaacactaccgttctgcatgaaacccaattttccagtgaggtaacgtgttgaaactatacgtccaaaataaaataagtgttgaaactactcatgtgctaaagagggcaaatttccaatgtccagttccagataaataaacacacagttcttaaacaatcctctgcatttttcaggtctatggatgatgtgaaacacctgttcaaacccttgagtctggtattcaaaaaaagattgttcatcttgccaaggacattcgttatcccccctgaggactacttaatcatcagtgtaagtttccatgatcaactttcatatttatcaaacgtccaattaaattttggacatctacagcaatattccctcgaaaattttcaacaaggagagcaaagccataccataagtcattcatcatgtttttctctggaatctttttacaggataagaacaatatctgcctaggagtgttggatggaacagagattggtcatgactcagcgatagtaatcggaggtatccatctgacattttcctttggtacatttctgttgccgaattcactcactgtagtttctaaacttgcatttgcttgctgtttattttttcagatgtttcccttcgaggaaagctagttgtatataacaatgatgagaagcagataggatgggttcagtcagactgtgccaagccacagaaacaaagtggatttcctttcctctttaaaagagtgctgcaaaatcaacttttgtaaatgtcacatagaaattgaaatttaccaccagctcgactgaccatgctttacttttggacgtgcaaattctacgttcaaagctgccataatcaatatcagtgaaagtaattaaacaggacatagggtaaaaagaagatgtaagtagagatagccagtaagtatgttgtacttagtaatttgtctcttctgtatacacaaagaagcagaattatgtatatgtattttgtagaatatatctcaaccacctgtaaagagtatatctcatccacttgtaagactaagtggtgaagcatatatcagtgaagccatggcatttctcgttcataactcctgtttatattgtgattgctatctgatggaatatagtgagaatggtacatagggagcataaaaaacacacaacaatatattgcaggcaacagcaaaacttagcaaagggcaatagagcaatcaataagtgaaaaaaaagatctcaactttgggcgaagtacaacaaaaggatgaagaggacttgtgaacacactataacttcctcagtggagtaggtcaagaaacactgtaccaaatgtacttgagcggcccatgcatctatagccaggagcaacaaattattagcaggttgattaaacacattagtagtacaatggccatttttaccatgatggatcactttagtggtagcaaactggagctccattcaaaaataaagctcgcaatattctcattgcatatacacaagtgtagaatttatacacatttcgtggttcgtaattcttaaacaaaactgtattgaaaaaaaaaaaagaataacaaggtttcagatgaaactagtagggtcatttgcgatgttaactcttgattccgacgaatttgcatattttatggagaaagccgccatcactagtactaactgcaacaggctcctgcacaggctctttgaagttagccttatcactcaactcttgaaatgcattaacaacgttctgtagtcgggcaacaaactcgattagaagggaggcaaatgtggccaaggacagagcacttgcactttcatatgtttttgtttcctcgtcttcaagtggcagatttggatggaatgatcttcgagcaggccaagacagtaacttgaaatctacagttgatgatgaatcatgtctgctcagaaatgaattaacagcaaagctttttgaatgatgcgctgtagtttgttcaacaattgtaggctccttcacttcgatcttgttttcctttcccataatgccagtgccattcagaacttctttgataccttcggcttgcttgctagtgtcccatctttcagtattcacaagaaggtacgacttctcatcaatccttttttgcaactgttcagcagccaagtggacttctgctagaatatctgaagagctcaatttggtcattgtcttgactttgtctccaagctcgcgcaacacttttgcaccttctataccaactctctgaatttctgcactaaaaacctttctgctttctggtggtgcctaagatcaaaatccgatatatatttttgtttataaaaataataaaagcagaagtctaaagtgtgctatagaaattttatgagaaaacctgaatttcggaaagaatacagccatgcaatgccatgactgcaaaggagcaatgcctcaatgccccaccaactttggtgaaattcctccaggggtacttcatcattttgtaagcgccatggggtggctcccatatagcaaaacccaactgcaaacagataagaatgtgatcaattgaccactcaagaaatctaagtagaactcttaaatttagagcaagatcaaaccagagtttcctcttgtgctgatgcctcaactgctgccctatagccactatatagaggatcatcagatgcttgatatacaagtattttcgaaggaatcctttcatactccatgcatttcaaatatccatcaacgcaacctagaatgaacagccaaaaacggtatcaagcatacaatacttgatatcataatttggcaagaaatgcataaacatcagatgtatctatgctctatagcaattgcagtgctagcacaaagccacaaacaatattcttttaccacgcatttcaacataaagtcaaataacgcaacatggaaaaaaaatactatagatggttggtttgcggggttggagtttcataccttccaaggattttgcaacaccaatgaagttttttgcaaccaaattgtgcaaatcttgtccagcccatattgggtaaatacctacattgattcctagactgacagcagcaccaatagcaattaatataaatctactcacagccgtatcagtgaacttccctgtgttgtacccagaaaccatgacatagcagaatgtcaacaagaatacgcggaacccatactcataggccttcatttttggatgcagtttcgtcaaggttgtgaaaaaagctaacaatgaaaaacatcaaagcaacatactacaagttagatatactcacaagtcaacactacagccagcaccaggaaatgatagacaacagccacaggcaacagatgcaatactcaccaacaataaatatgctaattataagaattacttcctccagctttcccaggtgtttggacaattcggcgactgctagcgcaagccctccagcggtaagggtacccaatcccctattaaaacctttgctaaatgttgcacctgtattaacacgaaccacattattcaagggtgacaatttatttttgagtaaattgcactttgagccatgttttagcgccagagtttcagtttggaccaccccttaattcatgttttcgctttggactaaataattcccttccattgcatattggactacccccactgtttatctcttccatcccttcttgctcctccctgaactccggccagccaatacccaaagacgctgcacgcgctcgagctctgccagccctgagtggcttgagctcagcatccatgtgagcacgaagtgtgcacggaggaacgtacaaattatgatacaaacacaaagaaaaaactatgatgcaagctcaagcctctgattgggtgcttgccaaagaatgcatgccaatccaaagaaaatcatgcaaataacccatcacaatcagacctcaagagtcatataatcgaggctaagacgctactcaatgaaacagctcaatctcaaagcaactatcttgccaaaccatcaccctctcagaaaggcactccttccttagcgtgttgcaaagcgtactggtgctcggcaattgactcgagcgcagcgcaacgccggtggagcttgagcatcagaggtgccaacggatggagctcgtgccaccctagctgtgggtggagcttgagctcaagctaggccacagtgcagcatgggaggagcttaaagcgtggcagtgtgcgcaaggttcctccggaatttgagcttgagccactcaacaccagcagagccgagcgcattgcagctcttctggatcctagcagctagccatagtttaggaggagatgaaagagatgaatagtggaggtggttcaagatgaaaccaaatgaaatattatcaagtccaaagtgaaaacatagcataatgggtggcccaaattaaaaccttggtaagaaactgtagcccaacgtgcaatttactctttattttttttcagttttacacacaaaggaatatatcattttataattataaaatgtttattatgtgaattgtagatacgaaaatactccctctaatcagaaaagacatgcgctacagtaaaatcaagttaattttgggcaaaactattgcttacaatgtatggtttggatatatgaaaatgatgcaaacattatttttataagaataataatgttattattataaagttttatgaatatgcagtaatagagtgtggtccaaatagcgtcctgttgactcaaaaaggaataaaatgcaaacttgcaagccaacagtagaattatgagcaaagcattattaattgtatttaatatttcggcattaaaacaatattacagaaaatagaagttgtctccagtgcaggcgttcagcagcaactgtggtcaatgctatattttttgtcctactcaaacaacatccacttctttagtcaatgtgtcccctatttcatttaattctacagttggttgtagaacaaagtgggtccaaacaacatatactatctagcaacaaaatttagtggtactttccagcactaatggataaatttaggacgtttcagagaggccacaggcacacgttctaagacgtggtggaccataaccactttaaaacggggtaaacatcccagcacatgaatacttaatcgtagttagtatctgcaagtgaacaagcaggaactctttaatcatcaaatcttattctatcacaggttttctataattctccttgttcggttgcacgttctacttacaagaataataacagaaggtcaacagatgaaccaaaatggaagacaggttcccccatttcccttggaaatagaatatctcatcctcaatgctcttgctctacacactagtactacacagacaaattagtttgggtgacacgatttgtgagtcttgatttgcagatgcaacttctgatctgt

SEQ ID NO: 8627 - DNA, 13271 bp, Oryza sativa
ccttcaacactaggatattctgctcagatctctctcacccacgctccgaactcgattaaccaggagaaggcaagttgccttttcgcgggattcaattccgaagaatagatcccaatccttccctggaattttacaaccaagccaagagaattttggggcgaaagggctctgataccagaaattgtcagcgtcaccagatggactcaacacaactaaggaaaatgaaaaggaaaagtggaagaactcgaacaactcaggaagaacagagatgtgtttaggcaatcttttactaggataatcttgctccaacccaacagggttgagccgccgccgccattcgccaccagattgccaaaagtcccttacaatttagaaacctcagttcttatactctctctcgctaccaactcccttccttcccctctcacaagacagatgccagctcatgccagcgatacaggttacatggcccattccggcccaacatatttacgattaggcctaatgactctggccggcctcaagtcttcttctcctccttcctgctcaccatccggcacaggcttcatcttcagcttggcgcttgcactcggctcctcctcgcctgacgccttgacactcacatcgcaaagctaattaggttattgatcaaacgaatgtatcagccaaaaaaatagagaaaaacattcactcctgaattcacgctagaatttcaaaatcaccgtccatgatccatgtgaatttctagcacgttgcacaagctgaattcaaaacaatttggtcctgtttgctgcatatgcaagggttattctgatttcatctgtatgactgtatggggcttcttttagatagtgaaaagaattccggcatttgctttaaagatgctatagccacttattacataattcacagcttataaaaaccaagaaatgactagacaataactaatgataccaacacaagacatttattcaagtctgtttgtaaatcttcattcgaagttggcaaatatctacatgatcgttgtctctaggttccggcacacagtatgtactgtcctcattacacctttatatttgtgctcagaactgaagccagtatgttacctgaatagtatctgcatataagatttcattggggatttgtcaaagaccatatcatttatgcatacaagatacacacagtggtgctcgggagggttatgatgggttagagctgagggagaaggatcccgaggtagtggcgaaggataggctcggggagctgatgcagatggggctgcatgagtataatcagcggcggcatgcagagaatttggaggagaaaaggagaaaggaggagaggtgagattgagataaaggaggaggacgacgatgaggaagcagcgcggttggatagtgctaagaatagggaagagggaagagagaagttttacaaggtgttgtttagtgatgaattagggatggaaatttcggttcacaattttggaaatttgaaccgaaatttcgggaatttcgtcccccatccggcaagcaattattttaagtgaaattttcagttttttttttcaaatatttgtgaatttgatcataatttcttcaaatttagtaaatatgtgctaaaatttcgtttgaaatatccgaaatttcggaatttcattgcccaccaaaattaccttactttttgaaagggaaaaccctagtgatgataaccgctgataagtttgtgtggagttttgtttgtgatccatttcatcttattgaatttattcatttgaagagtattcaacacttttgcacttcataatcaatcaaattgattactgatggatgtgatgggagttgcattgctacaaaggcattaggcatctgtctgcatgggaagatggtcctattgagttcatgacctgcaaatgttcaaggatatttgattcaataactgcttggatgccaccagatagtttggtattggcagattataaccatcaaacctttatgcggatacttctagcataatgactacatgaaattctagtgtgaaaggattgctgcaaagacttgacaaaagaaattagtgatgtaatgcatatgatcaaaataaattctatgagttctacaggtgagatgctgatgcagagttggggtttagtcaccatggcatggagaaaggaattcagaacccatatgaactgttgagaagatgcaattgcaggtctcaaagtaagcacatcaagactgttgatctttcaaccttttgtggtgtttgttatgtttagcagacatcttccgattgagaattggaacatcacagagggtggactaaagtcagagattaactacaaagcaatttacaatgcaacctgtggtgcccaattcacaatcacagaatatgtgttgcctgctgatcttggaacataaatggaactccaaataggatgtgtttcggtacaactagtaaggtttatgaatcttcaagcgaagtatttgacatttggttggggaaaatctatgttaatcccccaaaataaatgaaatgaaatcttttaattctgatatccagtttattttgtattttatgtatacatatttagtagtagctagtactaatcgcatcccctgacgataatggacgcatgctaaagcaaagctcgaaattcatggagtaatgaaatgtatatgaaatttaacagtctgagaaccaaatatctagcaaaggtcatgaatgtgccttttttttcccttgttgaatggcatggcaactttgggaattttgggaaatgatgatagaaagccactgaaaagaaagtgccaatcttcactaacataaaattctttattttccttttttgtagaacttgggaaacattggtaaatgaatattaatagaaagcaattgaagaaaaagtgctcatagttgcacaaagcaaatgttggagctatacatgtcctaaaatcacattctttgctttcgtggtggtttcatgccttgtacacacccaaccatcttgttgctaccttcccatcctgtaaaaatataatgatcaagatcatgattagtcatgaacatctgtctttgtgaacatccacttcttttttcttccctgtttttgtgttctttcagtaagaattgggagggagcaagaagacctttggacatgttgaagccgcgtttttcgagctccttgtattcttggcatagcgcacaactatcgcagaagaagtggacgcagcagtccaagcagggcgactgttgcaagttgtactgtgcccgcattgaggatcgtttggtacaagcatacagccattggcagcctattgtcgccagcaaaacatacaaggtcccgtgcatgcagcacgctggaaacagggagagtcagcatacaagattgatggttttctgtgcttgaaccaaagcgcgaagtgataagttaatatgcctacatgttgagcctttgtccacaatctcagcaatgcgaccgaacgtaatgcaggggcaccagcaagtcaagcagcctgtgtagttacaaaagaaatgaaatcatacatgaagaattggaaacccatgtataagaggtgcaagaacaactgagaaacagctttgcatacaggttccgctatctccaaagcagtcgaagagcttaactgaccactccccagacatgctgttagtattgctgattgagaatctgtgatataaggtaggaggattgactgagatctgtgtctcaaggtaatatacaagcgttatacctgtgtagtttgagcagttggtacctttgatcctgctgctatttatatggctgtggcattgcagtgccttgatgtagaacatgtcaaattcagagccagcagtttatgttattttgctggttttcgctttcctatcacacggggtgatgtacgcttagtgttgtgtttgtatgtgtctttgaactggtatttctgagaatccaacgttcaattggcatgttctgctttgaatcgttctatctgagaacactatgctcgatcagcatctggcagcatttggaccttccatggcttgttagtctttgatttcttgtctatcatatatattgggtggatgtgaaaaatggaagctgttcagtgttcacctttcctgacagcctgtgttttcacattggaaaagtctggaacaaaaccttcacaaagatgttgtctcgtgatatataccctttgatgaaaggggcaaaattgttcgtcaatcttctttacgtccaaattcaaagtgagtaggatgatcaccgcacaaagcacctgatgtaatcccaattaatagtagtatggaagatgcactgacaaagtttagcttaaaaaccacaaattgcccaagtaaaagtcaacgtctagtagaatctgttatagtctccgttaggtagaattaacaatactccaccatttttgggctgcagctaaacacccaaaccttcttgggaaccaaacaggactaaagtaaaaggatttttttttttcactcagttttttcacatgaatccacctgaggtttactcatgacatgacatctcatcacacaagctagtactctctctgtttcaccgtttcagattataagtcgttttgactttgatcaaaatcaaactattttaaatttaattaagtttgtagaaaaaaaactgtaatatttttaacccaaaataaatatattaagaaaatatacttaattattgatctaataaaactaatttggttttataaatattactatatttgtctacaaacttagttaaatttaaagtagtttgattttgattaaagtcaaaacgacttataatctaaaacggacgtagtagcagctgctactctactcataaccaaaagcaaaccacacaccacacaccacatcaccactggtcaaaaccctgtttggaaaacgcaggaacagaacagagcaaaggattcccgcggaaaaccacgatatcaaccatttcaacctgggacgtgcaggggacacacacacacagagctgatcagatcatcagagagccagtacagtacaagaagcagagagccttgacggcgagcttcatgccggcgtcgcagtggcccggcatgccgcagatgaagtagttgttccctcgccggagcgtcacctggtcgtacccggtccgcagcaccgccgtgtccttgttcctcggcaccttgcaccgccggtaccccttgccgccgaccaccgccacgtcgtggtactccttgttgtacttgaacactgcatagccatgagtcagtcatgtaccctatttcgttgagtttaaaattgagaaataactaattggttgtcagtttctaagaacttgtaaaggttgtgaaacctaacttctagttactaattccttttccgaattctgtattggataaaaaagagatttgcttcggtccaataaaaagtatatcgaggtaccgatacctcacggtattaaatcgtttctgatcgttgcatctagctgggtaggatgggtattgttagatccaacgatcggaaatgatttggttccgtgagatatcggtacctcgagatactttttattggaccggagcaagtcacggataaaaaactactctatatatttaggagagtttttaattctgaaagaagatgcaactatcagaagcttctcgaaacatacgtacaatcacacaccaatggatctatgcatgaagctttgacattaacttgtgcacttaccgagcacgtcgccggcgtagaaggtcttgccggcgagccaccagtcgaggttgcggccccacccggcggcgtcgcccacgtagtacgtcttgccgccggcctcggcggcggggacggcctccatcagcagcgccgccgccacaaggcacaggagcaccacgccgccgccgccgcttgcactgcctcttccccggcgagccgccgccaccgccattttctcgctcgctcaaatcaaacgagattacaaaggagatcaccagtttagcttttagcacagttttgcacggtgtgtgtgtgtcttctgactcgtgtggtggcgtatatatagcccgcgaaatcgacgcagtgcagcacgtgctggcacgtcgagagcacgcatagcggcagcagagatgaagcttcttccgtggaagcaggactcttcgatcccggaatacaagaatattaatcctgggaaaccaaaatttcaaacaaaaagaaacacagaaaatatttttaaaaaataaaaagagaaaacatttccgtgaatcaaaataaattttgaattgaaattgagcccagtgtgaaagtatggaaaactgaagatccgtttgaaacacagaattttacagggaacggctgaaatgttgtaaactgctcccttcgtctcagaataaagcaacctacaatcagatgggacatatcctagtatcgtcctataataccaaaaacgtgaactttcgatgctatataaccaattttgccaataataaatgagaaatggatatatttttcacaaggccctgggactaggagggaatttggccggcgacaacatcgatctgcttgtaatttaaatcatttttctcggagaatttgacttccataaaagcgtgaaaaattgatagtactctcgatcgcctcgccacgccaccgacgatcgaaggtgcgtgctcaagtcagacctgatttagtcctggatcaagttagtcgctgtcattagatttcttgtcagcgtctacgtgtttggcgccaatacactcgcggggtgttcagttgaccacgggatgcagtgatgatatgcctcgaatcgcgcgcgaaaaattgcaatttgttccgatcttggcgggaagttaggccattcacattagcttcttcttaggcgtgtgatcgaattagtacttcctccgtattttaatgtacgacggcgttgactttttaaccaacgtttgaccatttgtcttatttaatttttttatgcaaatataaaaatacttatatcatgcttaaagaacatttgatgataaatcaaatcacaataaaataaatgataattacataaatttttttaaataaaacgaaaggtcaaacgtttgttaaaaaatcaacggcgtcatacattaaaatacggagagagtactagttaatcgtcaagccgacccgatccgtagtcgacggtatagccagcgcccaaccgctgacaattggtagatacagatagataaacaaggagagatgtgttgctcctgcctgccatttcgtcgctgctggtgacatgtgggtggcacgtttgagtatatagctaggttatgtatttaaaaccaccatgaattaatatatagacctagcagtagcacaatggggattggatttaaataaccaattcaaaggtcttacgatgtaaatatatttattctccccaccgcaagtcgtttctataaatgatttttgtgggggtatggatcaattgttgtataagggaagcattttgtaaaaaaaaaaaagagtgcaaacgtttcgcttatatttattcgttcagcttattagcaaaaaaaaataatattcgtgaataaactgttatattggtgtctttaacgatttattaaaaataagtgctataaaattaagtcccagaaattaaattttgacatataaatataagataaggctggaatctcattttcccacggtgattggagcagatacattcaccattcgtgcaagtgcatcatgccctcagatgtgccaagtcctcttcaattctattatatcatcagtaggataagtggcaaagccaggaatttaagcctgtggggtcaattactagtggtttgtatttaagtgaggtcatgtatctaaattcttttggattcatacatgaaaattaaggtttataggattttttttttcaaaaagctatgggtcagccaaccccacagaagaggcctaaatccgccactgaggcagatctaattgctagcagatttaactatttgccgtttaatttgatgtttaactacatgtgtcaataatttatgagccttcatatacctacaatatatagattcagtggtaaatagttatttgctacatccacgacgggcgaatagtctcatatttaaatatatcctaattgcttgcgatatcgactgcctggatgataagatttgaggaaagagaataaaagagagataaaactgggacacatacgaccaatgttgtcagtatcccgatcgtaaaatggtatcttatggtaatttttttttacacgggatgaagatgaattgaggggaaaaaaggagatgaactaaaagtattgagaaaatcagcatatgtctcttttgttgagaggaagagtagggaagtaaagcagagtttggttctagattttcgatgggctcagttcacctactatccctctactttacgttgagtctgtctaacatcccttatgtccaatactagaaatccccccccccccactatacgaaaccgtgtagaataggttctatggcagtataaataaatggttccgttgacgtgacatcctaatcagtaaagaggaaataaaaaaattatggggcccacatgtcatcctcactccttccacttctctctatcttctctctcgcatgccatgagcagggcaagcggggcggtgtcgctgtgtcgagcgaagcagcggcgcacaaagctggcaggcggcgggcggagcgctgtggcgggggtggagtgtagaggacggcagcgaacgccatagaggaggatggcgcagcggacggaaacgcaatgggtgaagaggctggaagaggacaacgacaacgcgcttggggtttcactgggagacgatgacaacgactccccctccttctctcccactctcccgctggcctcatttcccccttctcccgccggcgcgacaggtagcctctcccccttctctcgccagcacgggcggtgggctctcccttctctcaccggcgcggccagggcagtcggtgtcacgcccagaaatttagcccaaatttccagactattttgtgtattaaatccctgtccaggaccagccagggtacacaaaacgacaagtaataaacagttccaaacgtaaataaagcgtaaaatacttacaaaagaggcacttagtcctcacaccgaaacaaaagcagcagcagcggaaaaaaggcgatcctagcggggcttcagctccactccacaggcaaaactcaactggggtctgagccttggtcttctaacttcgtcttcagctcagaaacactacacttctgaaaagggggaataatagcaaggctgagtacaaccaccgtactcagcaagccacaccaatgatgcagacgtgcaaagggatacaaggacggtttgtggctatttgcataaaggcggttgtaaaacattttattgagcaaaacagtaaaactgttgagtaattaaagtaacattaaatctccactgatcaacgctacaccacgttgaacaggcccaaccaacccacctaaactacagtgtattaggtcgatttattaagtgtgagactaatcacggtgaatctggtcgaccgcccataaccgcgggcacggctattcgaatagttttactctgatcagaggtgtacaactgtacccacaagacacagccccacgacacgtttccgtgcgccgacatgccaccacgacataccggaaagaggccgtgacaggacccttcgcataaccccctctagccaagcacaccacacctcaggtttcacccccgtccccagcgggcaacgggtagtcccctctcgtgcctaggtgaatccggaagcgacagaggccgtcgcagggcccgccccgctccatcacgcccacccttgcctggatgcgtcgactagaggaaagctacactacaagcccagccgttgcccacgctggcttgtggtaagtacgataagttcttccagggcatcccgcgaaccggtccttaactgccatgggtgcgaccagcaaaaccatgcacccacagcccaccattcagtcgcattttagttggataattacgaccatgaagcatggccaggtgtctcgagcacgcagctcactctgatactaaaaaggtctaatactgcagttatcccatcaactgagctagtggtaattaagcatggctaagcatatagttctagctaggtcacataagtaacatgagctagtcgattcattacccaaggttgacaaagaacagatatcaagtaaacatggcacaagcgagcagataggtaaaaccctgatcccgtgtaattagcaaaacatgcatatttatttgcaaacagtaaaacatttgtaaattaggatcaacatgctcaaggggaatgtgtgacttgccttgcttcctcactttgatcttccgaactcttttcctcgcgaccgcggacttccgaaacgacggattctacacgctggcacgcaaaacgaggaaaaactctaataaagaccaaggaaacagtacataaaaactaaacaaacatgtagacctcaattttagatgaattttgcaagttgaatggctcaattcggagttcgaatgaattagatatgaattttagaagttttgagccatttaaatgaatttctataattatttacgaattattgcgcaattattatttatttttacaaaggaaatggatctcgctgacgtcagcaaggggcgccggcgccgacacgcgggccccacacgtcagtgagcaaaggggacaggcgcacggtggacacggtccaccgcagcctcgggcgcacgtccaccatttggacggcccagatcggcccgagctgatcgggcggccgaggggagcggcggccaggggcactggcgcgacacaaagccggcccggccgagccaaggcgcggcggcggcatgcagccaccggcggcagcagccggcgacgcggaacgacggcgggcagccggaggacagcggcccgcacaggggacggcgatgcacctcaagaggcggcagccggcaagaaagggtgacgggaaaaaaaaaggggagggaggagaggtcctcaccgaaaacggcggccgacgcggaggaagatgacgacgacgacgattgcccgatggcggctggcgaggacggagggcgaacgaggtcgcccttgacctgcggaaggagaagagggagttaggttggggagaaccgatgcggggtgactagaaatgaaggccgatggcgacgacgagaggtggggctcaccggcgaacttagaggatgagttggagcggcggaagacgacgaccaagcagcggacgaggtgagggcgagcactgcgaacgcgccagaggcagcagcacggccgggcgaggtccccctcaccggcaaggagcggctggagcgctgtggaagcggaggtagctcggctccgcggtgggagggggttccggtggtgaatgggagggatgaggcggcggccaggcttgcccttgtggcgtcgaagccggcggtggatgcggcgcagcacggcagcggcgggaccggcggtagcgcgcggctggagggcaccgacggtggtggagctcggggtcgacggtggaagcagtgctcgggctaccaaataaaggggtggtgcggcggccgaggcgtggcactacgcggtgcagcttttggtggcggtggcgcagcgcggttgcgacaggaacagcggtggcgggcggctggagttcgccggggagcggcggagagagggagcacggtggggaggtggctaggaggcgcggggtgctcggggagaggggaaaacggatgaggggaggcacgtgagtcgtttatataggtcccggagggggagaacgtggccgggagaggcggatttgaagggggaaaaggcgccggcgacgtgggcgagtggcggagcaaaccggcgccggtttttgggggaaatgggggaggagagtggaggaggtggaggggatgcggttgctctcagttcggatgcgagcgcgtgaacgggaggacgcgaaaacggcggcatcgtgggcggcaatggcggccacgagcggctgctggctgggatggagggaggttggggatgacaggcggggcccatgggtcccacacgtcggctggagagagaggagggaaactggggaggcaaagcagacttccctcaaggcctgagccggcctagagatggaggaggcgcgcggcccgggaagggggaggggattttgggccaagcccgaagggaggagagggaaattatttggttttctttttatttaattgattaaatgatcttcgtgactttaaactatttctcgagctccgaaaattcacggaaaattatggagagtacattagggcacaaagaatattacaaaatattcccggccaataatttttaaaggaaattttaatttcctctattaattcacttgaataaattgcttaactttttatttaatttctaggaaatgcattatcaaatgatttttaatcccgaacgaaaatcggggcgttacagtcggcctcctatcccccttctcctgccggcgcggccggcggcctctcccatttctccagtcgatgcggccggccgcctctcctcctattctcacaggcgcggccagcgcggccggcctcctctctcccttctcccgccggcacggccggcgacctctcccctttctcccgctgatgcggccggctgcctctcccgccgacgcccccctctcctgccagctgtcccgggctggaagaaaagaaagacgattggctgacatgcggaccccacatttttcttctatcacttacatatggacccccacaatttttttattccctctttgcggattaggatgccacgttagtaaaaccatctattatactgccataggacctattctacatgatttcgtatagtttagggggggagatttctggtattggacataagggatgttttacagactcgacataaagttgagggacggtaggtgaacttattcctcgtaggaatcgtgcaagctgggaataagttcactttgtgaccctcaaaagtgattgaaatctaatccgtgaccctaaaccacaaaaccggatatcttgacccccaaactatgaaaaccggtgcaatttgactccctcagcggttttggagggcggtttcgctgacgtggcggtattgaccaggtcttctttacacgtggcgttgatgtggcgcttaggtggcatttcaattaaaaagttatacgtgggactcatttgtcattcacacacaattgtggggc

SEQ ID NO: 8628 - DNA, 25995 bp, Oryza sativa
tctcactgccgggccgagctcgccgtaccccgccacgtgtgcctcccgccaccgccgctgtggtctcctccgtcttcgtcgcagtggagctcagcccaggtgccgccgcgcctccgcccctcgccaccatctccgcctgccgcgggagagagagagggaacggcgaggagagagagggaactgagggaggggagagagaagggacacgtgggtcccacaatctattttctgtgtcattgacaaatgggtcccacatatattttttaatctaaatgccaccttaacgccacgtcaacgccacgtgtaaaggagacccggtcaataccgccacgttagcgaaaccgccctccaaaaccgctgagggagtcaaattgcaccggtttccatagtttggggggtcaagatatccggttttgtggtttagggtcacagattagatttcaatcacttttgaggggcaccaagtgaacttattcctgcaagctgggatgagccgtgggccgcggcctgtgtctccatatgatggaccatcaaagagttggtttccaagcgttcggccagaaggctagaaagacgtgaacagagacagccaatggcctactgccgagaggcccaaaagttgctaagattggtcgtagtttttgtcggcccatgtaggatagatatgaggtcccttactttttgacgaatccaatttttatccttcaaccaaaaaaccaaatacagcggtcaaaaccggtgtaaactaactccgaaggcggtttggacggtggacggtggtttcagctgaggtggcgctttgactctatctttatctgacgtggcacatgaagcaaaatctaacaatttaacaaataaacaaaatatgtgagcacgcatgtcagtcaaataataagattgaaaaatagtagaacccacgtatcagtggacctacttcctccacctcatccccacttctatgtatcttatcctctcccaagggagtagggtgagcagagcggcgcggcgcggtggcggaaatccgctgccgacgccgatctccacagcttcggcgctcccaactccttccgccgtcatcatcacgccttctccaccgagctccactactgtcttggtcgccactcctacttccccacctgctttgacgatgacgatggcaacatgttcgaggatgcacacctcatcttcttcttcccagtctcctctgtcttcgcaccaccgtccctcgccatgtcagctgccgccgcatcatacaggcccctcttctccctgctcccacagcatgccacactcccccttctagccgccggacccctctcagcgcagcctctgccacttcgtccactccacctccttcctccccttcatctatttcgactccctcgaggacaatgctctccactctgtccccatccttctcagcactctccaacttgctcgtcgtcctcgagccccgtctccgccgtcctacgcgccaccccccgacctcgacggcatcctcgccatgggcagcggctcgccgcgctgtcccctcgccatgggtggagaaaataggaccaccaacatgtgggtaccattatttttctttatcttagtttgactgaccatattttgtgtcaattatttagttttcaattttgtttttttccaaataaaactgtcacgaaaaagccacgtgtaacaaagatcaagttaaattagtcacgtatgtaccgcgtaagccaaaactagagataatagtaccgaagaacttcgtttgcactggttttataagttaagggggtggttgtatctggttttcggtttagggcgtaaatcggatttggtatcaagttaagagatatcaaatgaacttattccaacttagtttcggtcagcccatatgcacaaaactcatggaatcagccgtaccttaattgaaggaaagaaaaagaagaaagaaaagatactgattttctttttagaaaatgaattaaaatccggctacatcgatgtacacagcacagaaaagatactgatcggtaagcagacagccattcgatctcttgagatgagctcaacacgcggggggtgcacgcaacaagatcacaacaaagcttgcgaatgaaattatactactccagtacttaagtatactaagcattgtctcaaatttcaatgctgggtgagcagagcaccaaatgattccggcaaagcacactccagtagtagcaaatcaatcaatcactacagggagaggggatccaagtttttgaccagctttgacgaatcctcactctcctctctcgcacacattcccccaaccaacaaccttactagaacaggataaactaatacttataagcccagatctagcaataaaacccaccaccaattaactaatcaaccggatccatgagctaaaccagtgtcagtgaggcagtgacacaccaatgtagtagaactagtaggaggtattaatcatacggtaaaaaaacaaaaaaaaaagaagaaagaaaaaaaggcatgcatcttaggggcacttggggccgccttccttggtcttccagttgttgtagcaggggcaggcgcccttgttgccgtaggtgccgggcggcacgcacaggcacttggcgcagcacttgttgcagaacgtcaggcacgccttcttgtactgcgtgttggagcacctccccgcgcacttgggcgagcactcccacggcctcaggttcccgccgccggccacccctccgccgccgccgccgccgcgcccgcgccctcctgccatcacctcctgcacgcgagaaacaagaacgaacaagaacgtcaagattaacccaagattcaagatatatagtaatcaggttgaaggagaggttagagagattgtgaggttaccgatgggaaggcgatggaaaggaggaggaggacggcgaggaggaggaaggggatcttggtggaggacgccattggtgggtgcggtggtgtttgggtgggttagggacttagggtggtgtttatatagaggaggaggaggaggggaggacggcgagattggtgtggagccgtggaggagtaaagatttgtgcgtgcaggtgcggtgtttggtgatggggttggggttggggcatgtgacgcgccacagtggacgcgtgaaccggtcgatgggcgcaggcgcgcagctgggccgtagcactggcatagtgggcattggaaacgcaccgctctcgctctgtccattattgcgtcgtgctggtgttggtggtggcgggaacagatgaaaaacatcaaaaaaccactctgcattaatagttccagtacaggtagtagtagaggttttcaccggccgtggtggaccagtacgatactccttttgggtagctttgggcgggcaattcgagtttcgaggtaacgactaagagcaagttcaatagtatagctaactgctagctccaattcatctatagctaatctaatagttcatttatacaatagttacatactacactattaatacctggtcccacctgtcatacacacaccgtgtcttggagtccgtgctacagctagctataaatctgtagctcgctgtccttctctctcctcatttatctccttaaaatatgtttgcagctggcttatagcctgctattgtacctactctaagagccagtttaatagcatagcccattgctagctccaattcatttatagtcaattcatataatagttgtttactatactattaatatctgatcccacctaccataacacagtcttggagtccgtgctacagctggctacaaatctgtagcccgctgctcttctctctcttcctttatctttttaaaatatgtttacagctggcttatagcctgctattgtacctgctctaataccgggaatcaaacgaacccgaggagatgtaagagcaagtttaatattatagcctactactaactacaatttatctatagtcaatttaatagataaatcatacaatagttgtttattattttattaatatatgatcccatctgtcatatacacattgcgttttagagtccgtgctacagctgattacaggtctgtagcccactactcttctctcatattttatctcattaaaatatgtttatagctggctaatagtctgctattgtaactgttcttaacaaaaaaataacacgacgaggtggtgagatgctactccaagtctagattaaatcggtgagtgggtcatatactataagtaatagtactccgtagtttacgtccactagatcggcggcacatgctgatgccctttttccagtgcacctccactagctactagttctggtactccattctactcctggagagggcaccgcacatgcgcggttcgtatccacagcttgcgggcaccgcacatggatgatggatcgttccaggtttgtattcaccacagctcttgcggcacatggactcccccatctctctaccctacagattgtcgtgcactcgtgcagcagttcaattcgccatgtagtagtagtagtaaaaagtaaaaacttgtatatatactcaggtacttgtactatagtagtaaaaaggcgtccctcgtcgtcgcagagctgttcaaaatttcggttgcacggggcacgagggcagccggcaaaatctccctgttttgctgggggcttttcgcacgccaaaagtccaaacgctctctcgacagggtttcatttaccgcggtaaaccgcgcggttaccgcggttaccgcgcttaccgcgggggtacggtaaggggtaaaccgcggtaaccgcgtcaaattcaaataaatttgaaaaataatttgaatttttgataaattttgtacggtttgtcgcggttaccgcggttaccgtgcggtaaccgtgcttaccgccggggcgcggtaaccgcggccccggcggtaaatgaaaccctgctctcgatctttccgtttgcaatgcatgccacgcgagcgcgagcctagatccgcggcgcgaccggcggtgtgtgtgctgctgctacgccgccgtcaccggctttccggcatccacgtggtggggggctgcgtacgacggtacgacgacgaacatgcagtgtttcggggcccagacggcggtggtcggcaggcaatggctttgcttttggctggcctgcgactgcgggagggagaggagggtaacatggggagcggcaggtgggcttggggaaagtatttacagctcggcgtatgggacgacgattactggtggccggtggctgctgctgtttactgctactacaactgcaacccttcgttgccttgtcgatttgtcatccgcgcgagagcgctccgggacaaatcgatggtgtcctcactgccgactctctctcaagaagtcttgggccgtgtttggtagggctataaacttcaactcctagctctaaattgctatttcagttggagctagctcctattagagttggagacccatccaaaagtgtttgacaagcttttagctcccgatctaaaaaatattgaaaaaaaggaatccctgctgccggccgtgcgccgcccaagcatcgtctccacgcacgccggcctcgcgctacttcccctgcaccacccatccgcccttgtcagcgtgccgcccgtcacaggctgtgcgccgctcacacgtcgtcctcgcttgcgccgaccgccccgccggagcaccgctgcccgcgcaccccacccgtgcgccgtcgctgctcgcatcgcccgccgtcaccgcaggagcgtcaccatcggcccgctgcctttgcccacatgtgggagttaagttttggggggggggggggggaagggaggaggttgagcttgggataattcagtgacatttttatgtgaatgtgttaaaaattaaagggtagtggatcttttgggttggagtggagctgtggagcagaaaaaacccagctctacacctgtagtttattttttaggagtagctctactaacttcactccaaaaacagaaaatatggatcgtttggtacagctccgactctagataagttggagttgaaagttagagccgtgccaacggaccctcgtactccagctgagttcgcaatgttgcaatgcacgggcgacgatcgtcgtccgtggagtgtagattcctatcattttggtgacctttgcagagggcgttgttgatcgatgatgcgcatttcggccattgcagatcaggtgaatcacgattagcgccctattgtttaggttcccggtcaatatggtcttactactgtatatgcgtctgattaatttcgaattatgtttatttatttcttctccagcatgtgtagtgctccctccgtcctataatatagcaatctagtataagacgagatacttcatagtatagcgaatctggacatgcttcatgtcatgtctaaattcgttgtactataaagtgacccatccggttctaggttgctatattatgggatggacgaagtagtagagtatgggtgtgttcggcactgctggttcctaatcttttccatctcgttttccgcgcgcacgcttttcaaactaataaacggtgttttttttaaaaaagtttctatatgaaagttgcttaaaaaatcatattgatccttttttaaaaaaaattagctaacactttattaatcacacgctaatggaccgctccgtttttcgcacgcactgttcccggctgggaacctccagtagcgaatacacccatatgtgtggtagagatctggatcctctgccttaggaaaaaagcagaggtgcacgataaaatgagtctactactatggtagaaaacagtgatttgcagttttcactgtagcaacagtacaaaacagtgaaaaatactgtgcgcaattactatagtgatcgatctcgtccatttcgtgtgaaccagacaactgaaaataccccaaagtcacggtactgttttacctctgactttaaccccgggaccttaatccgtgtggtagtagataatatgctatgcacatctcccgtgaggcaaagcgtaaccttgtggattgtcctccccgtgcgtaaaaaaaaactaaaatgtattcgatagaaaattaagtttaaaatcttgtatttttcttacctaatgatttgctttgagttccgtgctctgatgacccaagctcttattctacagttgaccccttctcctttagttctggtgaccccctacaaacagtaatggagctagtgtttagggtcctcgattatggctaggggtaaggccgtaagggtgggggagggggaagagagggaagatcgctggatttagaaggatggtcatgggaggcggcggctcggtgttgggtcgtggacatgagcaggcggtgaggcgctcatggcgacgtcgaagccatgagaatagaggaggatgatgagccatcgttaatgacgggagcaaagcaaacttgtggtgaggggcggatcaactgtgttaggtgtggtgtcacctgacaccaatagattcttgtttaatctaagagcaggtttaatagtatagccccactattggctccaattcatttatagacaatctaatagccaattcatacaatagttgctaactatacttgttggcggatggcatgaggcccttcgaccaaatttgccgaaacccgtggcgaaggctatgaaccaaggatgaggcgaggcgaagggtcgcgtgagtacctgacgaagaaggatgacttcgccatagccagttcgccctggcatccagcgaagaaggacggcttcgccatgtccagttcgcccccgcaagggccgaagaagcctttttggcccatcaagcttaggggctatagggccggcggtcgcctgacggcccatcaaggacccataagtccccttgacattatgtaaccctgtaaacgtctctttcataagggcaaccatgtaaattcccccgtataacctaaaccctattagtaagaacatgtaatggggctataaatagtcccctagggccatgtaatggggggatcccaagtaaaattaaaaatttaatacacttcgtttctttcccaaccactgttgagtaaccacgtctttcgacgtatgcggttgtcgtttcgacaacagctggcgccgaccgtggggacctccgagcgaaaccactaagagcgaatgccaccgaagaaggtcgcgaaggagaaggttacaaggcgaaaggaaagcgacaccggagtgggcatggccgccgaagaaggagcggagccttcggcgtcggtcgccgaggttggaggggcaccgtctgcttcggcgacggcaccgtccgcttcgacgccgacaccatcactgctgccttcggcccctgccacctctgagcaggcgccgagtgtgaatgacgtggcgaaggcgaccgcagtggcgagggcacttcagaccagggcggagatcctttcgacaagtcagctgctggtcccccaagctgctccgtcgcagccagcagcggcccaagctgcgctccctgccatacaagtccaagtcaactccgaccctgaaacacaagccgaagccgatatggagggcatgcggcaaaacatggcacgactccaagacatgcttcgccaaatgcaagaacagcaacaaacgtacgaagcggcaaggcgatccaaggttgcttcggcaccgatcctccagtattcggcaggttttgtcccacctcaagtctatccgcaagtgcagcccaagcccgctccgccgcaagtcttgcaggcaccaatgtactttgtcggacagccgacagtggcaacagtgccccaagccgcgacccaagtatagcctcagccacttggccagctgtcgcaagccgtagcagaaggggcttcggctctgcaggcacaattccaagctttcctccagcaaatcaatcagccccacaacatttcgaatacaactccctcaactcgtccagaggggaattcaagtcaaggtgcgctcagttggttgccgccgaaccagccgaatctgaggacttcgccatggaatcaggtacctcagtgcgactttaccaataccgctcaggcgcaaaccgttcggccgcaagcaccaacaccaggcttcggaacaagccaagcaccaactcatgtcgccatggcgtggtcgcagccagttttcgatccatccatggcggctcagcaagcatcaccagtcggagccgggcagccgaacgccatggctcaaaatcatgcgcaagccgtaatttcacctttcgccacgccgtacccacagcaaggcaccgcaggcagagcgggaggcgaaaagggtctgccgctgagtgggggaatcaagaaccgcccaattccgccccagttcaaattccctcccgtcccacgctactcgggcgaaactgacccgaaggagttcctatccatctacgagtccgcgattgaagcggctcatggtgacgaaaataccaaggcaaaggtaattcatctcgctcttgacggcattgcccgttcttggtatttcaatttgccagccaatagcatttactcatgggagcaattgcgcgatgtttttgttcttaactttcgaggcacttacgaggagccgaagacgcagcaacatctgctcggcattcgccaaaggccgggagagtcgataagagaatacatgcgtcgcttctcgcaagcctggtgccaagttcaagacataaccgaggcatcagtcataaatgctgcttcggctggtctgcttgtcacgcccggaaattcactagtaatttccgaacttatttgtgcataaaatcctcgtccaggaatcaaccgaggtacacaaactgacaatttaatatacaaatccatcataataactaaaccgatatatacttacttaagaggcacttagtcctcaccatgaagaaaactgcagcggaaaataaaatctagcgaagctccggctccactcccacaggcagctcaactggggtataagccaaacgtcttctccttctggatcctttttcttcaactgaggttgatttattattgcaaggtgagcatatgacatactcagcaagccacacagcaaatatgcaagtgcacaaggataccaaaggatggcataatataggctcatttgcaaaagcagcatttagcaaaacatttaagagaaataaaacagtggagtaattaatcagaaattttaatcaacactgaacagcacacccatgctgcataggcccaaccattctgaacaaccatacccggctgaacagatctaactccaaaccaggagctaagcaaattattacccggtataacatctataaatattgtgagaggtgtgagactaatcacgaaaaacattgttcaactcgcccataaccgcgggcacggctattcgaatagttttactctggccagaggtgtaccactgtacccacaagacacagcctcaacatcatgtctacaatgcgtcgcgatactggaaagtacccgaatagaggctgtgacaataccctctgcataacacaactcaccacagtgcaccattcctggatcataatcacccccttataaaacaaggcatggactccccagcgacccccgtgggcttatctccgccacttctcagtctggtgctccgcaatgaatcatgctatacaaaaggtaaagccgttgcccacgctggcttgtggttggcacggttaatgtttcacaatagtagctcgcgaaccggtccttaattgtcatgagcacgactctcaaaaccatgtgctcacaacccaccattatcaagttttagttgacaagtaattaattaaccaatcacgattaaccatcgtgaactatctttaaaccatcattaaataataatgagtcataagttatcccaatagtgtgctaatgtttctaagcatggctaagcaatcatatctaatatctagctgaaccaatatataaagctcaaccagtcaagttataatctcccaaggtatcaaggaataaagtaatcaagatcaaaagggccataacaaagaataggttaacaccacccagtgacattcgaaaataaatgcacagttgaaataaatagagaatttaaatataggatcaacatgctcaaaggattgtgtttaagatctgtgtgacttgccttgcaataatcggtcttcaattaatcttcttgaatacttccggcgcactcgcgaaccttcacaacgacggaaacgacaagctaacacgtaaaacgaagaaaaagactaataaaaaccaaataaacagtacataaaaagtaaacaaacatgtagatcatatttttagatgaattatgagacttgaacggcctcattctgacttcaaatgaatttattatgaattttacaagattaaatctatttaaagcccatttaaaaagaattaaataaatttaattcaatttatggacaattttaatatgtagatctttattttatataatttttgcaacttgaaccacattaaactgagttcaaatgaattagttatgaatttttaaagattaaatcggattaaaacctttatatggattttaattgaattatgacgcaataatgaattatttttgaaaaggaaaagaaggattattgcgtcagcgggctagggtttgcggtggaccgggtgcacggcagcggttcacggaaatgaacggccgagatcaaccctatccaaaacggacggctgagatcgatcggtccacgaccggctcacgacgaacggtcccgatgacgtcggcgatgacgtcacctaccggcggcggcttggacggctcggacggcgcacgctcgccggcgaacgacagcgcggcggcgcgaacggagagctccaggacgaagagcgcggcgcggcgaactcaccgatgaccaaagcaacggcggaggagcaacggacggcgccggcgacgaggaaaaggcggcggcggtcttcgggtcgacgatgacggcggtgctccggcggtcttcggtggcggcgaaggagcggacgaggacggcgacgaccttgcgaacccgatggcggcgacggcgaccgacgacggcggctgcaacggcggcgcagcgcggctgaaccgacggcaacgacggcggcgactaaggctacgcggaggcggcgctagacacgacggcgggctaaggcaaaggtggcggcgggtagaggagacaccgggggtccttataaaggggctagcgagcggcgacggaggcccacggcgaccggcggcgagaaggaaaggtcggggattcggaggaaagagaggaatccgattcgacctcgaatccacaagtttccaaaccgaattaggcgatgattccaaaagagaaaaggaagaggagatctcaaggatcatttgccctcaaacaattcggccggagaaggaaagacgcggccgaatttggaaagcggcggcggagcggctcggctagggtttcgggcggcggcggcggcgcgaggaggaagacgggcctgacagacaggccccacctgtcagcggctgagagagagaggagagcggcggctcggcggactgggccggcttgggccgagaagagagagaaaaggttttgggccgactttcggcccaaagccaaaagagacttttaaaaacccttttcaatttaaattattcatgaaatgcaattccatttattaaaaatacttccttagctcaaataaatcccagaaaaatctaggaattatagaattaagcaaagtatttaacaaaattttatctagcccaattttatattgagatttagcaaattaaaattagatcttctcttttaaacttttaaaatcatttctaattattccttttaaacaacaatttataatttaaggattttaaacaagaaaagctcttaacaattataattagatcattaatgatcaaataattactgaactgttctttgtattatttaagaattgagctctgaaaaatccgagaaaatttcagagagtataattaaccatggagaatttaataaaaattaaatccatccatgctttatatttaggaaattttatttcccacatttaacttcacttgtaaattaaagatcatttaatataaattctaataataatttattaaatagtttataaatcctgaaacgaaaatcaggatgtgacactgctcgaaggcgaactcacaaggaaaatcgccaataaggaaccacaaacactcgtgcacttgcttcgcatcattgacggtttcgcaaggggcgaagaggattccaagcgacggcaagccatacaagctgagtacgataaagcttctattgccgctgctcaagctcaagcacaagttcaagttgccgaaccacctcccctcgcggttcgccagcctcaaacggcgatccaaggacagccgccaaggcaaggtcaagctcccatgacctggagaaagttcagaaccgaccgcgcgggcaaggctgtgatggccgtcgaagaagtgcaagccctccgcaaggagttcgacgcccagcaagcgagcaaccatcaacagccggttcgtaaaaaggtccgaaaagacctttactgtgccttccacggacgctcttcgcataccacagagcaatgccgaaacatcaggcaacgtggcaacgcgcaagatactagaccacagcaaggagcaactatagaagcacctcacgaagcagcccaagaacaaacacccccggtcgaacaacgtcaagacgcgcagcgaagggtaatgcaagtgattacgagggctgacccgccaggccaattatccaaaaggcagaaaaagatgcagatccgagcggtccacagcatcacttcggcgggtgagggggcgccacagtatgtgaaccagctgatctctttcgggccggaagatgccgaaggagtcatgttcccgcatcaagatccgctggtattctcagctgagatagccggctttgaagtccggcgaatcctggtcgatggagggagttcggccgacgttatcttcgccgaagcatatgctaagatggggttgccaacccaagctcttacaccagcaccagcgtcgctccgggggttcggcggagaggcagttcaagttcttggccaagcacttttgctgatagctttcggcttgggagaaaacagacgcgaagagcaagtactgttcgacgtcgttgacatcccgtacaactacaatgccatcctcggccgtgcgaccctgaacaagttcgaagccatttcccaccacaactatctcaagctcaagatgcctggcccagcgggagtgatagtggtcaaggggcttcagtcttcggccgcgtcaaaaggcgatctagccataatcaacagggttgtgcacaatgtcgaagccgaattgcacagccggccgaaacacgtgccaaagcccaccccgcatgacaaaatagtaaaagtgcagattgaccatgccgaccccgcaaagctcgtatcactgggggacggcatgggtgaacaagaagctgagggcatcctagcggtgctcaaaaagaacattgatattttcgcttggagccccgatgaagtggggggtgtttcggcagacctcatcatgcatcacctggcagtcaagccggatgccaagccaagaaagcagaagttgcataagatgttcgccgatcgtcaagaggcggcaaaagccgaagtccaaaaactactcagggatggggttattcaagagattgaccacccagagtggctggcgaacccagtactggtgcggaagtcaaacggcaaatggcgcatgtgtatagatttcacggacctgaacaaagcatgtccaaaggacgatttccctttgccgcggatcgatcagctcgtggattcaacagctggctgcgaactcatgagtttcctggacgcatattccggctatcactagatccatatgaatccgcctgacatcccgaagacagccttcatcaccccgttcggcactttctgtcacctcaggatgcctttcggcctaaggaatgccggagcaacctttgccagactggtatacaaagtcctttgcaaccagctggggcgaaatgtagaagcttatgtcgacgatattgtcgtgaaaagccgtagggctttcgatcatgtgtccgacctgcaggagaccttcgacaacttgcgcgcagcgggcataaaactgaatcctgagaagtgtgtcttcggcgttcgcgcgggcaaattgctgggtttcctagtttccgaaagaggcatagaggcgaaccccgagaaaatcgatgccattcagcaaatgaagccaacgtcaagtgtacatgaagtacaaaagcttgcaggccgaattgcggcacttagccgtttcctctcaaaagcggccgaaagaggtctgccattcttcaagaccctccggggcgcaggaaagttcagttggacaccagaatgccaagcagcattcgccgagttaaagcaatacttgcagagcccaccagccctcgtaagcccaacaccaggaagtgaactgctgctatacttagtagcttcgccggtggcggtcagtgctgccctcgtccaagaaacagagtccggccagaaaccggtttattttgtctccgaagcactgtaaggggcgaagacaagatacatcgaaatggaaaagctcgcttacgccctggtgatggcttcgcgcaagctcaagcactacttccaggcccacaaggtaatagtgccttcgcagtaccccttgggcgaaatcctccgaggcaaggaaatctcaggtaggcttagcaaatgggcggcagagctatccccgttcgacttgcattttgttgcacgcacgactgtcaagtctcaagtactagctgacttcgtagccgaatggacacctgtgttcgcttccgaacccgagcccgtcgaacaaccctgggtgatgtgctccgacggttcgtggtcgcacaaaggggcaggcattgtggcaatactcacttcgccgaatggcgtaccagtccggtacgccgcaagactgcagtttaatacaaccaacaacgcagcagagtacgaagccattcttctgggcctaaggaaggcgaaaacactgggagttcggcgcttgctaatccgaaccgatcctaagttggtggcaggccaagttgacaaaacctttgaggcaaaagaagaaggaatgaaaaaatatttggaggctgtcagaaccatggaaaggtacttcatcggcataacagttgaacacttgcctaggggccagaatgaggaagcagacgccttggcaaaatctgctgcttgtggcggaccgcatttgcctggcatattttttgaagtactgcacacaccaagtttgcctgtggacagtttgacagtcttggcaatcgaccaagtgaaactgggcgaagacccaaatgactggcgaaccccgtttgttaaatatcttgaagctggttggcttccggacgacgaagcagaagcaaagcgcttgcaaatcagagccacaaagtataagttggtctcaggccaactttatcgctccgggacgcttcaacctctactccgttgcatctctttcgccgaaggtgaggaaatggcgagggaaatacaccaggggctatgtggcgcgcaccaagctgcaagaatggtggcctccaaggtatttagacaaggggtttactggtcaactgtgttgaaagtctgtgctgagcaaattaaaaagtgcgaaagctgccaacgtcatggccgaagccaatctgcgccccattataacttgcaacccattgcgccaatctggcccttcgccaggtgggggctggacatcattggcccgttcccggtagcgcgaaacgggtacaagttcgtaattgtggccatagagtatttctctcggtggatcgaagccgaaccccttggggcaatcacttcggcagcagtacagaagtttgtttggaaaaaaacattatttgtcggtttggagtgccgaaagagttcattactgacaacggcaagcagtttgactctgataagttcagagaaatgtgcgaagggcttaacctggaaatcaggttcgcgtcggtcgcgcacccgcagtcaaatggggcggccgaacgtacaaatggcaagattctaaaagcactaaagaaaagactcgagggggcagcgaaaggcaaatggccagaggaattgctatcggttctctgggcccttcggacgacccccacaagaccaaccaagtttagcccgtttatgcttctttatggcgatgaggcaatgaccccagtagagctaggggctaactcaccaagggtgatgttctctgggggcgaagagggccgcgaagtatcgctcgaactcttggaaggggtaagagtcgaagcgctcgagcacatgcacaagtacgccacaagcacttcggcaacttacaacaaaaaagttcgaccgacggagctgatgcctggtcatctcgtcctaaggaagaaggcgaaccctgtagcggttggcaagcttgaatcaaagtgggaaggaccgtacctcatcaaacacaagtccaggacgggatcctttcgcttagcgacacttgaaggcgaggagttcgaccattcctggaacgccgcctctctcaagcgcttctatgtctagaatgggtggcacccaaatcgccaacttgtaaaaatgtacataccgttatgtaagccctttggcactatgtaagcctttcggcaagaaaaaaaaagaaagagagaaaaaagagaaaaaaaactggatgtagggctattatccaccatggaggcccgaaccagtataaaatctctgtgtcctccgccttctttttatttttcgtgtgattgataatttgtggaaaaaccccaaggcaaacgcctgatcagcgaaaaaggccaggggggcgaaacgaatcggccgaagcatcgctcgccgaacgttgaaaccgcaacagcttgtctcagaaaataactagccgaacgatgttacgctcgatcaacataaaagcaaaagcgtttctttcaacacagaacgctacagatcgaaaacgaacgatgaaaagctgaaaagtcagtacacctatttcgctaatatacgcaaaggggccggcatgttccgacctaacaaaagcacaaaatgtgacgatgcgaaaaatagcgaaaaggaaataaaacacatttttattaacttcgaaagaatagaaggttcacacgatacaattcaccttacaagtaaaaatacatcttcgcccccataatcactatccctccctaaggaagggtcaggcgaactaggttcgtcatcactactaatatcatacacaaccttaagaggagtagggggcgaaacacagactaaactataacgacgctgaaagatcgtttcctgacgtttagtcttctgatggtttcgccaaaagcgagccatatcctccaaacgtcttgaatgaacaagatcgtaatcttctaaggttcgcccggggtgcgcccgcagccaatcggcaaccttgaaaaccttatagctgcgaccgtttatctccatttcgcgataagtaggacgaaatggacatcgcaccttcggcagacccttcaacgccacaaatttctcggtttgacttcgccagctcccgaaaggaggccgaatgcacgactttcggcgaaccccctggtagactgtcacgcccggaaattcactagtaatttccgaacttatttgtgcataaaatcctcgtccaggaatcagccgaggtacacaaactgacaatttaatatacagattcatcaataactaaagcgaataaatacttacttaagaggcacttagtcctcaacatgaagaaaactacagcggaaaataaaatctagcgaagctccggctccactcccacaggcagctcaactggggtataagccaaacgtcttctccttctggatcctttttcttcaactgaggttgattgattatcgcaaggtgagcatatgacatactcagcaagccacacagcaaatatgcaagtgcacaaggataccaaaggatggcataatattggctcatttgcaaaagcagcatttagcaaaacttttaagagaagtaaaacagtggagtaattaatcagaaattttaatcaacactgaacagcacacccatgctgcacaggcccaaccatcctgaacaaccatacccggctgtacagatctaactccaaaccaggagctaagcaaattattaccaggtataacatctataattattgtgagaggtgtgagactaatcacgaaaaacattgctcaacccgcccataaccgcgggcacggctattcgaatagttttactctgatcagaggtgtaccactgtacccacaagacacagctccacatcatgtcaccatttgcctcagtaccaccacggtacctcggaaaggagctgtgacattaccccttgcataacacaatccaccacagcgcaccttcctggatcataatcacccccttataaacaaggcatggactccccagcgacccccgtgggcttatctccgccacttctcagtctggtgctccgcaatgaaccatgctatacaaaaggtaaagccgttgcccacactggcttgtggttggcacggttaatgttccacaacagtagctcgcgaaccagtccttaattgtcatgagcacgactctcaaaaccatgtgctcacaacccaccattatcaagttttagttggcaagtaattaattaaccaatcacgattgaccatcgtgagataccattaaatataaccataagtgatagtgaaacattagttatcccaattatgtgctaatgtttctaagcatggctaagcaatcatatctaatatctagctgaaccaatatataaagcccagctagtcaagttataataacccaaggtatcaaggaataaagtaatcaatgcaaacaggccataacaaaggaataggttcacaccacccagtgacattcgaaaataaatgcacagttgaaatatatagagaatttaaatataggatcaacatgctcaaaggattgtgtttaggatctgtgtgacttgccttgcaataatcggtcttcaattaatcttcttgaatacttccggcgcacttgcgaaccttcgcaacgacggaaacgacaagctaacacgcaaaacgaagaaaaagactaataaaaaccaaataaacagtacataaaaagtaaacaaacatgtagattacaattttagatgaattatgagacttgaacggcctcattctgacttcaaatgaatttattatgaattttacaagattaaatctaattaaagcccatttaaaaagaattaaataaatttaattcaatttatggacaattttaatatgtagatctttattttatacaacttttgcaacttgaaccacattaaactgagttcaaatgaattagttatgaatttttaaagattaaatcggattaaaacctttatatggattttaattgaattatgacgcaataatgaattatttttgaaaaggaaaagaggattattgcgtcagcggactagggtttcggtggaccgggcgcacgggcgacggttcacgcgaacggacggccgagatcgacttgatccaaaacggacggccgagatcgatcggtccacgaccggctcacgggagaagggacgataacgccagtgatgacgtcaccaccggcggcggcggctcggcggctcggacgcacatgctcgccggcgaacggcggcgcgacgacgagaacggaaagcaccgggatgaagcggacgacacggcgaactcaccggtgaccaaaggagcggcggaagaggaacggacggcgacggcgacgaagaagaagcggcggcgctcttcggcttgacgacggcgacggcgctccggcggtcttcggcggcggcgaagcggtggacggggacggcgacgaccttgcgaacccgatggtggcgacggcgaccgacgacgacggctgcaacggcggcgcgacgcggctgaaccgacggcaacgacggcggcgactaggctacgcggaggcggcgctagacgcgacggcaggctaaggcaaaggaggcgacgggtagaggagagctcggggatccttatataggggttggaaggcggcggcgaaggcccacggcgaccggcgacggcgaaggaaacttcgggaagaacgaatccaaaacaaactcgaatccatcgatttccaaaccgaagtagaggatgattccaaaagggaaaaggtggaggagatcccggagattgtttcccctcaatcaattcggccggagaaggaaaggatcgaccgaatttggaaagcggcggcggcgtggctcggctagggtttcgggcggcggccgacgcgaggaagacgacgggtccgacaggcgggccccacctgtcagcgacagcgagagagagaggagagcggcggctcggcagactgggccggactgggccgaggaggagagagagagcggttttgggccggctttcggcccaaagccaaaagaagacttttaaaacctttttcaatttaaattattcatgaaatgcaattccatttattaaaaatacttccttagctcaaataaatcccagaaaaatctaggaattatagaattaagcaaagtatttaacaaaattttatttagcccaattttatattgagatttaacaaattaaaattagatcttctcttttaggcttttaaaatcatttctaataattccttttaaacaacaatttataatttaaggattcttaaacaagaaaagctcttaataattataattagatcattattgatcaaataattactgaactgttctttgtatcatttaggaattgagctccgaaaaattcgagaaaatttcagagagtataattaatcatggagaatttaataaaaattaaatccatccatgctttagatttaggaaattttatttcccacatttaacttcacttgtaaattaaagaacatttaatataaattctattaataatttattaaataatttataaatcctgaaacgaaaatcaggatgtgacatagacagtgcagaaaaaagcaaaacacagcttacatggtaggaataggcggaagaagggggaggtatggcataatgcgaaatgagcgaaataataatatgtcaaagacttggaccgacagtaaatggcgaaaagtaggtctgttatacaaattttaaaaacgcccaacggccacctgtttcggttacaataaaagggtttgcggcagattgccgaatatacaatggttcgccacatctagcgaacaccaaaagaaaactatgaaaatctaagagaagggcggagggcctcacacctctgggtggtcctgggcatcgcttccaccccctccggccgccgcgccttcctcttcacaaaggtccgccgcctctgctttcaccagctgctccaaaaggcgcgccttagcggcggagcggccatccttctgccagaattgttttcgctacgcacgaagtgcgggcgaaatgtcttgcgcgctgatttcccaatcccccttcgcgtacttggggaactcggcgatgtgctcgcagccgaactgctgcaggaggcccatggtaaaggccgctgacacgcgcgcacagcagtcgccgtatgcggtggcgcagtccgaaaccgaaccaccagcctgttgggtccattcggagaagtcgaaggctgaggcatcttcggaggggacaccctgcacttttgcgcccatatcagtaatggcgaggcggagcgtttggcacgctgtccgcgcggactaggtggttttcaccatctcccgcgaaaaccgccgcgactcctccgtagcgcttgcttcggccttgcgaacctcctgccgaagagcctccatcttcggctcggtgaggttgtaataatctatgagcacggcggagtgggccttctctttctccagttcggcctttaagagatcgacttcggccctagcttccttccctttctcccgttccgattggagccgcttgttttcggccttcgcctccttaagggtgttcgcaagggcctccatctccaaatttttgcggcctaattcatcatccttggcccgaagacggcttttgaacccgtcaaggcgggctcgcacggttcgctctgtcgaacagtgagccgtgaggatctgggtgcaaaataggagcggcgaagagaacaagtgttagttgtaaaaacatggttaaattgttccggaagtacagataaacacggcatgaaacatagcataataagcagatagctaatgtaagcatagatttaatatcagtgaatccccttgagcctaaaataaactatagattagcagctaagcagcaaccattcttaactgaagaatgacaaagacaaaagcaacacagtataatcaagataaataaaacatgataagcaatatttcagaaccatgtgaaagcaagataaacaccaacaccctaaccaagtaactcacaaaatgatgcaatggaacctcaccaactgggcacccaccattacccccgagcagatggcctatggctgaggacgaaacatagcttggcctatgttcaaactacagcaacaacatggtaagctagtcaagcactcagaagtcagagaggagagagatggaccggagacgaaacatacgcacctagcggtgaaggggcgggcagacctgcagccgtgggcacccgtcgatcccgttggggacggtgtgtccagccaatgaagatgtacgccagcaggccttgatagaatagcgggccgatggctgaggacgaccgtagcagaagattgtgtggaaatcagcgatggcagcgatttcggctcgacggggtagagagacaaagaaacggcggcgatggagactgcgcgggtgaaagggatatatcgatctggtgaggggaaaggcgagcggtgaagaacccacggtggagcggcgacggtggagacgcgaaggaagtcgcgggagcggatggggaatggaaaacctagaagccgcggcagcggcggcggcggcggcgtagatgcgaacgaccagaggaatatctgggagctggtagcggctgcaaagaaggaaaaaacgaacggctggatccagtcaagcaaacaatcgaacggctcctggcgtaatgcaacagtgaaacagtaaaacagtagcgtacagtgccggacggctgtggttgcaacggcaaaaactatagattttatatgatggatgacaccagtgagatttatcctttgacaccaccacgtccatggaagcagccatgaaagcccatcatttgcttaaattgcttcggctaaagttagctaatacaacccagccggctagctattgcctgttgggctgttggcagtgagcagccgaacatgttgtgtctaatcaataacgcatatcccaacatctcaatgaatttttccaacttcccattcagtttgcaaacaaatttcttttccacttacatttatataacatgtcacctaaataatgtttaaaaacttctattaatttatttggtttaggtattttatttctagagattttgggggctctaaggctccgagctgttaagtgttgttctttggtgccggttggatagtgtacggacacctggtctaaggtttttaatattcatttgtaatattatgtttgtgtagaaaaaaaatacttgtggtgctatttattttgcatatatgtatctagtatgatctagtatatagtttgtggtttttcaggatggtaacttagttttagtaccatgcgatcactggatgtttaactgctggttatttgaattattatgcaagttcatctacattattccacctattaactctactacttatcattattcttattacttttcatgtatattattactttgttagaaactacgataattgttatgatttaacgatgacaccattgatccaatatcctagatccgcctctcctagtggttaggagctaacgaggatgggggctggtggggcggggtacctcaccgctactgacttgagaagagggggggggacatcgagtgagtagcgcttgatcccgattctcgtgcgacactggtgtgagggatgtggttaggtttatgtcgtactgcatgaatcttaaagcatccgatgatctaaaatccgcaatattttattaggtgtttgtcgagctctagtgacaaaatggaccagcaggtccagcaccgaccggcccaatctttttttttccaaagaaacaatggcccaattaacaagattgccccgtgtggacgtgtggaggaataagctcattttgactctcttaaaccacaaaaccgaatatctcaacccctaactattaaaaccgatgcaatctaactccctcggtaattttggagggtgatttcactgacgtgatgcctacgtggcaatgttgacccggtcttcgtcctacgtggcgttgacgtgacacatttgtgtcattagaattaaaaaaatatgtgggacctatttgtcattaaaaaaatatgtggaacccacgtgtcattctctctcatcccctttttcctatagatggccaaagggcccgcccggcatggcccggcccaggcacggccgagcacggcccagcagcaatcgggccggcacggcccgataggcacttcgtgccggggcgtgccggcccatgggctgcacctcccgcccaggcacggcccaccagttgtcgggccgtgccgtgccggcccgaaggcatgggtggcccatcgggccttttttaaaataagtctatttttcgtccctcctctttggactatttcatatgtatagctaaaataagtctattttccgtccctcctctttgggctgacatatgtatacctaaaataagtctattttctgtccctcctcttcggctgacatatgtatagataaaaaagtctattttagatccctattctttcgttcatggcatataatatgtctaatttttactt

SEQ ID NO: 8629 - DNA, 58553 bp, Oryza sativa
ccctgcactacatatacgtggtttccaattttcccggatgatgagcccaggcgacaaacctctcgactcgacgacctcgaaggctcgaacgactggacgtcctgcccatcggggagctcccactcaaaccagcacgccatgttcgccaccacgagctccgcgagccgcgtcgcgaacgccatgccggggcaccccctcctgccggcgccgaacggcatgaaccggaagtcgccgccgccgccgtagtactcgacgccggcgttgtccccgccgtcggcgaacctccccggcctgaactcccccgcgtcctcccacgccgcctcgtccctcccgatcgcccacgcgttgatcatcacgcgcgtccccgccgcgacgcggtggccgtggagcaccgtgtcctggatcgcctcgcgcgggatgagcagcggcagcggtgggtggaggcgcatcgcctccttcatcgccgcccggaggagcgtcatcttccccagctgctcgcctgctcctccttgacgatgacgacggcgtcttcgtctccttctcctccgtgtgcagctgctacgacatgtctcacctctgcttgcactttcgccatttctgctgggttcttgatgagctcggccattgttcattctatcgacttgtagactgtgtccgtgcctgccgcgaacatgtcctgcaatgcgacatgaaagaaatcgaaacgaattttagcatgattatttgattggtgataattggagagaacttaccaagatgaggagtcccttgacatcgatcctgtcgagcttgtagccatggtcgtcgccgccgttggccatggagagaaggtcgtccatgaggtcacgggcctcgccgtcgccgtcgtcgtcgtcgtcgtccccgcggctcggctcgtggtcacggagcaccatctcgagaacctcgtcgagcttggccgccgtcctcttcgtcctcgcgtcgagccccgtcgcccagtccacccaccggagccgcgggaacatgtcgctcactgcgatcgtccccagcaggtcggcgagctcccccaccgtctcgcggaccttcgccggctcgacgccgccgagcttcttcccgaacgccgccctcgacacgacggcgtgggtcaggccgacgatgagctcggtcaagttgacgacgcctccgcctccgccgctcgccgcgcggatccggttcacgaacgacgcgacctcctcctcccggagggcgcggaacgagtcgacccgcctcgcgctgaggaggtgcacgacggcgacgcggcggaggcggcgccaccgctcgccgtaggggctgaacgcgacgtcccggcagccgtacagcgtgccccgcgccgtgtgctgctgcggccggccgcagaacacgtggtcctggtgcctgagcacggcctccgccatggacgccgaggagacgacgagcgcgcgcacggagccgagccggagctggaacagcgggccgtgccgccgcgcgagctcgcgcagcgcccggtggtgccgcccgcggccgagctggtggaggttgccgatgaccggcaacgccggcggcgacgtgatcgccgcgccaccacggccaccgtccgcgccgcccgatctcaggtagctcctaaccgcgacgaccaagcacgtcgccaagaagagaaagccgatgagcaggccggagtcgagctgcacggccgccatgaacagagctcacgacacacacggtgtacaatgtgcaagccttcactgatttccttggtcactttagagcaggtacaataacaggctataagccagctgcaaacatattttaagaagataaatgaggagagagaatggcagtgggctacagatttgtagccagctgtagcacagactccaagacacagtgtgtgtatgacagatgggactaggtattaatagtgtaatatgtaactattgtatagatgagctattagattgactatagatgaattggagctagtagctagctggctatactattgaacttgctcttagacatgcaactagcttatgcacgaacctccaaaaatcctatgtggcccaatcaggtgcaataacatggacctcgatgacatcctataggacacgccagcaatcatagcaaacttgcctatgaaatatctgggtctccccctgattacaagccggctgagaaagacatacctccaaccgcttgtctacgcagcctccaaaaaaaagaatagaacgcttcagcaggcttcgcaagcggaccaatagcttctcgacttggacctgcaaggaaatgcgggctggacgacaaacctgattgaccaacttatcggggtttggaacgcactacacatggtagagcacgaggaggacaatataacatgaaagcttactaaccatagtgaatatatgatagtgtcatccaaaacagagtctggaccttcgccaagttggcgaccagaggttggccaaatggttccatctgccccttatgttgtcggacccagaaaacaaccctgcacctcctcgcggaatgaatctagcggcattagcggagcgggcggcgtgcggacgactaaatcctagtcagtggtggcaaactttgacggtgatagatttttttttgactaaatcaccggggggggagagaatccccacctgaatatattgagccaaatgatcttacacagggcaagctttacctacgcaagcgcaggggccctggaggataggagaacagaatacacggagaatacaacgaggagagaacagagaaagaaaacctcctaaaagattataattgatgaacgacacctgcaaaagttatcttgccaaaatacaagaggcacccaataaggcactccgcactttgatgctgttggtcggctagaagatatggaacgaaaggaatcgcataaccttccaacaaaaggagctttcagctacctctcttctagccaagatcaaggaagaggccaaaacttgggccttagcagaaacgaaaaatcttcgtaattagttttcttttagttagctcagaccaaaggtcctaagcttcttttctttcctttcgctttgtaaagctactccttctcaattcaatgaaattggcgctcgtcaattcattaaaaaaaagatatgcactatagaagttaagaagtacgcatcaacgcatgggcacagaaaaaaaattcaggcgggaaatacaaatgcaaatgcaaatcgaggaggcaaatccaacatggcggggagaggcatgatgccacgtaatacaaccatggatcacattaatggcgacgacgacgttggccggtgccaatttttccacaggggatttgctagatttcaggcacgtgccttttccccttccatatgcagcattaggacccgtttagatccctgccaaaatttttcaccctgtcacatcgaatgtttggatacattcggatacattcatgtagtattaaatataaacctaaaaataattaattatataaattgcgtgtaaattacgagacgaatcttttaagccgaattgctccatgatttgacaatatgatgctacagtaaatatttgctaatgacatattaattaggcttaataaattcgtctcgcagtttacagacaaaatctataatttattttgttattagtatgcgtttaatacttcaaatatatctctgtatatcacacgccaaaacttttggacctaaacacggccttagttgctggttggaccatcgggcctgggcttctataaagattgagctaacttttggggcttaatcgtctgatttggcccaacttggatatgggccgtttacaacatttggccccacacggattctcaagtcttacggggacggacacacctcatgcacttcatgccatctcgaccgtccaaaatgcaatcgaacggatgccgattcatctcaccatggacgcggtccagccaagcaatgccagcataaaccgcgtgcacctggtttatgtgctggtgtgtcctcgccgccgccatcgccggtcaactccggttcaaaaaaaaatttagagagaccaaccactcatcgtctctctacttccatccgcttcaaccttcaggtgcgccgcctcgccctcgtcggatccctagtagggaggggaggtctccgtctgccggcgggaggcgcgggcgccgccatgaccgggtgcgtgcgtctgcctgcccccccactccttgattggatcgtgtagcacttgccccgagctgttcccctaggtcatcggagggaatgcgatttgggattgggcgggatgcaaaggaggcgtccttttgggttctagggtttcgcgggattgcgttcccctgttatcctcactgatttgttgttgtttatcatttcggtttggtgaatgcgatttggattggggacagtttgctgtgtgctacagtgaaaacatggagattatcgcaggatcctcagacttctctattgttttttttttggattgatatagatgcattgtcttgtttatgaggcccggtgttcggaccgcgtcatacattcgtggaacagtgtgctcatgccttcggtgtgagacgaaaggttgtgtcttttttttttttttggttctctggcaggcgatgactgaatttcgtcactagcttgtagtgttgtaggcttttgtagcttggtctgtgattgtatagtagaaggatgacgcttctgcattgattttagttcaaaggagatacttttgtttttgccatttcggggggggggggggggggcgtggtgggggtgcagttatgcactacgtatgcattctgttctcttgcaattgattgaagggcacccagttctgctaggtgttgcaccgttttagtttagctgctgcttctttctacagcgtggttgtgctagttatagcggtctccattatatcaatttagtttgaaaaaacactagtggtgttactactcctttgagttaaaatgtgccaactattagtagcttgtatttgggtatacacctctccaagatgaggttgaattcctcatattcatatagtcgtgggtagcaatagataaccttttttctttatatgtggcctgctgataagatcatgtcatgcattgtggaacaatattttgtcgctatctgtttcagatgaaaggcgggatctgttttttagaattttttttttggagggggcaatgattgaatatcgtcactagtttgtagtttatgcttttgcagttaagtttgagattgtctagcagaagtacaacgtttttgcacttcattatagttgaaaggaggcatctccctgttttctgccatttctggtggtatggtacctattttatcaaatctttgttggaaagacattggatatagcctttgggttgaaattttgctaattttactattgttagcttgtctttgggccatcaggtatgcatatacatctctgaaagctagaggttgcccactgccttgtattcctactttagtacccttcacaaaatggtgaaaaaagactattgttcttagtttacgtatcattgtgaccagcatttcaaattgtgtcagaagagcatagttttgaacatatgcctgtcatccataccggagatcaatgtctcttgatttttgtaagctggtgcatgattggtattagtatagatatacagttctgagaaactacattttgttgtagattgaatcgtggtttaggagtacttgtctcctcaggattaattggatcattctttgggatcattttaatgatattagatgtgcctttacctgcatttggtgtgttgctggttaattatgccgatctatatgggagttcctgcagttagtgttcttgaacaaatctgcttcattcatctgtcttaactctataatcaatatttctgcaggacatcctggataattgacagccatagaattgcttcaaaaataaaaaatgcatctggatcggtggatgccagtaagcacaaatgggttagcaacccaactaaggcttgtccaaggtgcaaccacatcattgataacagtgatgtaagagatgtgttcttttatcatgtataagaaccaaatacgcacgtagtatatcatttgtatttcattcctgctttataccattctaaacagattaaacaatcaaataaaactacatgtgaacacctactgagtagtgtcattgttatgcacctttgttttcgtcgagtcgcctatatcaataaatgaatggatttttgctattagcaacttactatttatcactttgacagtgactcttttgtatattattctgaagtcctctgactttctctctaacatcgaagctttgtttgtgtatactttcagatacaccactcagtattaataaataatgtgtgctattgagtgcagtcctctaatgattaatatttcaccacaggttgttcatcaatggcctggtttgccaagaggtgtaaagtttgatccaactgaccaagaattgctttggcatttgcttgcaaagcatggcaaagttggtgcaaaagctcatccgttcattgatgaatttattccaacagtcgaggaagatgatggtatctgctatacccatccacagaaacttccaggtaaccgttagtgaaaggatatatatttttgtttctctcttcgtggggtgagcaagagaagtccaattttattttcatataagagtaaaattcacatttttcagcttgtatcaaatgcttgcctttggtccgttttcttttggtatttattttcttagtcacaccatatgcacaaagtttggcggtagtgcgggtgtggcaataaggctacttattttacttctctttattggcttattaacccttgatttttcactattccactcagcaacactctacaactaagtaattctcattgactggtttgcatttcttaaatggttccgatagagcattcaaattctactttcttttgacataggaatctcagtttctaactggaaaattgttgttttttgtacctctgttgtattgcttgtggtattcttcaactgacttttttttctttttcaggtgtcaagcaagatggaagcgtatcacactttttccatagaacatttaaggcctataatactggaataagaaagcgccggaagataaacactggtgatcttgctgatgtccgctggcacaagactggtaagacaaggccagtagtagttgatggaaaacaccttggttgtaagaaattcatggtgctatatatgagcaccatgaaaggtggtaaacctgaaaagaccaattgggtgatgcatcagtaccacctaggaactggggaagatgaggtagaagggcagtatgttgtctctaaattattgtttcagcaacagtttaaacctggggagaagaacgcacaggacttaacctctgcagatgctttagaatctatagttgctgaagatcttccaaatattcctccacttcccctggaagaacatgtttttaccaaccaagaactagaagttcttgagaaatctgaaactatcactgaccaggtaattgaacatctaagctttctttatttcccttccaccttttccctatgtgcagcacatatttccaggtaattcgacatagcaaagaaaatgtcaatatagtttctttataatgatattaaagggaattggataaatgttgtgccttcttttgctggcaaatgtacagggaaaagagactagcgaaataaacaacgaagataacgctgtagaagatgttgcgcatatggctactgagaaacctgaggatggagataacccctcatcgcaagatccgaaatggtgggaaggtgaatcccagttcctgttagactctcagcaactggcagagaaccttgcgatttgcgatgagttccttcagagtcagagccagacctcatgcggcggtggagatgatgaaaccgataagataaagccccgtcttgctgtttatgcccagttgccagtagaggacttgaagaaggatctggaagaatgccagaggttggacccctcagatggcacaaatcttgagcttgaaaatgcgtctgaatttcgactgagccaaattgtacgtttccattgtctcatgttaaaacgtccagttttctctccatcctttactttgctaaacttgtgcttcacttgcaggagttttcgcaggatagctttacgacggcatgggctggtggcaaggtgatcgattgacatgtctccaaggtgctgtcaacaccattttgtacattgaagaaacaactgaagcctcttccttctgcgagacaacagtaaaatgctgtcgatatatgtggtgaagcaactcttgtctcggacagtaaaaagtcataattttggcccggcggcttgccggggtaggcaaaaggtgagcttatgcgctggcttgcccctgaatcccttgatgcatatggactgtgcaccggtgactattcaatgctaaagatcacatattcctggctgtaaattgtgatggtggatgtctcattttgcttggatactctggaccatccggtggtacaaggggaacttttgcttctggttgaactgattactccaataactttcgtgttaataacttttgccatcatgatagtgcctattatttataaatgtggacacaagtcattttctggagcttgtggtaaagcagggctgagaatctcgtgcaagcttcatcttgtaaattgcagtaatcagcataagattgtgacagataacttccatgtttcagttcctatgcattactactatctaattttcctcgggcaatgagcatgaactatgcatgagactctacagaagatatcggatacgaccatacgaatggactaggatgaggatgctactactggccgccaattttgcttggcattatggtggattactctaatattgttttgtgaaattgtttctactacctccgtttcagattataagactttctagcattacccatatttatatagatgttaatgaatttaggcacacatatatgtctagattcattaacataaatatgaatgtgggcaatgctagaaagtcttgtaatatgaaacggaggaagtatttttttttcattatcaaaattatttcttttaattcatgttacaaatgatagctcctcgaaaatttgaacaccatttttttaaacatgagatagaagctccaccgatcaattaaaagggaaaaaagcttaacaaggtctataaaacaaagctataccgatcctactggtaacaaagttaatggacgcttaaaaaaagtatggacacaataactagaaagaaatttgagaatatacttttccttttaaaaaaatggacatgattgtaggaaaattgagaaaatatacacgtcatgtggcgcaaaactatggagtaacgggaccaaccaacaagttcttgctaatgggaaaaagagagggttgaatgtgggtgctgttcttattttgcccgagggatccgaattagcgccgcccgactgtatttctcctgagttgaaagaaaagataggaaatctctcttttcagagttatcgtcccaataaaaaaaatattcttgtgataggccctgttcccggtaagaaatctaccccgcgcattggctgagcgtcactgggttggtcccacagcccggccacgtgagactgagggcagcaacaagtaccgcgccgtgggtcggtcccatagcaccgggtctacaggccccatcgtttggccaagtatggataatagcactgtaataataatttataagtaataatagcactgtaattaaacttttatatatgtgctcttaacgatttaaataacaatgctgaaaaataaactttaataaaaaaatcaaaatcaacttcaaaattgagttgtaaaattcaaaatttggcagcggctgatattgtatggaggaaacgatgggaatcttaatacactgatgcatattgattttctcagttcatctatctctaccgagtttctaatccctactccctccgtaaaaaaaaagtttggacatagctaactacaagtggttttttatgtgaagagcacatgttatcatgatgcatcataacttcactaccccggactaaacaagattataatatgctgcaatctgcatggtttctgaaactttgaatccattttgaacaaaaaaaaaaggttttgagatgacatgtagacctagtggtgcggagctatatctgatatggaatcgattgggtattacgccgtcccgactgttgctaccttcggtcccgcgttgctgggccacaggactaacccactgccccgcagccgaggcgcagggtggagttggtatcacgctgttgagcaacggtaccaccgtcctcgttgtcggtcctgcagcttcacgccgcgccgattgacccacccatgtcttcgctccgtgggatgtgtatattttctcaattctctacgattatgtatgtataaaagcaaattcttaaaaatgaaatctatatcctcaatatttttttctaataactattacaattggatgggatcaatggcattaatttgatacgtagaacggttacgaatttaataagttattgttttcacaatgactaggcttatgaaatcaaatatagcacaacaacacaggctaaacatctaagcatcaattgcttgttctttccatgattgccgtgacaatatcacaataccttgttctcactaatactctatgtgattttatctctacctgacaaaaccaaataaccaaatttttcaccaacgtcagctgatgcacggtgtaattttggctcagctttgggtcccctagctgttgaccacgactcttacgacaggtaagtgtggtgtgtggataaaggtgggcccaagcccatggcgacgggcccaccacccagcggaggctgagagggacaccgtgggtctcggaaaaaaccgtaacggcgtctctctccgttacaacggagaatccttcgcaaacacggtacgtttttttcgtatccaggtccacctcagcccctatccttttgcaaacaaaaagagaaaaaaaaaggtgacctgattgttttatttgctttgcaccctgtcaatacttctttgttagataaacacccctgggaatatttttcctttggcaaatcttatctgcaaggaattgagtgcaaggaaagccttagaaatgacatagcaactcatgtttttcctatgtgatggattgagtaagtcaataatgtgatattttttattatgtggaaggcgtggccatgcataaataattattcatgtacactgtattcacgagtacatcgctgacactagatacactcaaagaatgtattcacgaattcatacactcaaagaatgggaggctaacaatagatccgtgacatcaataaaattgagggctgctagcccacgggataccgttgcaacggaatatttacgaaatattttaagtgactctcctttttccttccctctgtctacgtgtgctcccctagtacctggtaccttacgtaccggttggtacttgatacctgctatcttaggtaccggttggtacctagtacctggtaccttagataccaactagatatcgaccgatacctgatgcccagtacccaagataccgggtggtacctaggtatcagaccttggtaccaaggtatcaagcctgatacttgtggggtatcagagggtaccgtcaaaaagaggaggagacgtgggggagggagcgccgcaacggcggaggatggcgtcgaggaggcatggcgaggtgagggacgtgtgttcccctagtacctggtaccttagatatcggttggtacctggtacctggtaccgactaggtatcaaccgatacctgatgcctggtacctaaggtactgggtggtacctaggtatcaaaccttggtaccaaggtatcaagcctgatacttgtggggtatcaaagggtactgtcaaaaagaggaggagacgtgggggagggagggccgcaacggcggaggatggcgtcgaggaggcacggcgaggtgaggggtgaggcccaagccagagagcgcgagaagtctcgaggaggagccgaggaggaggttgacggccatacctgttgcaggtcgacgcgggctgtcagcgtccatcccgaaggcgcaaaagcggcaggccgcagcggggacgacagtgacgccgaggccgagggcgaggacgaggggagctcccgcttcttccctccccggggcgatgactccccggcgcacacccgacccgacgagggcggcgagccagagcggcgcagcgaggggaggcgagctcgagggcgaccccgccgagggttggccgaccttgccgacgcagtgccgtcgtcgtcctcctcagccgccggagacgacgacgacgaccccttcctcccggccggcttcgtctccgctcggtcttcttcagagagagagaggggggggggagagggagagggagggctgcagtgctgtgtgatttgggggaggagagtgaggtaggaggagaggattcggatgattttggggagaggagtgaggtaggaggaggggatcccgtctccacgggatgtcgtggtgtaggttttctgataaatttttattgaaagtagcacatgagcaaaagctcgcgagctttaccgagccgagctcgagcttctactgagcttaaccgagcttggctgtgtatagtttatattgcatgctcaccttattgatataataaactaatagataaatatatatattagtatctatttacacaataaattagcatgtgttagcacaatatatttattttagtcattttctactcttttattactgcgattaactagaaaataattatacttatcaagagattatcattaaaatatatattatgctacttatggccgagctcaagctcgaacgagctcgaatcgagcttgcctaaaagctcgaaggtgcaataggctcggcttgagctcggctcgagcttgtgtcgagttcgagcttaggcaaacgagctcgctcgagctcggttcattgacagccctagcggggagttaaactatgtatatttcttgattttttccactacatattcacatgaaataaaatgtagagaagtcaaatctttcttggtcgtggtgaaaaaacttatgtgatgatcaatgcggaatggagggagtaataagtaacatattgaagtcttgaagcctcttttctttttgacggtttgcaaaattgttttttttttatcagaatgatttacgcggtattatgtctcatttggattgcaatcatgcttatagtgtatagtttggaacattttattacccttgactttgcacctatgcatgcatatcctctcaattcctccgaatcttaaaaagatactttattgtttatcattaattttgttgaaataataattccaaatagtaatatatactccctttgatctcgaataattgatacttgcactattcaaatttaaattttatcaatttgtattttcattaataaattacaaatatggacacgactacagggagcgcatgcactcgttagtgctaaccagcgaccatccttttttaccaaaaatagtacagtgtgtatcaactcattacccctcttactaaaagtagtagcacctgccacatgcatcctcatttaaatacttatatgatctaagatccgattactcagttgtgttcgttgcagttaaatttatacaacaagatcttatatgattatattatgatgaaaaaatatttatgtttgtaaaatacttttattatatactaagttacttttatcatatatataaattacttttagatttagatttgattaaattacttcctatacattcataatgctatgaggtggttacttttattattgtttttagtcaattccataatttgtgctgattaatttagtctctagatagagttatgtttttatccttacaacagatttacttctaatgttatgacaaagttactttccttttgtcttaagttacttctattataatatatgtaaattacttttagactttattaaatttacttttatatgtccaagaagtactttagtgaaatctaaaaataatttagatatattataaaagtaatttgtaatttttcatcataatataatcatgtgagatcttattataaagatttaattgcaacaaatacaatggtgtaatcggattgtagatcagataagtaatttgaaagaaaattttataagaagggagaaaaagacatagatgcctaacactacgatgcttctctcaaattctaaactctgatgcttctcgactaaatcggatggccgcgccaggcgtcgctgcgtaagactagatcgagaggcctcacgttatagaatttacgttcaaatatattatattatcagagtatttggtgccataaatataaatttttattcttcataatataggtattattatttataaataattcatgctactttgcactccggtcggatacgccctaactatagataaagccctgatcgatctccatcctgaaacacacgcaaaaccgtattctaattctaattaaacagaaactcaaatcacgaagacaaacaaacataaaaaaccgtttgcattacaacacaacccaaataaccttcctgtcctcctccgatttaggtaggccccaccggacagtgactcgaccttggcggcggcttatatataaaaacacgcaaagttaacacagcgcggccttcttcccggggatcaggacgcaacatattcacaacacgcaaggtctaatccgaaaaaagggaaaaaaaataccctcctcgcacgaaacgaagccaacccccaaactccgccgtcaccggcgaccccctcccctcctccttccgccgccgccgccggcgaggcgtatcccgccggtacatctagagaagaggtggtgggaagggtgggggttggggtgggagcaaacgaggcggcgagacatgaatttcttctcgggggtatgggtgaggacgatgatgaagcggctgtgcaagtcgctgctgaagaagcggctcggggatctgatcctgggggacctcgacctcgaccagttcgacctgcagctcacccgcggcacgctccacctctccgacatcgccctcaacgccgacttcgtcaaccgcaaggtgagcccctctctctctatctcgtgccccgacccgtgtgttcgattaggatgcacccgcccgtcgtgattagtgtgctatttgcccgaggttgaaattctggtggcagagatgggaattgggtgtttggggatgggaattttgtttttttttgtttttgttagaaaaaagaattttcctgtttagttgcttggtggattcaactctgtatgattttgatctcgattggttgctagcatgagagtgtgggcttgaaattttggtctagaattttttgttgcagaggaaataatctgttcgcaggaaaaaaaaggaaggctttttcctttcaatcagtaacctcgggtatgggtacagttcagggttatttgtgttcatttcatggctaaagctcatgatcgcaggtagagtattagggtttaggagaagtggagaaggggttataaagcttatttgcaattcacctttttcagttggagtgttgggactaatccgatacagtgtaatgtttgtaaattatgttgaatgcaaagcttctagaatacaataaagttaacagaaagtatcaaagctggagtaggtgattgttcttttctgctaacctgatttgttgtggtgagtagcatacagtagtcctcttatatgtgcatgaattcaccactaaagacacatctatgttcaacattttgcgatccatgaggatcatggcgctgctggtagcccaatatgatacatttgttcattcacaagtgttgcatacttgaatagaaacttataccgcaaaacttgtgaaacccactagattttgggttttccagttactttattaaaacagttctatttttttccctttccagttgtcaggatctgctatcatgatgaaggaaggatcgataaaatccctgctagttagaattcctctactattaaacatgcgcgactgttgcgagattgtcgtggaggatttggaacttgtgcttgctgcatctgtttctagcgaagatccttctggtgatactgaatgctctgtttctggtagtaatactgacgacacacagaaatcagtccaggccaaaagaaatgaatctgatggcaatcagtgttctacctctgcatctcgagatgtcgacaaaggtgtccagaggatagctaatgctgtcacatgttttcttaccaactttaacatcaagttaaaaaactcttatgttgtatttgatcctcaaaacattttggataacaaggtcccagaatttaatcgatcactggttttccgaatcaaagagaccgaatttggaaccaatctttcaacagatggtataatcaaacttcacaattttgtgacattccatgaggcggtcattgagtttttgaagatggatgatgttgatgcgcatgcacttcttcaggatgatttggatagaggaccagcagacatttcatcaggtcatagcactaccgcggtcttgacaggtcctatcggtggattctcagggaaattgaacttaagcatcccatggaatggcttgaactttaagaaacttgatgcagatatatctcttaattcattagaattgcggttacaactgagcagtatccaatggctcatggatgtgtgggattctctccaaagaagaaatctagtacatgaacagagttatgcccataataccgcagacatatctagatctgccagttcatatgtatcaagctcttcaaaatcaggttcaggttctgtgatagctagcagggaacatttgacagaggacacattttctcaactcaggcaagaaaaaacacaagagccttccctgactatgccatacttgattccggactggattccagtgcttatccatgaggatcacggtgaccctgattcagtttgtgatgaaaggtttgttcctttttgtttttcatcttcctttcttttcatgaaagttcaatgatattcactgcacctttgcaactgccatccttttttacatatagacatttcatcaagagtatacttttgacagaactgttgtcaaataaataatttttgaaatgaaatgcatttgcctcccatttgtatttccatgaataggtttggccagatgtattacacagaacttttctccccatcttcgttatatactatgtactcttgaaggttgaccatggacaaatcctccttttctttccgtgcaaaaaaaagaaaaacatttttgggtgcttgtgcaagctattttcttgctaagttacttgcctttaaatttcttacgggaagcagtttgtttaaaccaaataaagaatatacataactacactactaatatgttgttatcttggacagcatcgaccagttctttgaatgttttgaggaactgatgaactcccagactaatctgggaaacagtggcatatgggattggacatgttcagtgttcaatgcaattacctttgtatccactttagcttctggatcagatcaaattcctaaaggtactatggtttaaacctttcaattttctattggttgtccacattatacacttctcttgcagggatacagaacccttatcatatggatttatttattgttcttattgtgcctgtttaccacatatttttttctcctgacactctttcctgtggagtattcttggacaatgttcttcagcttcaattttcttttactcttgaacatcattcatatcaagcaggatcttttgcactttccatgaaagacaatgtttgactgttagctcctgagtagactgaaaggaaaatgttgtagaccactggttaaaataacagttttgtctggtgtgtagtaataatacattgatccactgaaaacatctcctgttagttggtattacactggtgatactcagggaatagcactgatactcaccaatgaaactgcacggtacaatttaaagttattattgtaccatccctaccttggactagtccaccttatacaaaaccatactgcatgaactgaatacttgaaacatgcagaaaaacgaaaattactgttatctcttgaatgaaggtcaggtaaaaggtacacatgctaggttatgttggcttatgaataatgacagatgttatatgttctaagatacagtaacagtctggtatcaacagatgcaacttacgagtaatgaattctctccattctcttgctattagcaaacctatcaagcatgtccaaatatctgttggatgtatttctggcattgaaccaagtatctgcagtgttttactttttctggctaaattatcagaacatttatatattgcatcactttgttacttatttttccttttcatttcctaacagaaccgccgatagagaaaaccttgcgggcttccattgctgagatatctgttgttcttttgttcagtgatgaaatggatgctggcaattccagtgttcctatcagtcaattcaatgacatgagaaattctgaaatgttttcaagctgcctttcctttgcacattttgagcaatcaatgatatctcctgctcctgctgccagcttgaatatgcatcacgttgaagccaagtgtcagaacattcatctttccctggaggtctggtctgcttccaccaatagcactttttcgtagtttatatctcctaattttatgaagcttgattctaatgttatgttcttgatgtttgcagacatatcctgaaaacctaagtctcaagggatcaattgctgctataaagcttgatgaatactatggcagtaagaacaatgattcagatcatccaaatcttggtgctgctttcttgaacaataatttttgcagagaagttcaagcttctctccctcaatctgtatttgcttatcaagattaccatgaggaaacatcacgccgtcataccaacaattcaaatgacctcactaaggtcgaattgctaaacacgtttggtgagtgcgtattccactatgatgtcagttcctcaggtcaagatggcaacccagtaagctcaacttcactatcagtctgtttggctcctttggtttgctgggtgcactttcacacaatatatatgctactgaattttatcagtaaaatcgagtctgatgttttgcatggggaggataaaattcataggaagaatgacgaaaaaaatgtcaatttgtctatgaagtcaaatgtttctttgggaggaagccaaaaggttcagatagccctgtcgcctgcaagagtcatcttttgctttccttctgaatcatgggatttgagctgcccatccatgctggataagttccttgtcattgaccacacaccatctctgaaatcaggagcagattcatctccacatcaaaatgaaatgcctaatgatgtcaatgcaatcacaccatctactttggtccatttggctacagggaactttgacatctatttggttagaccagttaatgatgaactgaatgctagaacctgttctctgagtaggcaaactttctcttctctgaagattttctctgttaccggatccaattgtcatgaaactggcattacgatgctctggaagaagtatcctttaaaagaccctgagatggtgagcaaaacttggagtttgccaaacctgcatgagcaaaagattgctcagaacaaaaatggtaaatgggttggtgtttcctcttctacaacctcagaagatcttgaggaatcaagttccagtatacgcagggagctcctccggagcacagagtttttgttgcacattaaactttcttgtgtctcagttcatctcagtaagaaggactgtgggatactaaaccatttgctaaaaaacatccttgatggtctttcagatggagcaactggaaattttgaaaatgacagtgacaattgtatgccaatccatgatactgctagccaaacatctgtcatttttgaatgcagcatcttggatatctgcactgaattggatgaaactgttgaagttggtcctttattgcagactgaactagaaggttcctggaactgtctcaaattgtcaatttcaaaattttctctgctatcctcttctaatgttggcggggttaacaatgccaattttctttgggtcaatcatggtgaaggtgagctctggggctctattactggtacggatgactatgaagaaagcaaagatgttcttctagttgtttgcaaggattcggcaagtagacgaggtgatggtgaaggtagcaatatcttgtcttttggaactgcgggctgttctgtgactcatatcatgaacccaaagtttcagaagaattatacttctatcaatgttcgttctgcaacagccgttgcacctggtggccgcatggattggataagcgcgatttgcctattgtttagttcagcttcagatggaactgaacaaccagctaatagtagcacaatgaacgattcccagggtggtgaacctttttcatcactgttctttcttgagctggttgatgttgctgtgagctatgaacctcatttcagaagttctgcactcagcgctgaaactccagactgcaaatacttttcatgccttttagctgcatcattgtttaaacttcacagcaaatctgcatcaaactctacagctactgattttgatatcgagctgcgagatctcggggttctcatttgtggatcctctagttttaaaaatgtcagttgtggctatggtgcagattacctccgtcggatgggctatgctaagattgtgcagaatacattcattgaagctgttctaagaattgatacttccttttggaaactcgaattatcagactcgcaattcgatattggtacttgtcacgatacgacacatggtgttattcaattgtgctcccagcttcagcagctatatgctccagatatgcgggatgctttagatcatctacaatccagatggaatagtgtccaacaggcaaacaagcaaaatatgggcactgatgtgtcagaaaagtcagagagtagcattgataatctgacagattcagaggagtgcaagtcagatggtttgcttgatgatataattgagaatgccttttgcactgaccaggacttcgcaagctactcattgagtggtagcgaaatggatgaagagtttggcctgagtaaggccatcccagaggcaaatgatgcctgtatttcacttgaatcattactagttacccctgaagccagtactagtgatgatctaataattgaatcttattatatgccaccttcgtcatcatcaactctatacaatgaagaccagggcaattgtgctcctagaaccgtagagtgtgacgaaggtgaatggtataataattttcccacaatagatgaaaaccatgttcaaaggaacaaaccacgagaagagcaaatatttcaacaaaaactgaagcctgctattttcatcttgaattctgatgaatcgtgcagtctgaaaggaaaggttcttattcatgatatagatgtcaagtggcggatgtacgagggaaatgactggaaattagctcagaaagatacgattagccggccgtgctcaaatggcagagacaagaggtcttatttagagtttattatgtctgcgctcaatatccagttcaatatgtatccagatggggatatttttgtttctaagctatccatctctgccaaagacatcaatatttgcgaccaaagtacacatgctccatggaaaatggtatgcatttttctgtccaaattatctagaatttactattaccactggactaatggtttctaaatcctctatccattttcgaatcaaaggttcttggttgctacaactcaaaggattacccgagagaatcttgttctagtgcattcatgttagaactggagtctgtaagacctgaaccacaggctcctttggaagattacaggtaaatatggtgtttctttacactgaattaaactatcagaaaacatttgtgattttgcttgtttctgttaatccatagtgaacattgcgtttgcctcatacttaatgggcttgcattgttaaaagaaactacaaggctacctttttgtgccctcgatgtatgaaggcactcattgcccaggtagatgtaggaaaaaacctatgtagtggactaggttccacattacagatcatattgcaggaataatttctagtgtacccagctatttgacttttttttttacctcagcacatggtaatatgcaagatgatgagtctgagctgaacaatagaggcacatttctgaatgtaataattagctcttttatgatgaatttatgtttctggattcgatataaatccagtgtttgtgtactgctgcactttgatcgcaattctgtaccctcaagtccaattcaaggagtaacgtaaaatagcagatagaacatgaaggtcctttattaattagtgttttttatcatgttagtatatgataaaatggtaaatttaaaattataatggtgatacaaatgagatagagcttgttaacgagcttaacgatctagcttgtgagccgagctaagctaggcttttagttctctaaggttaacaaactgagctgagttggctatacaccccacacgtcaacaagtttaacttgagtgcatgtaaaataaagaaacgcatagaagatggcagatccaaataaaaaaaaatcatgcatgcgtggttcttttggcagatattatttcacccttttgccctttagccctttagccgttgctccacacacattttgtgtccatataccatatctgaatgctgaagtataagtgagtttgagtactggtgtcttttttctactctctatttttggtacttattttagactcagtatgatgactgatttccttgcactatcctaaatatttcaggttacatcttgagattttgcctctacagttgcatcttgatcaagggcaacttaacttccttatcagtttcttccagaatgacttgtgcaacaaccctaatttggcttgcgaaaatgagaatattgacgcgcagagtacaatgtatcgaagcgatacaattgctgatgaggcattacttcctttctttcaggtatcttgaagtttttcagtttttatttcctctttttttccccactcatggtacttgagatggacatatggttttaattttttttctcctactttacctgatatattttaacaattgtttttacagcaactattagtttcttttcattttcaaaatttttctactaattagcagcatggatcttctttgtttagtaaacaatattatggtctaatttatttcttttgatgctagaaatttgatgtgaagcctcttgttctgcacattaattatattcctcggcattttgatcctgttgcacttagcaaaggaaattatgcagaacttctcaacatttttccatggaaggtaattcattgttcagaactatacatcatagccagtcgtatctttgtaggcaaccctgatactaaatttgctgtgcagggaattgatttaaagctgaagcaggtttctgccatgggtgtttatggtttcaataatatatgtgaaatagtagctgcagaatggttagaggacatctcaaaaaatcaggtcctaatcttcccacacatatcttacatttatattaaagatgcctgctgttgtgtacaccaataccgattcaggacatgcaatgctataagagagaatttaaaatttgcatgttggcatacactatttcttcacaaaaaaggagaatcttatatcttcctgtcttacagatgattttctattctcatttgtttcaaaaattttctattctcatccaaatcgacaatctgttccttgtttaggtccataaattgttaaaagggcttccacctataaaatcattagttgctgtgagttcaggcactaagaaattggtctctttacccataaagagctataagaaggatcggaagttgctcaagggaatgcaaagaggtaagccacatatagctgcactactatgctgaaatattttgtttgacatttctgttgatgtgttaatatatgatggtattgtgaaattcttgatgtcatgcatccctgattacacttgatggtgattgacaggtgcggttgctttcattagaagtgtttccattgaagctgtggggcttggtgtacatttggcggcaggagctcatgatatgcttctaaagacagaaagtgcccttacagcaattccaccacctttagcctcacgtgaagcaaaaagaaccaaagacaatgtaagagctaaccagcctgaaagtgcgcaagaagggctgaagaaggtattgaattcatccaaattgcacatgaactcatcttttctgagatgaactcatctgttgtctgctaataacatgttgctttaacctaactatttgcaattctatttttgtttgtgatttgcgtttactttctatatcaatatggtaagtactgccagtataagtttcatttgctgtgtaattatcaataattcaatatatgctgaacatttttcaggcatatgaaagcttgaccgatgggtttggaaggactgcctctgctttgattggaaatcctattaaagtttataatcgtggggctggtgccggatcagctttggctactgcaatctgtggagctccaggtgctgcagtggctccattatcagcgtcttttcgtgctgcacattatacacttcttggtataaggaataggtgatttcactcatcctcaaacctcaaatcagcaaacattgtgaagctctacggttattttgaattcttaaatcagtccagaccattcccaactcactgttgactcctcggtctgttctgttatcatttactcgatgcaataggactaagtttttctgatcacatttcacatgtgacatgagaccatcagctagactcaaaacatggcataaaaatttgtattttctaatctaacttgttttctttttttacttgtttatttatgatatatcagcaaagtctccatgcacatgttagataatgctccctttgttttttaacagatgacaccgttgactttggaccatttgtcctattcaaaaaatttatataaatatcatttatcttgttgtgacatgttttatcatgaaagtatgatttatactttagcatatttacactattttttttaataaaacaaatggtcaaacgttattccaaatgtcaaggacgtcatctattaaaaaatggagttattacattttgtaatcatatacttcctccgattcatattataagtcgttttgacttttttttaagtcaaactttttaagtttataaaaaagatagaaatattttcaatccataataaacatattatcaaaatatattaaatgttagttttaatgaaactaattgtgtgttgtagttgttgctaaaattttctataaacttggttaaactttaagaagtttgactaggaaaaaaaatcaaaacgacttataatatgatgaaacggaggtagtatttataaaataaaaataaaaaaataaaatctcctctctcttttttcccccatataatggtgagcaagatctcaaggtctgattgcacaaattctgaatagttttctatttgagattggagggagtaatacaaatagatattaaaaagatttgaaaatagaaatatattgacttgcaatttactgtattagtatatttttgtcttctgttggaactggaagaagttagcaacggaaggtaacaaagttcatggatctggacagcttaggattaatcaataaaacttcgtagctaaataactgtaactgacttgccccaaatgaaaaatgtatatctatgcaaaagaatgagaatatagttgatttatcgtcctaaatattatcagtctgtgcactgataaaactatttgttactctgggtaaaatatgtgtttgagcaaaaacagtttatttacaccgaggacttatgagggtcagaaggtgcttggcattccctacattgacacaagctcacttaactgggagaacttgtaaccaatgatttttaactaggctcttacgaattgcaaaaataataatgtgcatgaattaggctaggcaactgactaggtaactatggaacaatctacagaaaaatctaattgtgatcttggtttgatttataatattagtggaattgagttctcttccgatcagcatcggtgaaaatacatatttgtcctatgcgaatgttacaactcttgagcatacttcatttttggcatgaccacagactgctaatgttggtttgctaatattttcttttcttctacattcacagccttgatcctgaacgcaagaaagaatctatgtacaaataccacgggcctcctcaattgtagacttccattgagaagaggtggtctgttcattcttttgcgagatctcgtatttacctggaagaactggttcaagagcacatgtgtgcaatctcatcaaagggtggtgggcaaacttgtacaggataagtcagatttccacactagcaatccaaccatttgtgaatcagtgccatctccgatgttcttgttggagttcataatccatctcctctgcaggtgtacagtttcagatgccacgtcgaaaaccttcatactgtaaattactagcacacgatcacggttgtaatcacaaacgtggccacccggagcgggtggaagttttgttgactccttgcttaggatttggctagagagagagggtcacagggagcttggctcggtggctcttgtacataaatttggtggtgattactgagtagtgcaaatgtaaatatctctcttgtttctcggttttccatttacgtttttgttggtttgagaaactgctcactgtaactctcactctacaagtgtaaatatcatcaggttttgtgctgctgcaatgagatataagcgcttgtttcgcgtgtgcgtgtctggagatgatcttttgtagtaactgatggaagtccaaattattacgcaacgcttctgctacctgaagtagttattgagggttatgtaatctacagaaaattggagatacgagatatgagaaggggtacagtattgtcattcacattctttcaactgtccacaaaacctctcctctccttcctttatatagccaattcttatacatggtacataaagcctctcctcttctttctttatagccaattcttatacatggtacataaagcctctcctcttttttctttatatagccaattcttatacatgtaaagtagggtgaggcctgattagtgtattgggcgttcattggccaagtttttcaacactctcctgagccgtcaccatgtattgcttatgcctcattaaagctccttaatgagccagtggaaaaaaaatagagaaaaagtacataacatacggtttgtgttgcacgggttgcctcattaaaaaccttgataaagaaatgcgggaaaaattatctaagggaaaaagagtacaacccctccaattattcttattaggtactttgtcattctggactaagtttggcaagtgagtcagtgaaattctcctcctgaattttacatttctctaagtttcaacatcccgatccctcagatgcacctttcaaaaggggatgttggtaatgacttagtgaataaatctacgatattttcacatgacttgtatgcaatactttaatttcgttcgtcttatgcagttcatgagcataaaaaaaacttggggtatatatgcttggtgagattgcttttcacgtaacccatttgtccttgtgcgacacatgctgcattatcttcatagataattataggagtctggatggtgttcaattcacatgattgctaaatgtggtgaatcattcgacgaaaccatgcatattcatgagaggtttcgtatagtgcgatgattttcaagtggttcatcgaagttgctactagattttgctttgacgatttctaggaaatttttgttcctccatataggaaaacataactagtttgcaacttggctgtgtgtgggttcgataggtacttcctccattccaaaataagtgcagccatgagtttccgtgtccaactttggtcatctgtcttatttgaattttttttataattagtatttttatcgttgttagattataaaacatgaatagtactttatacgtgacttatgttttttattttttttcaaaaaaaaatttgaaatcagacggataattaaaattggacattgaaacttatggttgcacttattttgggacggagagagtacccagcatctgcatatcctaccaaggtgaggtcctggttctttctgtagaacaatttcatgtccttactttcttgaagataatggaggatgtccttgatgcccttccaatgcctcttggtgggctctgtgttgtaccttgcatgtaagttgacgacaaatgctatatccggtcttgtgcaatttgcaaggtacatgagcactcctattgcactcaagtacggatattctaatccaaggacttccttcccttcttctcttggtctatacggatcttggtctacttggagtgaccttccgaccataggggttttagaaggatatgtcttttcaaagccaaatcattctaacactttctgtgtgtagattgactgatgcactaagaccccttcgggggtatgctcaagttacaagcttaagcaatacttagttttgcccaagtatttcatttcaaattcagatttcagatatgagcttgcttcttcaatatccttgagtgtcccaatgatgtttagatcatcgacatatacaaatattatgcaaattccatcctaggatctccgtataaagacataagggcaatcttcattgttgttgtagccctttttgcttaagaaatagctaagccgattataccacaatcttcctgactgttttaatatgtatagtgacttcttgagttgcacactatacagattcctgcttgctctgtcttggtttgggacatggaaatctcctaataccttcatgtgaatgtccgtgtccaagttccatagagataggtaattacaacatccataaatttcatttccaaattcaaatttactaccatagagattacgcatctaaaggtaattctgctcatgaccggagaataggtttctttgtaatcaactgttggccgttgggtgaaaccttgagctactagcattgctttatatctcatgccacgccctaaaaatcgcctaaattaataatccatattttaaatcatttttagaaattacttttaaagcctacaagttaaactctaataatctaagaaaaatttcaacataaaattgagctagataaaatttcattaaatactttgcttgtttatctattttctagatttttctgggaattatttgagcaagggaagtatttttaataaatgaaacatcatttcacgaattattttaattggaaaagttttaaaaatcctcctctaagccgttgggccgtatttggcccaacatccctctctcctcgcgcgcgccgagcggcccaagccggcccagccgacccgcttgcccctcctttcccctagccgccgacatgtggggcccacatgtcggggccatcccctacctccagccggctggtcgcccaagccgagcccgagccgccgcctccctctgccaaatccgcctctatcggtcgcccccgagtccgattagttgaggggaaatcatctcctccttatcctcttcctttcccctaaggtttcggagaccaatttcgcccggataaaccaaatcgagttcgttttgagtttatctctccaaactaacccgaagattttccggcttcgattcctctcggttggagtccgatctccctaatctaagcctataaatagcttcccctagtcgtcctcttccgtttgccccaactcccgagctccctcgtcgcttgtagcgccgccgccgctttgctctagccgccgccgtcgccggcgatcctccggtcgtgccgcaccgccgctagcgccgtcgccgccgtcgagtgcgcacggaggagggaaagctcggccgccccttcgccgccgtcgccggacaccgtagcgccgtcgccgtcgctgacccgagccgcgccgccataggacctcgtcgccggccgtcattcatcgtcgtccgtcgcgttttcttgcaccggtgagttcgcgtcgtcgttctctacgtgtagatggccttagatagcccggccgacccctctagcgccggtggtcgtgttgcccgcgccgtggccggcggtgatgacgtcatcatgacgtcataaatccctttttctaggttttctttattagatgcaaatcgattaaacttcggaaattcataactaaatcatcgtaactcggattcgagtggtccaagttgctaaatttttctaaaatcgagatctacatgttaaaaatatccacatgtactgtttatgcttgtttttgtactgttttggttgattttgttcttttgctttagtttccgacgttccggaggagagcgttttcgttgaggaaggttcggaagcatttgcggaagctcaaggcaagtaatatagatcccaaacaaccctttgagcatgttgaacccgtttaaagctaatgttttattttaacttatgcattattttcgaatgtcatcgggtggtgagcctttcccaattaattaatggccaaagatgtctttattttcctatgggtaataaattgattagcttgtaccttatatattggattggttcagttagatgctatatgtataattgcttagccatgcttagaaacattagctcattaatgggatgaatcatactacattattaattatggttatatttaatggtagctcacaatggttaattgtgttatgttaattaattgataactaaaacctgattaaggtgggttgtgagcatatggttttgatggttgtgctcatgacaattaaggaccggttcgcgagctactgttgtgaaacatttaccgtgccaaccacaagccagcatgggcaacggctttatcttttgtatagcatgatttattatggtgtgccagactgtgaagcggcgagaagtctgtgggggtcgctggggagtccattgcctctggttttgagggggagatcatgatccaggaacggtgcactgtgatgagttgtgttgtgcgaggggtattgtcacagttcctttccaaggtaccgtagtggtactgaggcgcatgatgacatgttgtggagttgtgtcttgtgggtacagtggtacacctctgatcagagtaaaactattcgaatagccgtgcccgcggttatgggtgagtttaacaatgtttttcgtgattagccccacactattcattaatgataatattgtgttaattaatttgacttttggtttggaatggtatattcctggtatggaggtttgatttgtacaaccggggttggttgctcagatgaggttgggcctatgcagcacgggtgtgttgtatagtgtttatttaatactgattaattattcaactgttttattattctttaaaatgtttattaaatgctgtttatgcaaatgagctttactatgccatcttttgttatcctgtgcacttgcatatttgctgtgtggcttgttgagtatgtcatatgctcattattgcaatattcattcgtcagaggaggagtacttcaatgaaggtgatgatctggaggattaggctttgttcgggtcgagttgcttgtggagtggagtcgccatagctgttccgttttgtttttatttccgctgcgtataattttattctttgagaggaactatccacctctataatagtttattattttattattgtgcgaatattaattagttgtttgttagcactctattatcaatttgttattgtgtgcctcggttaatttctggacgagggtttaacacacatgtaagcgtttggaattttggatagaaattctggacgtgacatctcactaactcgttattctgattttttctttcgaacaaataaccatttatgcccgtatatgaggagggatacggcttacagggtcaaatacctctcttttgtttagagaaattaactcgattgtgattgctttcttccattcgtcccaatccgaccttttcttgcattctgtgagtgatatgggctcgcagtcgagattcacgacagaggctattttcttagcaaagtagatatctacatttgctgttgctctatcaaatgattctcccgatgtgtttatggccatttcttcatgagctacttcttctgaagcttccacttgcttcctgttgttctctgttacaggggaaagttcctttagtttgctaggttctatgtgtgcacacacattgtcactgacaactctctcggtgggaaggtttaggccccctttgattcaaaggaaattcataggaattttagatgatttctttcctataggaattttttctatacagccctttgaatcaaaggaatggatcttatggaatcctatgaaattcctatggattgcctaatgccatgtaaattttggaggaattctaacatgaggtaaaacctcttggaaactttcctttaagtctttatctctcctctaattcctgcgtttttcctgcggttcaattaaacgactattcctgtgtttttcctgtgttttgcaatcatctattttacacttacattcctatcaaaaacctacgtttttcctattcctatgttttctcattcctgcgattcaaaggggcccttaggtctggtatgcctcttttcataggttccatactagtgccagatctccgctggctcctcttttttctttggatatttttgcaattggctgtaccaagccccctgtcccccttttctctagacgtttcttgatacttgaggatcgagagactggagttcttgtccttttgttctgaggcctccagactggatgagggttaccaatttcctttggtatttcaatctctccggtgcattgcgtgcatgcacatgcgacttggttacgctattcaaattacaaaaatggttaggcagttgattcactaaactttgcaaatcaattatttttagtacctctccatttgcttcattggtgcgtggatcatgcgcatggatccccatgtctggccatgtgatttccaaattttctcatccaagggttgatttcctccccataaaaaggggaaatgatcctcatcgaagatgcagtcagctaaatggactgtatgcgtgtcgcccgtcatgggttccaaatacttagttatatatgcagtctcataaccaacgtatatcccaatctttccgagtggacccattgctgttcgttgaggtggtaggataggtatatagactaggcatccaaatttgaacagatgggacaatttcggtgtgaccccttgcaccagtttcatttttgaatggatgttgtaggccgatgatctgaaattaataagatttaccacgtgtagggctgcatgtccccaacacgtgcttggcaatttacaaccttgcaagagtggcttggtgatgaatttaattcttttaatcaacgcttctgcaagtccattttgcgtatggacgtgacatatcgagtgctctgctttgattcccattgccatgaaatattcatgaaatgcttttgaaataaattcgcagcattgtccatttgaatggactgcacatgatgatcaagaaaattattcttaatttggatgatctgctagatcaattttgcaaagtcatggtttcgttttgatagcaggcacacgtgcgaccattttgaggaagcatcaatgagcaccatgaagtatctaaacggcctttataggtgctgtatagggccacatatgcccactgtattcgtgctaagaatgcagggatttcatccttcattttccatacggatggtcttgtgatcaatttcccggtggcacatgcatgcctcgcaaaatcttctcttttttttttctgaaaggaacatagaaagggaagcccctgttaaaaaaaaatctaaattgataattgaaaaaaaagattacaacaacctaatccagtttaagactacatctttatcaccctcattcaatctaaataacaaaagaaggagatcacccttgagggattgtctccaagaaaccaaggaatgaagaatattctcaaagaaatcaaattaacgtgcaatctccaatattacttgatctgaattgatgggccgcacaggtcctacatttgcacatcgtgctccatgtggctgaccgcagaggatagggtggagtccgccggtgatggatgttgtttgctatttttcttttgccggtgatggatgttgtttgctatttttcttttgcttgtcatctctatgacatgaacgaaaatgttcttacatttttttcgtgcttgctagatgatggatggctgctactgcgcaacgtcgagcccatctctataccacaccgctacacccttccatgattccatcgtcaaactaccgctcgccacccggttaccctctccactacccgtcacaagacacagactagcctctccattagcaaaaccaccaggatcctattttcgtgatggatttttcgctgaatcattttttttcttttgtagtgtgtggttaagcctgtaatttttttattcatatggctattttgtgatacaaattaacaatactgttagtatcagtttttgctcttatactgtgtattgaacacattagtaaacatattactacacgattgctacgagatcatgggctatatcgagaggaatgtggtaattcttttactcgcagaccacgaaattgaaacaatatttacaacactagtaaaaaaaattaatagcgttgtaagccggtagtagttcttttaccaccatctaggaatggtgccatatgatgtgggggcattcatgcaagtaaatttgttacttttgaatggggcattcatgcgagtaaatttgttacttttgaaggagcagatgtgggaggctgggaggagtagatgtgggaggctgggagtaaatggaaaacttcatagagtaaatccgttacttttgaaatgtgaggagatactagaaaaacagaaaactcggtaagaaaaactagatggtaaatattttactaaaacacgaaaacagaaaaactgaagagaaggaaccaaaaacggaaaaatctggatggttaattttttagcgggcgcttcgatcaagcacggataagatgtaaaagagaaaaaagaaacaaaaaaggtgggggtaaaaaaacaaattgaggaaaggtggtggtaaaaaagcggaaaaccgtaaggagggagcattgtgcggcactccaactaatattccgtatgcagcgcgtggattagcgctagggaaaatttcatctataccacaaacttttgagcggtacccaaaaaatagcatagaacttcccaccttcccaacaataccacagtagaacaggagcggaacggggcggcacgggaaatagcgcgatagacaggattacccctcaggcttatccctttcattcatgcactcgtctctccctctccaaaaccctaaacatggcggtagtggtggcggtggcggtaggtatagatgaaattttcccttagcgctactgtatgtaattattatatatttatatatatatattatacctgaattacaatgtagttacaatatagttacagtgagttactactattgtaactaatatgtaactagtactccctccatattttaatgtatgacagcattgactttttatcaacatttaactattcgttttattcaaaagttttttgcaaatataaaattatttatgtaatgcttaaagaatatttgatgataaatcaagtcagaataaaataaataataattacatattttttaataaaacaaatggtcaaacgtttcttaaaaaaatcaacagggccgtacattaaaatacggaggaaatatttaattaatatgtaactggtatgtatctaaacgaaaaccaaatgcgcccaatcggctagctccgttcagtcataaacgagaggttgtaggtttgattctttgctcctgtgcactttgcgccaatttttattatccgatctgcacgaattttgatgtgatctaacagtctacaatttgaaagtttttaagcctaaaaaaccgtaaaaaaaatatgcaagtactccctctgttttataatataagactttatagcattccccacgtagtaaaaccgtaaaaaataagtaagctataaaatgacgctcttatcctttgttcttttcctcaccggcgctcggattagtccgtccgcatccccggcgctatgcagccggccgacgacggcaggcggagggcagatgtggagtagtgcggcggctgcggatggtcgcccacatcctcggaggctacgcagccggccgtcgatggcagtcgcagccacgtgcgcctctccgctgcaactgcacgggccgacggggcatcatcggacatgtctcacctttcctggagcttgattgttggcattcaatttcttcgagactcgtcaatactctgaaattgtgcgagctggcatcagggtgatgtaatgccattaagcgtatgacaccattcatgagctgcgctttgtgtatgccctgacttaatcttgtgttatgcactgcaagaattcacaacttcactttctgtagccagggaacctttaggcttcagcatctgtttacttgatgcacctgctgtttcttaagtctatatgtttcaattatttgtcctcttattgtttgcatattatgggtttgattgtttatcctctgtttatgtttccgcctatatcatttgctaaatacctagtgcaatgtattgggtgcgactgaggagtgaggactagtgttggatggagtattagtttcagactttcagtagatggtcagatctcagatgcaagctaacctgttgagtaggtattgggattggagaatttggtgccaggcaaatcgaattttctggttcgccatttagcatggatcatggcgtcacgagccatatggtgacacatttgctgatttgcatctgaaactttcagttatgtcaatattttcctattcacatgagatcttctgactgcaattccataaatgtaaatattttcctgcaggtgttttcagatggatgggcacttattaacatgcaattccattggaattcattaatttatcattgctgccaatttgcttttcagtcattcaaagaagttcacagccattcatattgtcattaggtacttgcattcatattgttatttaatttctaatggtgagaagaactgaacacaaaaaattgaacagactacacaaaaaattagtgtcattcagtttccacacaagcaactgtcctagttgcttcctgtgacaagaacatgaaacaaactgacaaactggagtacacctaagttatcaggaggacatcaagaacagctttatgcattgagttaaaaattgatattgatattgtaagttggggaatatgttgtgatttagcatagctaataacatctagcaatatgactaaatttttttccattttaacatccagaaaatcaacaacggtagtcatagtacatattatcaaataatttcatgagaaggagcacagctagaactattattcctatgaaccaatttctaatgtcattggtctccttttcctgcttggacaacttcttgagtgaaatttccatgtctaaaaacggtccgccatttccagctctagcttcatactaaagatcatctttagtctcggtttttagtggaaccggaactattgtggatttcggccgacggaccaaagatggtttctccaccagtgtacccagattgacatgttccagcaagtgccaaagctgcttgaatgtcttttgtactcttggatgccagatctactccaatcagagtgtcatcctccttaaaaaaacaggactgttatattgacatgcatgactaaattaaaagaaaatttatttatactgaattaccactaaaaaaatgacatatgcttggaatgaaacttacctatcaacacacttcagcgtacaacttatgtaataccactacgcatcggcaatatccttgatcaccggcatcgcagcaacagcaaacgaaaagtcctagagcttcagaggacaactggagcaccaccactatgccgctgtggccgccgacagctgccaaagtccccaccgccgccaccacatcaccggctccaacgactccatgactaccacgataccgcggccaccaccacctcgctccacgaccacctcgtcactgcagccgccaaagcccccgccgctgccacaacatcgccagctctaacgactccatgaccacctcaacaccgcggccgccaccacctcgctgccacggccgctcacgcaccagccgccgccaacaccacctcaccgccacggccgccaccacctcgccgccacagttgcccatggacaagccaccgctgttaccactcatcggacagaggggattcaagcaccttccacctctctcaacactgccggtaccacctcatgggcaaatatgtatctggaggtaccacaccttgccaatcgtctgatcggatagaacgaagggcagagatttgttaccgggctacctgctgaacagaagaaaatctcttcatagtatcagaagaaagtctgctcatgcacctcggcagatcccgccatggctaaccccagacctgctcccgctttcgcactcgtttctaacatcaaaaaccacatccaccgctcaccctccaactctctacatggtgtgaacttttctttgttcttctcggccatttcaatctcaaggcacacgtcgacggctcacccaaaccagccaacgctcaattatcaacagaaggctctgggtgccgcagcgtgaagaaaaataccccggaagtctttagaaatcagctatgctttatccatataagtgataggtaaattgaagcagttccttcttgtccttattagtcagcaggcactttttaaagggctgctctacttcgtgcagctttgggcagatcgatatgctcacgaactgcatggatgaaagaacgtgtgatcctccaatggatgacagctccgagcaccgctcgagaagcaggcatttgacctaaagatttgtgcccagcggaatggactccatgccatcgcagctagacaaatgcaggatgttgagagaggtgaggctctgtaggcaggccgggaagtcaaccttacggccagacacaatagagagtcgtcggagtgagggtggcaaaaccattccctgcgggcataacaatttgcagtggattttcagatcttgtaggtatttgaatcccacgaaactatcgacaggcattgacagtcctagatcgctggagctgtcgatctctatggacttgatggatggcaagtattccggggacaagcaccgatcaagattctgcaggtcctcacaactgtaaagacctatataggtgagtccactaagacatgttgtgccattgctgctactgctactgctgcttgcatgctgcatcgtttcaccaccagtcgaaccaccaagaattgttactgttttcagccaaatatttcctgatagcattagaagttcgagggaaggaaacgatgggattgacagatttttcaagacgccacaatggaaaagcaccaggctccttaaagtcagcaggctctctagtctaaaccaactaggagaaaagctatcacccccaaaaccttggactgtaaggtgttcaattcttggtggaggatgcaaggcttcgagcactccattctcactactcttcactaaacttgtgactttctttcgccattgtagaactagattctggaggtaccgtttttcaacaaggctagcctcagcggcctcttcctcgttcttaacattacaaatagaactaataagtagagctacactgagctgattcatgcccctcaactcaccaattttccgcccatcccctgtttcaactataaaatattgcaagttccgtagacgagacagatttccaagcctacttatctctgataactttggagagcaacctgttggcaatgctagacgatgcaagttgattagctttatgacatccggactaattgcttttagacttgaaccatttgcatcaacaacctataggctgtaaaggcaccagaatttctccggcaattcttgtacaccgctataagaaatatcaagataacggagactgttcaactcgcctatgctctcaggtagcttgaccaccgtgcaaccctttaggctcaaatataggatgttggagagctgattgaaccaggtaatctcaacattgaaattgattccaaacctaagtgaatgtaatttgttcaaatcctgaatgcctctcattccgctcttcagggattcatcagcgacctcgactgacatatggcgaactgcatatagcattctcctctcattccgagacctcaaatcttgcatcaagaggcattcatccacagaaacggattgcgccatatcatggatcaagtcatgcatgacctatctagttcgattaggatacttggggtcggtttgaaaaagaaacctgctcctcaaatcatccaaatacctaatccccatatcttcaagacgtgtgcttccacttgacacaacaaagccctcggccacccaaatgtcaacgatctcatctcgttcaaagctgtaatcttttggaaacatgcagcaaaatgcaaagcatctcttaagttcttgtgggagatataagtagctcagttggagggccggtaatatctcattctctcgatgtggcagctcccacaattcactgttccgaactgtctcccaatgttgcacggtcagctccatattcaacaaacgtccaatagttttggcagccaaaggagatccacataacctagaggcaatgttgtgaccaatatcttgcaattgaggatatgattctggacgctcttctccaaatgaacacttgctgaagaactcccaaaatatatctctatccaagccttcgagttggataggcttacaattgttggtggcaacacgatcagcaacagttgtaaatcttgtagttactaagatcatactgcctttaggtccgttcttgaatggtgcataaaatgactcccactcgtcaatagcttcttgccaaatgtcatccaacaccaaaaggaactttcgtctccctagctgctccatcatttccacctgaagagcatctaaactgaacagtggcttatactcttccttggtgaaagactcaatgatctcttttgttattcttctcttgtcaaagaggtctgaaacacagacccataccctcctcttgccaaagtgagcttgcacccttggatcattgtagatgaactgagccagggtagacttccccaccccaccaatgctaaaaatcggcaagacagaaacattgccgatgcatttggcctcatcaagtctaggggccctgctgctctctcccttcagtttcttcgttctgcaggatgctgatttcgtgccagtgacagtggctgctgctctcttctctttagcccgtgcagcagcacccctggtgagtggcacacccagtaactcaatcacctgatctcgttgactattacgtccaatcatcgaacgcacacccagcttctcaatcactagatctcgttctttatcacggccaaacacttgagacacatctatgactgaacttgtctccggcatgtgttgaactgcctcgatactaagacccactgaattgatcgctccctctaaatcagccacagccttgtcgagcttctcctgggcctactttatccttgttttgctaccacggatcaaagtttttgcatgatttagagaggaagataagagttgacctgcccagctccggtcagcgtcctccatcttttgccgcagcgcctggtcatcgaactcgcggagaagatcctcggcgtcgtaggtggtgtccttgagctgcgacagaaggatcgccatgtccttgttcttgaacctgccccactcgccgcgattgatgaggaagcgagccttgggcaaggtggcctgcaggcgggacagttcatcgctcagctgggtcgcttcatagatgttgatcccggttgagatgatcgtttccacggcgtccatcacttccgtagtccttgattacttctccggatcttgccctctcgctacttctgatgagaaacaggagcgatcgattaagattacaaggagattatgtggtccaaaagcgaaaaatgtagcagcatatacataagtcaagtttacgagaaacggaatggcaccaaaaccaactcacctgcactcctccagctgttatactccctccgtcccaaaatatgaacatttttgaaatagtgccaagtcaatcatttctaactttgactactaatagcaagaaaataaaaaagatcaatcgtgtaaaattgatcttactagatttataatcaagctatcataatatgtaactctttttatttgatttttttttatttttatagatattgttggtcaaagtagcatctcaaagactgtgttgaagtcctaaaacatttatattttgggacggagggagtatcttatccttggccttaacaagttcatatcttttacggttttggtgaaaaaaactccacctattatatcttatcctctaccttaataggtgcatatctattacggttttgctgaaaaaactccacctgttatatcttatcctcggccttaacaggtgcatatctattacggttttgctaaagaaaaaaataaactctacccgttatatcttatcctcggccttaagatgtgcacgttatctactactaccgttttgctaaaaaaactggcggcagtttttgtggttgaaaactttcgacttttttaaccattcaatgcacttgaagatttgtgctgagctgagaaagaattagctagccgtgtggggaagaggaacccagaacttcccgctcacaccacgcgcatatgccatgcacaaccgagctatcaaagttttctcttggttagagtaagggtaataatacaaccgatttattggctataaggtttttggtaactttctctcagctcatccatataatagttagctctttacaattaatatatgacccacctgtctctttcacagagtttctttgttcttatatccaagccggctataagtttatagctcgcttctcctctctctcctctcttctctcctccacctcagcatttagtcttatagcctactattatacttgctcttacaagcaatgaatatataaattacagttaaagtgtagttatctcatagttgcatgttgttacactatagtaacagtagttatagtataattatattataattgtattataattacatttgaatgttttttcttaaaaaaaaacttacgacggattttgattttcgtagcttttttttttcatccacatcgtcatccgtagtgatatcgtagagctcccacgttaaccgtaggtcttcaagtgatattatgcctttaatcttaattttgtgggctaggattacctcacgtgatatatatatatatatatatatatatatatatatatatatatatatatatatatatgcctttaattttagttcggttttgctaaatttttggtgacacattttctggttgattacagtcgcttgttgagccgttggatcagtcataggattcgtgctagcatacttaattacgcgtaactagttgtgcttcataggttataggtcgctaattagcggtctactggagaattttgctactatttttttcttcactgcatgcactcaatcaagtacgagtatttgtaccgaccagcgaaacacatatgtaattaaagtataaatagtaattagtatatattagtagtatatttagacagtagttacaccctatttacacaccacttacatatgtaattagtatgtaattttgtgacttacatatgtaattttagtacttacatatataattttgggacttacattgtaaataccctaaaattacatatgtaatttattgacttacaatgtaaatacatgccgactaacttttggtgaaaaatatggcgccataaatatagctactcccttttagttttgttgattgggttgtattcaaagcctacgtagctacataagtccatcaactaacaatgctatctatatatatatctattatatactaaatatatactaaaagtacattaaacttcctacaaacactttcaagtcgtcacgtggcgctataataaattaaagaaaatcctataaattctaagaaaaaaagcaaaacatataccccttgattttcacttaaattggtgggtccaatattatattggtgggtccaatattatacatcgttagatgaaatctatctatctattatattattaaaacaaccttaaaagaaggcaccacgttcaccgtagaggctagaaattctcacattaatcgggaaaatatgaattatttacactgttagattgttaggtatgtattttaacgtatgagatttaacataaatctaacatgttaagtaagagatacggagcaccctacatgtgctgaattagaatcaatctataactgggaccaacatgcaaacggactcaaaagagttgtacgatttcctaaactaaccagatttaggacctaaatgaattaggcaagaaataaaaagcagcaagcaacaaagcactgtagatctcaatttttagatgtgttttgttgatctgaagatagacactagaagtgagggacggaaatccgcatcagtgggtcaaccgtgcggctgcacgacgagccggactcggtgatgcacgtcagcaaccagaaggcacgatatatagcatgtgcacgacagcaagctaggtgcactccttaagaaatacaattaaaaagttttttttaaaaaatatagattccaaaataaacataaaaataatatttggaataaaaatataatcccaataataaatatgtaaatcgtctttgctagatattcctttttatctatctatattattaagataacttagaaaaccatcatagtagttgaaatctttattattaagacaacggcttagtcgtcctatattttttctactataagttatcatgttaatcgaagaaaaaaaatctaagccattagattgtggtagaaccaaattataacggtgaagattgataacataaatattaatatatgtaatacaattgaattttttgaactaaacaaagttatataaaatacaataacatgcaagccactgggccaccgtcagcaccatgcaccttatgaccagaccaaattaagcacatagtagtagcatatattgagaacctagaaaaaatgaaataagagttcaattaggaatacaatttaaaaataaccaaatttcgaaataaaacataaatactattgaaagaaaagatcatctaaaacccatcacgagataaattgaaattcaaaataaaaataaaataaattcgtaaaatataaaataattataagagttaaagtaaggatacaatttataaataacaaaacatcggaatgaaaaatattgaattttcaaaaataaatccatctagaatacaacaatgataaatgataataaaaaggggaaaacaacatgtccgtaaaaaagtagagcggtgacggttgatgggtcatctataaactataaacaaaatctcaaatagaatccaacgacgattaagatgagggacgggcgggccgttaaatagcactattacagcagttggcgagacttctaaaaagtaaaaaaaaataaaatccaatgagacaataaattttaaaaactacaaggtattacatttgttttttaaaatcccaatgacaatgaagagggcagacagcgggcaggtcatagagaagtatggggcaaagccaaatgaaccccaatcataattacatttgatttttaaaatcccaatgacaatgaagaggggaggcaatgggcaggtcatagagaaggacggggcaaagccactggctgtttggcgggacttctagaaagtaaaaatatgaacacaaacgataattttgttcgattttgaaaatcccaatgacaataaaaagagaggaggcagtggacgagacttctaaaaattataaaaacgaaatccgatgagacaataaattttaaaactataaggtattgcatttgatttttaaaatcccaatgacaatgaagaggggaggcaacgggcaggtcatagagaagtatggggcaaagccgctggctgtttggcggaacttctagaaagtaaaaaaaatgaacccgaacaataattttgttcgattttgaaaattccaatgataataaaaagaggaggtagtggacgagacttctaaaaattataaaaacgaaatccgatgagacaataaattttaaaaactacaaggtacatcgaggaagtggtacatcgaagggtgcctaagaaataaggggtagcaactagcgtgacttttaaaaactataaaattagaaacacgtagatgataaggtttgacctttcaaagtcttgatacaacaaaatagctatttaacaattttttagtaaattcatattaaataatagataattttgtataagtgctagccgcgtaattgcgcgggccacctagctagttgatcttaaaacaaaccaaatgctatgaggtcccacttctcctccttctccctaggtatatatacgtaagtacatcttctttccttttttctttttctttttttcttcattttgccatttatataatggatatatttttttaaataatcataattttacaaacaaagaaactaccatcatacaactcacaggtaactaaattagctctataatttttaacataaaatttacaccattatatgttactcataaaattaataatgtaagataatttccaattaaaccggtgtactcattactttttactattattttcaaataatgcactattttaaaataaagtttacaccattatattgtgtacctatcaaataaacaatttaagatctatattaactaatttatacatgcacttaaaccaatggacccattatttaaatcatcgtatttattttttattatattggactattattctcaaataatgcactgtttcaaaataaagtctacaccattatattgtgtacccattgaattaacaatttaaaacctatattaactaatttacacttacactagaaccgatggacccattacttaaattatcggatctattgtttgctaataaataaagcgttcaaagttctctttcttggcccgctacacaatgcacgtctgtacctttgccttttgcacgcgtgacaaagcgtcgtgtctgaggcatctaaggtgatcacgaccaccgcagcgctaccgctttgccacatatcaagtcatatatggagatgattaattttgttaatatcatgaaaggaaaattaaaggtgtgatgccgtgagagaagaattaagcaccgtgggttgtattttttcacacttagctctgtctaagctgaaaccgagagttgattacagaataattataatgtactgtgtcatttcatatttggattttatactatttattcgtacaggtgaaagaaatcattatgttataaatgtgagcacaatattaacgaatatagaacttttactaagacaagggtgttataagggagtttaaccctcttttttccccgattccgtagtttgggtttttgtttgcatgctttccatgtttctaaatggtgtcttttttaaacaacattttaactttttagaaatcaattcattcgtttataccctcaaatagctatcatataaatcagataattcataagtatattttttttcatgcgagtccagtgtgcaggtggcattcgatggctttcgttgcagacgctatgtttggatgggactccgaggtgaaagccttgctcggcttgccaatcctagcagcatgatgcccttggcgccgttcaccttctcgagggcattgctattggagcccttgttcaactccatatcaagggatttctctgggtgaaaaccatagattcgttaggatcgggtgatgtcgccgttctgtcgacgtgttcttctcgaagtcttcgttttaggtgcttttcccttgctggacggttgtacttaaattttaggttcactccgtcaatgccggggttttcgccggtttttcataaattaaccgggccgtagtaaggattttgggtccagttttctttataagttggataactctcttcttcttcttctattgtgaaattgcaggagctccctacccgttcccgcgaaaaaaataatgtaattatttttggagttatttttcccttactgtatagttctaatcgtcaaggtttccttctattctctacttcctatacgatgaaaataactatttttttaaaaaaataatatagtgattacctcaaaaatatagaaaataattttatttactcgtgaatattctacacttttctttactgtcttctatacattttacttcacacagtttcttatttcaacatcatcaactatgtttactttcgttgcatagaaaagttacttctattgtaaacttaggtggtgtttgaatgtgctgaagatgaagatgaaggccctgtttgggagagcttgtcccagctacaagttttcccaaaagctgcttctgctagaagctgccccaaacaatacacagcttctgagaatctgtatagatacagcttctgaaaaatgaactaagaagaagctgtgttttagagcttttccagattcttagaagttggctaccaaacagctgcttcttagaatctaaagctcctccaaacaggcctgaagattaagtgtttcacgcaaaacaaggttgtaataacatgtgattaattgatttttaattattccaaacttaaaaaatagattaatatgatattttagaacaactttcatatagaaagtttttgcacgaaacgcaccgtttagcagtttgaaaagcgtaccatgagtatctaaaatttaatccaacttttatggggtttaagtaaattacttttggatgtttaaacatattcaatattagactcattttgtcatatatattttgagtgaagtgtgatggttcaagcggatttaaaaataataatatatggtttaaaatatgtaagtcgccaaaagttttgttaaaaaaaaaagcactaatgcagaggaagggctagtggattggttggtgttggccccaacacatgaatagacatctttttttccaaagcttcttgtgctggtcggaggaggaggcctcgccgccgcccgccggtggcgccagcacagcacacatttgcgccggtaggaatccctctcaccggtccggatctagcgtcgctctgccacgagcttctctgcatcgtttccgtctccgacctccgccggtgactgccggagcagtcggagcccggagaccgctgcactgcttcatcatcgagcacctcgtctttgccgctgatccagggcatctcccacatcctgcacctgctccacacgcatacaagatggtgactatggcgagcggtggaggaggacatcatattcgcctgaggagatggagatggtgaagcatagggcgtgttgtccctttttttttcacggagcttcttctccgacgctcgtctggcacctgtgtgtcgtgaccctgaacgccggcgaacttgtcaccggagttgaggaccgcctacgtatgcagcatgaaaaaagtatcagtcagtcaaatatttcagttaactaataagtgaaacataaagttaagttatatgtagggtgaaacaaaaaaaatcagcaactgaaatattttaaaaagtttatgaaacatgataaaaatacaagttgaaacatatcgctatcacatatgaaacaaccaatgttaatggattgaaacatatgtttttctttcatcaaaatataatcatgtgatatcttgttgtaaagatttaattacaaagaatacaacggtgtgatcggatcgtagattagataattagtttaagagaaaaatcgttttgaaactagctaaaatgcatgcatgcatacatgaggtggagagagagagagaggagaaatagtagtaacagttagttttgtgaattttgtgaaacacgctaaagacacatattgaaacatgtccctatcatgtatgaaacaaaaagtgttaacgtattgaaacatatgattattttttatcaaaatataatcatgcgacatcttgttgtaaagatttaattacaacgaatacaacggtgtgatcggattatagattaaataagtaatttaagagaaaattcattttaaatatcgttaaaggtgcatgttatatggttagagatagagatataggcttggatatgtgtatgtgtgtcagaggatgctgtccgatttttctccttgcttcggacgttcgaggagaagaattatccacaactagtaatatacctgtgctaacgctacggagccattatatttttgaaaaagaaaatactatgaaaatttgtcatgttagtgaataatgttcatataatctgtccaattgagctttaatttgattcaagtcatatatcatatataaatatatttagacaaagaacaacaatatcatattgcgtgaaaataataattcataaccatcaaaaattatatattatcatttcaatatacaatatctcaacgtaaagatatgagggcaatataagtctacccaaaaaggaataatcgagagttattccattaccttgttgcgggcataaacaagtacaaaaataaaacatttgatacaatatagaatatactatgcaactaatcaactaatcctaactttgaatatttgcgatatacttaagaaagtcttatgcgccacattctatttgtacgtcaatggatacagcaaattttgttgtcttagctagtcaccttcctgcacatgcatttattttactaaaaaaatcatgatgtagcacaaggtagtatgtcagttccaatcacgcaatatcccacccaaatggttgcggcatgctgtaaaaaccaaaggacaacggtaagtaacattctgattagcattttattatcctctatatcacaaatattgaaatgcaccttttttacatgccatacatattagcctaggtacctagcgttgttaaccagtccaagacatctttatacacaatattcctagtgcttttccctataggtctacctctttctttggtcaaaggtacacatcttccatgccacagtttctaccttcggggggtaggaatgaaatgaaaaattcaactccgcttagctcctagtgcaaatcagttgtgagatagtccaaatttagacaccagaagctacctgttacaaaatcacgtgaacatcagacttaggccctgtttgtttcagcttatgattattataatctaaattattaaaccagattgctataagctagattataataagctgatataaaataagctgtgagttgtttgtttgtctggattattggaggcatggattattgggtttgaaaggctaaagtctataatgccctcagctatctattcggttgatggcatagatgggtaatttttctcaaatatgtaagggtagtgggtctttagccactcaataatctaaaaaaagctcctttaaagcagcttattagattataataatctggcttatagattataataatctgctataataatctatttgtttgtttcagtttactcctataagctagattataataatcctaagctgaatcaaacagggccttacagccataggcccccctgattccacaacaacccataggaggataggagaaaacacagaagaaaacaaaaagaaagaggaaatcctaaggagattggaggagcttgggtgtgaggaaggcaaaccgcatgctgtgtcagtgaccgatgcagcaggccagactccctgttgaatggaatcaggaactaaccatcaggttctccagcttgatgggtcaaaaaaaaacaagatttattaaccatcacaaagttttaaaataaaatccaaaaaagcggtctgtttgacaaaagaaaacaagtagacatgtttatgacacttccattttctagtaatcttgttctccaagaacattttctgataatctcgaaaaaaatctaaggcttgatgacatactgtatatgcacggatagtttaacctgccatatttcattatttgtattccacaaatttctaaagcagaagaagcatatctgcatatctcacctcatatatatttctgaatacacataggtaaaagagaaatgcattcttcagtctaggtgagaaaaaatgaatagttaggaagattagattcatttactatggacttaaccaaaaaaaatagtttattactacacagctttagtaccgctgataccatcgatccattttgtccattctcttcgctgttacagtattgctgcaaattactgaacagttgtgacaagaaaagttgtattttctcttagggatggcagttgaaaattataggaacatgagcatgccattctcaagtagtctatatgtactgatgtttggtcaaatttgttcaatctgaaaacatacatgtaactgaatatggcctaggattttgaaggtaacatgaataaaatagacaccatgccttttggcttggttacaacaaatagcactaaagataagaatacacactacagatggttgacatctagaaatgtagatggctgttgtagaattagcttattaatatatgcgatcaatggaggaacaatattgagagcaacttaccttgcctgtgggcaggattgatggactacgggggccgggtgaggcatcccgctgatcttgatcaatcaattgtgaagctggtgagcagacaaaagatcagtctgcaaatataaattaatatatcaatgatccaatttgtagtaatctgttgcaagcatacaaaaggtagaattttgctatggaataaatttagcacagtatccacctaaatgaaaaccaattcagcgagagcaaaaaaaaaaataccgctgacctcctaaatcagcatgaacacttatagcaaaacaaacttcattcagtttggatattttcacttgtaatttcacgagtctggacactaccataatgatctcatctacaatgtagagaagacatggtcagcacatcggtagtacctttctcccaaaattcaaggcagaaccagaattggacaacgataattaaaattttataccttacttggattgactcgtagcacatataaatagaaaggttaggccatgcaatttaggctactgttgattctataaagcaatgggggaaaatagttgataagggtcagggttgccatggaggtgatgccatggtgagacagcagttaaagtaatcagtaaagcatttttattgtatcgacggctgacatttaagatgcacaacaatccaacggctgctatatttctgatgatgtggcttcacatgatcccagctaatggtgattccgatagtagatggatataattgaatcacactcagtttcagcaaatacattatacacaaaatggcatgtatttccaaggttggccacagtaatcagaggaactttggattcgcaggcagtatagctgtatttgaaggtaagagtacagggtaaaaccaagcatcatgctatcagggttaactgcagctgttgtgccctctctagaacaaataaaacttacatatatcaaaaaatagattgactgtggcagagaacgagagcaagaactccttaccagccagggtcagctgcatgccgccatgcccgcatctgcacacccgtatggtattttgcctccatgccatcgcaatcgcagccacggcagcggaatccgccggtgcgaccacagttgacggggaacactgtcacgatcctaacttcttcccgaggaattgctagctaatcggaatcggagatagatttgaggagagaattggattcgagagagaagagcaaaagggaaagaacgaacagaggaggaagacgatagaagcagcagagagatttgaattgatttctgtttgtgtattacaaaagtacgtaatctctctctctctcgctgccggctttatagcaatgtgccaaaaagcctctctctctatctgtggacccagccaatctctactgagtccactcactcacagggaaacgcttgctgggctgacggagtcaaacgggccgctccttggtgcagcccaagttctcctggtctgaacctcttgcttaggggtggacaggaagctcgtggctcgttagctcgctcggctcgtgacaggctcggctcggctcggctcggctcgtttgagataacgagccagctcgagctggctcgcgagccgctcgcgagccttaacgagccagagcagatgaggcccaggcgcctagcccagcccaacagcccatcacctagcccatcaccttgtgaaaaccctagagtcaatccccttctggcttgtccccatcctcaatccccacccaagccaccgccggcctcatggctgccgctcgcccgtgcctatcctccccggcgccgacgccgccgcccccgcctctcctccccggcgccgacgccgccggccatggacgccgccgcccgcgccgctccttcccgccgccgccgccaccgcccgcgcctctcctccccggcgccgacgcggccggccgtggacgccgccgctcgcgccgctcctccccggcgccgacgccgccgcccccgcctctcctccccggcgctgacgccgccggccatggacgccgccgcccgcgccgctccttcccgccgccgccgccaccgcccgcgcctctcctccccggcgccgacgcggctggccgtggacgccgccgctcgcgcctctcctccccggcgctgacgcaaccaaccgtggacgccgccgcccgcgccggtcctccccggcgccgacaccgtcgtggatgccgctggccgcgccgctcctccccggcgcccctcctcggctcctccccttgttcgctttctctcttgtccccaaagctcacgagcctaacgagctggctcgagctttcaaacgagccgagccgagctgggtttctagctcgttaggataacgagccgagccgagctagctcgttatcctaacgagccagaccgagccgagccagctcgacatccacccctactcttgctatccgaggtgttgccgccgccgtgacaaacacgcgggtgacccgacggctgacaggatgggggtgcggcgaggtcggcggatcccgtcgattcggcggcggcgcaggtgggcgcggcgctgtgcggcgaggtcggcggctcccgtcgacttggcggcggcgcaggtggagatgctgccgtcggcgggtgagcagggtagggggaagccggaggaatggatgcgggatggaagggccgcgatgggtggggatgctggcggagggagcggtcggcgatagagggatctgcggggcggaggatgctagggtttggagtcggcgcgacgcggggagagggaggggcagaatgcggaggtggacgacggtggactcgatatcatgaaaggacggcgatgatggcggatgcggtttctgtgggatggggaatacggtgattccgcaagaggtgtgagtggtgcgcggtgggaggtgggagagctctggttcgtttgatctgacgcgttggatgatctggaccgttggatttgatgaatgagtaatgtaggtgtaagagtgagttgatgaattatagggtagataggtgtaagagtgagttgatgaattatagggtagatacggctgtccatgcgaagaaggatcatcctgttagccgtccagcagcggtgtttcaattaatgccaatcaaagaaagagcttgcatttgattggcccaccgagttggttcgtgcaaaggaaggacggctgcccgacaaagaaggcatgaaacgccgtcgccaacaatgaccatagttgatgcacggaacatggaagtaattccttcgtttctcttcaatccttttttctatatatagaaagtaaccaaacaaagccgtaagataagagtagaacgagtgctccctgcacctgagccggactcctctggcggtcactgcactctatctggcacgtcgctgtaatctatcaggcactagtttagctctagttgttactagttctgttgtaacaactcctagcttctaccattgacaaacaacctgtaagtacaacactaatgccaatattgaccgatactagcttatgtgggtgctacctttttcactagaaagaaaaatttcaaaaatcacataaatatgagttttggacatattgaagtgggttgggtgtgttcgttttgaaaaatctctttgtgactcgtgcggctaacttttgtcatttaatgtcaatattgaccgatattagcacacacatgggtgcgatgtttttcaccggaacgaaaaagttcaaaaaccaccaaaacatgaattatcattgttgctttcactctttcatggtagagcggtgcttccgtccagcacgtaataccgacgggtgttgaatcaaatccatccgtccatcgtgagggggtaggatcgggaaacgtcacgagcccatcgcgcagggcccaatctccttggcgctttttttctccctcacccaacaatccccatccctcagcgcaggatcaatgatgccatcagcacggcagtccgagtcccttatcccccctcgatggctccagcaagtacctgccctgctgctctccctcccttggtgcatgagcaatggagctgccgtcggcactgcctaggcccctaaccagtttagggtttcctcccaagtggtgctcaagatgtatgtgattttctagcacacaaaatactcagaaatcataccaaatctcatagtagtttgtttgattttagatgatttatgagtattttgtgtgtctttattttgatagatttggtatgggtgatgaaatgtgagacaacttagaagaacaagaggagtacaaaacgatgatttctatcagatgtatgagacttatgaagtgaatttaatttattttcagcaaagtagaagacgatgtatgagacctaagaagtgtttctttgcaccggtggaagttgaatcaggagttctttgcacttgtggaagtagaattttaatgtttgatttccatgtgtgggaagttgtgttgttggacagtcaattatatattgtttgcctctatcagactatgagacttatgagcgtgtgtcctgtagacacttatgctggtgcagtgcttttgtatggtctagttattttggaatgaactactcaatcaaccatgcttcttgtattgaatctgtgaaaagagcacaagcttatgatggacacattttgttgttgaatgggaaaatttgagcttattttggacagagcatgatcttctgtcatctttatgtctgtttgtgtgtttgttctggaaaatttggatatgtgcacctgaacttgtttgaaggttaacaaatttgttttctagcgaacctagaacctatcttgcaaggcttatggtaccacatagtacaatcaggcttggccctgaggagcatgagatgagcagccagcagccgaaatcaacaaacttgtctcctgttgcgatggcaactttatgcatcgagttaaaaatggatattgatattgtaagttggggaatatattgtgagttagcatggctaaatgatatctagaaataagattccaatatgattcaaataatttcatgagaaggagcacaactagaactattgttccaatgacccaattaattctaaaccaatttctaatatcatcagtctcctttttctgcttggacaacttcttctaaaagacggtcgtctttcagccatttcctgctttagcttcgtcctctcttgttccgcctttgttttttcaacataacaggtccactcaatacgtagcctacccaattggcacgttccagcaagtg

SEQ ID NO: 8630 - DNA, 6651 bp, Oryza sativa
gcgtccgcgcgttcgcggcgtacaaggacgcgaaggtgatcgcggcgccggagtcgtggctggacctccgcatcaagggctcccagctcagccagtacttccgccgcaagtgcaagcacgcgcccaaggggctcttcgcctaccccgtcgtcgtctccggccccggcgacggctcggcggcggcggcggcggcgaggtactcgctgcactgggtgtcggaggcgcaccggaacgggtggcacgtgctgctggacgccacggggctcgccgccggggaccggctgccgctgtcgctgcaccggccggacttcgtgacgtgcgcgctggacgacgcgcgcgcgcagccgccgtcggcggcgacggcgacggttacgtgcctgctcgtcaggaggaggtcgttcgacgtcacctccttaaagggagataattgaaacgatatgcagagctaaattactttgtccgtttcaaattataaaaacattttaggttttgtttcatgtatgtgcttcatttatactatgtgtaaataatttaaacgagggataaagaagccgaaacttatctctatctctatctttactattataaaattaaagatgtttttgccatgcgctttggtacgtcgtgaatccgtagcttagtttctgcattttccgattatgtatatctttctttcgtgtttcttattctattttcttctaccgagcgcaacgcagatgatcgatgcaaccctggggttgttctaccacacagctgacctctgggccgagcgtcgcggccaccacgggcggaaaaagtacaccgaaggtccctcaacttgtcatcgggataaaaaatatcctcgaaccgcaaaaccagatatacgagatctcttaactatacaaaaccggtcacaataggtccctcgacggttttgatcccggttttgtcctacatggctgctgagtcagcgtgggacccacatgtcagcctcctctttctttcccctctctcctatcccttcctcttctctctctcactcttctctagctctgggtaggctggcgccgctggccgacgggtggggaggagattgacagggcgaggcgggagaggaggtccggcggccggcgacgtggtagcggagacgacgtgggatcaggggagcaaggtggcggcggcggcgatgacgcgggagcaggggaggggcgtcggcgacggcgaggggagcaaggcagtggctgcggcagcctccattgcgcaggcgcagaggagggcattggcgaccgacgaagggaagacggtctttcttttcagcacgtcgccccaaacctttctccgcgaccaacgattggtgacgcggcggcggtggcggcgacgcaggagaaggagaggtggcgactgccgccatgacctcgccctcctcgacaagttccccttcaatgttgacttcactagcggcagtgactttcgttggtggcggcggccgacgagcggagagaggagtggcggccgaagcaagaaggacattgccaggctcgctgcatccatgcgcagggtggggagaggagcagaggtggagatggacgcgacggcggtgctcaatcgaccaatcaaccaagctgccgccgacgccgactgccagcttcgcgtcaactccttcctgcgtccaccaccggccccgaggcgacgcccttccttgcaggccgccgctactcccccgctctccgccgctggcgcgccagggcaagcgccgccgccaggatgctgaccccagctgcggcctcctcaccctcatcgccttgctcccctcgctgccgccgatgcccctcccctgctcctgcgtcgccgccgccgccttgctcccctgatctcgcgtcgtctccgccaccgccgccacgtcgccagccgccggacctcctctcccgcgtcgccccgctggacctccctcgtctcgccctagcgtcggcctgcccagagctagagaagagtgagagagagaagaggaagggagagaagagggaaaagaaagagcaggctgatatgtgggtcccacgctgactcagcagccacgtaggataaaatcgggttcaaaactgccgagggacctattgtgaccggttttatatagttgagggacctcgtatatctggttttgcggttcgaggacgttttttatctcgatgacaagttgagggaccttgagtgtactttttcccaccacgggctgagtgtccctctttttaactgatgggcctcatctgtcttgggtcacataattcttagtaaattatttcttggtttttctttttctattggctcagttcggggtcctcccctaatttttctttattgcttcaccccgtttcttccgaatgcatgtacactttttaaaaaaaatcaaaagatattataaaaattgaaaatgtttcagctgatacattggtacgttgtttgtagttgagtcggttttcaagtttatattgacttttagaaatacataagaaatcttttaaaaaaatacatgctaacttgggacgagattcggataactaattgtttcataattcttgccagaccattagaaagcaacatacaggatatggcaagcgtcctaataagaattccaaattagatataaatactatcaaaataaaaaaccccatagactttttaaatagaaaaaaaatcctaataatagtacgattaaaatagttttgacccgttgcaacgcacggatatttttttctagtaatatgaaatattgaaacggacggagtaagcactgattgccaagggacataagtgatcactagaatttgtgtgtatttatagatgatttatggagagaactgcagtgatgttttagactattcccaactcaatgactaggatggtgtatacaatattaaataagctgccacttaggataaaaaataatgtgacaaatgaataaatgaaaaaagagaagaaaaccctgtcttgcatgagacatggtttctacacaacatccaagacatcatgtgagataagtagcattaaatttaagtatagaatagtggtgtttgcattggaaaagtagtgtctagtactagtttcttgatgatgtggagtttatgaaactacgtctagtgtcttgggttgagactggcgttagagttcaattgcgagtctgtgagtggcaaaagagaaaatttatttgctttgatatctactctcttcatccataaaagcaaccatggctatctatctggatatgtaactcatgtccatatacatacccattgttgttttttttttctttttttttacgggtggaaaatgcaattaatttgggtgaattagtaagcttggagctttgctagtacatcacagatggttatgttggacgtcacatgtatacacggatgccggtgtaattagttaagatagttaaacatgatagcttacttgccatgttaagatcatagtactaataattaaaacttgtgttttgagtttaattcggtttgatatatagatcctggcaatggcattgaacgaagttggcgaccgaactggctcttgaaaagctgtctgatttcggcgacatacgacggaagaaacacaggccacatacattgcagggctgattttaggcgaggaaattaagttggaataagtccacattacgtccctcaccttcccatcgagttcaaatcacattcacctccaacttacaaaggccttgtttagttccaaattttttcttcaaactttcaacttttctattacatcaaaacttttctacacacatgaacttccaattttttcgtcacattgtttcaatttcaaccaaacttttaattttgacgtgaactaaacacaccctaaaccggtttaaatcagtagtatgcatggccagtttcgctgacgttacaagtttaccgagtctacctgtacgtgctgaataggtatttacgtgacaaataaaactaaaactgggacccacatcaatcggccggcttcggcgccgtgcactttgagaatgagcgcgcgctgccgcgccggaccacctcagctcgtcggcgacgagcggaggatcttccatgtcctgctgcacatggtcggcgaccctgattggccagaggtgggatcggattcatggcgtcctactcctccccagttggcaaatcctcagtggagtttgccattggtgtcagtctagcggcagcagaacggcgacaccgctctcgccgagaccaagtggaaaagggccattgattgatctcagacttagcttcagcatgtgcagagagtgttaaaagaaatttggtcataattcggcatatttaaatctaaaatattaagacaattaacatgacatttgtaatttgagtagatctagtgacagtgctagatgtgtacaacataagcatgcttaatatagaataagcatcaacatagacaagagaacgcaataatattgcgacagacagttgtagaaaacgaagaataaacggtaatagtaaaacgttataccccgagaatggccctccgctagagtttgaggcagtattgcctccgttggtgttgacgagaggctccttctccttgtttccagtgttgttgttgtcaccggttgtcgacatgttggtgaagatgatgcagagcagtcgcgcttgaagcgctatctaaaacttgatcgctcgcctacccgtgcatgttctcaagcggacggagtttcggaggcacttgctcgttccgatcacccgtgcgcgcgggatgaacagaaccggggaaacagagagacagcgcaggaacagaaggagagtatcgccaaggaacaatagtaggaggaagatacacactttgagagcctctgccttgcgttatatgtagagagagagatctccattaccacacaaataaatatcatctgttgtgatggttaccacaaaataaatctcatttgttgtgaaggttaccacataatgaatctttcatttgttgtgaaggttacaacaaataaatctctcatttgttgtggatgttacaatataatgaatctctcatttgttgtggaggttacaacacaatgaatttcatttgttaatggtgactttattctcatctgtttcaaaacggaagagcagcaggcaggctcggctcggtcggccgccttgcctcgctacgcccacggccgaggccgactcggcatgcgcgcatgcgtgtggcagtccaaccatcacctcaactggtcaacagggaatctctaatatcaccctatttaatttgaggttcttccacctaaattttcaagccagtgttattctctctaacattacttgtgggctcttgagatattaattgaattaaattgggcctagcccatttattccaacaatccccaccaaatttcatggctcacaggaaatgttctcaaaactgaacctgttagttataccggtgtttcgatggagactgttaagttgaacttccacctaggaaaagagctacaccagatcacaactgaacaatggactatgccttgaattatcagtcttgtgcgattcaggtttcactcaaacccttaactggtactaggctgtcgtttgcatcccctctgtttggagcgtataagtcatactcctggccttttcatgagtatctagagatcacccagatctcatagactgtgactaacagtcggactcatataagtgtgttccttctaaaatgttctgtaggccaacatctctgctttatgaaaagccactcggatcacattaaggtgtataccatcctaccatacagattagaagtgaagtgcatcatgaagataggctcattttagggtctcttctctcagctacacaatagtttgttttgccatctaaattcacgggatctccgatcacaatggacaggtttccactattgtgcaactctaagtgggtctcaagcccatctccctcgatgcacagtctatcacattacgtggtagccccttggtaaactgatctgccagatttttagccgtctggacatagtccaatgctatcactccggagtttttctgctttctgatagacttcagtcttcttttaacatgcctggatgacttcatgttatccttcgaactgttcactttaataaccactgtttgattatcacagttcatcaggattgctggtactggtttttcaaccaccggcaagtccatcaggagctcacgaagccattcggcctcaactgtggcagtatctaaagatgtgagttctacttccattgttgacctcgttaagatggtctgcttgcaagacttccaggaaacagcgccccctccaagtgtgaacacatacccacttgtggcctttatctcatcagcatcagatatccagtttgaatcactatagccctccagcacttttgggtacccggcgtagtgaattccatagctcattgtcccttttagatagtgcattactctttcaagagcatgccaatgatcatctcccagatttgaaacaaaccggctcaacttgcttacagcaaatgagatgtcaggcctcgttgcactagctaagtacatcaatgaaccaatgatctgagagtatctcaattgatcccttgctattcttcggtttttccttaataacacactgggatcataaggagtaggagctgcct

SEQ ID NO: 8631 - DNA, 38224 bp, Oryza sativa
gaatggaacatcgacgatatccaagcccaagaaggatcctaatgcggccaaatcttgtccttccgacgagaatcacgagccgacaagaaccacttctgaggcaacaaggtcttggtgtcctatccacaaaaccaggaagcacaccttgcaagcttgctgggtttttctcgacgtacaagctgagatccgtgcctgcaaaagcgtggaattcaacgtacttctccaacccgtgatgtctattgtcctattcacaagacaaagaatcacgacctctcaagctgcaaggttcttctcagcgccatgaggacgtcacctcctaaggtccagcagtcatagatctctcttagagatgcgcacaaggaatgaggagcagcagttatctcagatcgattcgttgggataatcgacatcgatccccacgagccgtcagttctacacttgctcgaagaccaggcctcatcatcgacgaatacaccacgcgatgtgtttgctatcgatgggaccaacacgtctgtgcacgccaatgcagaagtggaggatcaagtggttacaccagcccagtacatcagggctatcaacgcaatactgagagaaaccctttatgatcccattctggacgatgatctcgcacagtggacagaacgactatgggaatcagtggctaacctcagtaacgcgttcgaagaggccgccgccggagtactgccagaacaaccgccaactggcggtgccaatggcgaactacctgagcagcgggcatcacctcgtcaagcccctactccacctcgtggcaccagtgatctccgtgaacatttgaatggccgccgagaagcatgacgcgcacgagacaacgaaaatcgttcccgacatcgcgtctcttcacgacgtcgtgaaaacgaagagcgaggaggacacccgagcgaaaaccaagaccgtggtaaccgccacaaccgccacgatcgcgacgatcgcgaacagcggatgccgggcgatactggtcgaggacgctgccataacgatgatgatgatggagatcagcgccgggacaacaacggtgggcgacgataggattctcgagaacccggacgtcatcctcgtaatcgtaccccggaactaagtcactcatcatcatcgtcatcatcctcgtcatcagacagacatccatggaggacatacgatcaccaacaacccaccgcccccggcagcggatgtagagcttttagtcgtgccctacgagatgtccgatggcctgagagattccgaccgggagaatagagaagtacgatgggagaaccgaccgagaggagttccttcaggtctactccacagtactctatgctgccggtgcagacaacaatgcgttggcaaattatttgcggcggcgttgaaaggatctgcacgttcatggctagtccacctcccaccatactcgatttcttcatgggcagatctgtggcaacagttcgtcgctaacttccaaggaacatacaagtgccacgcgatcgaagacgacctacatgcgttgacacaaaatccgggcgaatcattgagggactacattcggcgcttcaatgagtgcagaaatacgatccccgagatcaccgatgcttccgtgatccacgcttttaaaactggtgtcagagatcgctacaccacctaggagttggcgacaacacggatcacaactgctcgaaagctattcgagattgtcgatcgatgcgctcacacggacgacgcactgagacgcaagaacgataagccaaagacggcgggagagaagaaaccagccaaggacgcacctgagtcaagcaagaagaagagtcgcaagagtgggaaaaggaaagctcaaacggaagtcatcgcagcagaatacgcggacccgcccaagcacctagacccacagagcaacgacacgaagaaaatatggtgccctatacacaagtcagacaggtactctctggaggattgcttcgtcttcaaaaagtcgctcgcaaagcaactggcattggagaagggcaagcgagtacgtgtagtcgagaaggccgctgaagcagctactcaggactcggactcagcatacccagattccgatctccatgtctcgcacatcttcggaggttccacggcgtactcctcgaagcgagagtacaagaaagtggagcgcgaagtttgttcgacatggcagggggctgcacccaagatgaagtggtctgagcagaagatcgagttctcagaagaagaccaccccaagactgctgtcaccccaggacgatatccgatcatggtcgagcccactattcggaatatcaaggtcgcatgagttctcatcgatggcggcagctccatcaaccttctcttcgccaacaccttggacacgatggggatcccacgaagcgagttgactcccactgatcaaccctttcatggaatttctcctcggtcgtcgtccaaaccattgagcaagatcacgcttcctgtgacttttggccatgcaaacaacttccgaacagagcagatcacctttgacgttgctgagtttgacacagcatataacgccatcatcgggaggactgcactcgcgaagtttatggccgcatctcactacgcgtatcaagtgctcaagatgctcgggccgaagtgaacaatcactattcagggtaacgcaaagctggcggtgcagtgcgacaagcggagcctcgacatggtcgagcacacacccaacccacccgccacagccgagccacccaagaaagtgagcaaaacaaacaaaacgccgcagccagacggcgcaatcaagatcgttccgctttccagtgccaaccacgacaaaaccgtcaagatcggggcatcactggacgagaaataggaactcgcgctcatcgccttcctccgcgacaatacagacgtgttcgcttggcagccgtccgacatgccgggggtccccagggaggtgattgagcacaaactcatggtgtgacccgatgccaagccagtaaaacaaaaactgcgaagatttgtaccagaccagaaacaagccatacgagaggagctcgacaagcttctcaaagctggcttcatcagagaagtactccatccagagtggctagccaatccagtcatggtgcggaaggccaacgggaagtggaggatgtgtgtccacttcaccgagcttaacaaggcgtgtcccaaggttcacttccctcttcctcgaatagaccaattggtggactcaacagctggttgtgagttgttaagctttcttgacgcctactccggctaccaccagatcaacatggcgaaagaggacgaggagaagacagcattcatcatgccgttcggtgtattctgttacattaagatgccgtttggactagtaactgcaggaaataccttccaacgcacggtccaaggggcacttaacgatcagcttggaaacaatgtcgaggcctacgtcgatgacattgtcgtcaagaccaagacaagcgactcattgattgacgatctccgggaaacgttcgacaacctccgacgatatcgcctcatactcaatctagagaagtgcacgtttggagtaccattgggcaagctgctcggtttcctcgtctccggaagagggatcgaagcaaatcccgagaagatcaaggcaatcgagaacatgaagtcgcttacaagactcaaggaagtccagaagctaactggatgcatggcggcattgagcagattcgtcgctaggatgggagaacgaggacaacatttcttcgctctgctgaagaagcaagacaaatttgtgtggacacaagaagcggaagatgcgttcatcgcactcaaatactatctgtcaaatccccctgtacttgttgctccccaacctaatgaagaattattcctctatattgccgccatgcgaatattttgtgagtactgtcattgttgtcaagaaagagaaggtgcaaagaccagtctactacgttagcgaagctctccacgacgcgaagacaagatacccacaaatccaaaagctgctctatgcagcaatcatgacatcaagaaagctatgccactacttccaatcccacagagtcacagttgtttcgtccttcccacttggtgaagtcatgagaaacaaggacgttgtcggtcgcatcgcgaaatgggtagtcgagctaagccagtttgatgttcactttgtgtcacgaacagccatcaagtcccaggtcctcgctgactttgtagctgactggactatgcctaacaacagggcagacagtcaggacgacaacgagacatggacaatggcatttgacggcgcactcaatagccaaggagcaggggcagggttcatcttgacatcaccttcgggacatcagttcaagcatgcaattcacctcaacttcagggtaaccaacaacacagccgagtacgaaggactactcaccgtgataagagcagctgctgcactaggggtcaagcgactaatcgtgacaggggattctgaactagtcgcgaaccaggtgcacaaagattacaagtgctctagccccgagttatctaagtacctcgcagaagtcgggaagctagaaaaaaggttgatgggatcgaggtccggcacgtgtactgcaaggacaacatcgaacctgacgacctagcacggcgcgcgtccagacgagagccactcgaacccggcaccttcctggacgtcttgacaaagccatcggtgaaagaggcaaacgacgaaaatagcatagtcgcccccgacatcagctcgggggctacagaggtagaacgcgccgttgccaacattgagaccgcatacgactggcagaccccactcatcaagttcctaagtagtgacgagttacccgaggacgatgcagaagtcgagaaaataacccgtcaagccaaaatctactgtatgatcggcaacgatctatacaagaaggtgccaaacggggtacttctcaaatgcgtctcgtccgacgacggcaaacatctcctcctcgacatacacgaagggatctgtgggtcacacgccgccagtcgcacattggtcgaaaaagcttttcgacaagggtttttctggccgaccgcccttaaagacgcttgcgacatggttcagcagtgtgaagcctgtcaattccacagtaaacacacgaagctaccagcacaagcgctccagactatccctcttacttggccattctcgtgctaggggctcgacatacttggaccattccgacgaggacagggcggctacaggttcctattcgtggtgatcgacaaattcaccaagtggatcgaaacgacacccacgggggaaatcaaggccgacaacgccatcaaattcatcaaagggatattctgcagatatggattgcctcaccgcatcataacggacaacggctcccagttcatcagtgccgacttccaggactactgtattagattgggagtcaagatctgcttcgcctcggtttctcatcctcagagcaatgggcaggtcgagatggcaaacggcatagtactacaaggaatcaagacccgtgtctatgacagactgatgtcacatgacaagaagtgggttgaagaactcccctctgtactatgggccatgcgtaccacaccgacaacatccaacaaggagacacccttcttcctcgtgtacggctcagaggccatgctccccactgagctacaacatcagagtacacgagtacagaagtacttagacgaggaccaggaggagcagcgaaacgacgacgtgaatctactcgaggaacatcgagaaagagttgccgtcagaggagccagctaccaacaggcccttcgctgataccacgagaagcgcatcagagcacgcacgcttttgatcggcgactacgtcctccgacgggttcaaagccaagcagggcgtaacaagctctcacccaagtgggaaggactgtacacgatgacgcaagtcttgtggccaggtgcattcaagattgcagacggcgatggacgcgagttagcaaattcttggaacattgatcaattacgtaaattctatgtataaatcaatagtatccatacttgtaagacatcttacagcttcaataaagctcattttcaggtaaagatcgcaatcaaagtgttccttcccgacgatcccttaccacgacgatacctagcgttgaatcctatccttatgtccttttacgccgtcttgataaggcctctgaggaacctaagggaactttggctggggacgcccagagcggataaggccttgtcggatcatgtagagacaaaagactatgtaagatctggttgtgtaagagttctcgccgtgcgtattaaccaagccgtgtaatcggaaaccgagttttccaacttcacggctgggggctaggatcagtgcttgttcaaccaaggcaggtcaagagtccaagagcctcatcttccaagaacaaattctccgatgacgaggctgggggctagggagagtgtatgactcaagcgactgatcgaagtcgtgaagtgagaaaacactcatacacagcacatccagagtaagaaaacttagttaaatagatttcttttctatttcgcaagtacttcttacaatttgtaaatattccaaaatatgttacatatctccttgagatatttgtcacaggatacaaagactacaaggatggccaacgccagtccatagactgaaagactttctccgcaagtggcgccatcgacttcgccaaattgtctatctctacgggagtcctccgagaacgtgaaaacccttcgtggaggaactcgaggtgcagctgcgggcggtgatctcggatacaggctagcacgtgtctcggatacaggccagcacgtgccctccggcatatcggctcgatcgacgacactcctgcttcagggcctcatcgatacgcttgccgatgccttcaagctgagcgtaggccccattcaaccacgagatgtatcaggccgctgaatcctcgggattcctgcgaggtactcggagttcccagcagactctggccattgccgtacaacagctcctgaggtacgagttgaaccacaccttgcgacctcggagtgcctccacggctcggtccttcttcacttccaccatagtcctctcgagttcggccacctcgaatttcgtcctccagtattggattcgacgatctcggtcggccagcacactctcgaggtctgctcagcacggaaatgactaagtcaagttgttcttctctctcgagaacacagcaaattaagtcaatccgagcagaagactgaaggagacaaagaccaaagtaccaacgtaaggatgtcatcgccacgtccgcctccacggacaggctttgatcgacatcgtcccgcggcacgtatggctcaagcgcaagtgccggaacgactaccggcgacttaggctacccgcgctgctggacatcctcgatatcgacatctctacaacgacaacaaaatactcggaatcaacatggtaaggaaaacgaaggtgacaactgcatacacaaaggcagtctgaacctataaaagttttacaagcacaattgattaaggagtacaaggggaataaaatcctactcttcaaaaagggggagaacagactcccccaagtcaccgacttcttccatcacgcccttacgcgcgctgttggcggccccctgatccagaatcttctggaggtcgagatcagggcacgccagtttcacgcatgcgaggacgtggcacgccctggtatagatcccgttcgacatctcctcgccgatcctggccgcatgcttggaggggatctcctccattgccgccgccagctctgcgagcaaggacgtcagcgagaactcgtcgggggttgccgggatggtggtcgtgacgccgcactccccgacgagttggtgtaggccagtgtaagacacccgcagcgagccgcggatctccgacaagttgttctcgagctccgacatccggtgctcgagcccttgccgtttcctttcgttaccggtcaccaactccctcatcttgagaaggtcctcgtgggtctccgccagatcacgcgctagctgctcggcgcgtcggcttgccgatgacgccgttgccctggcttcctcgatcttgtggcccacgccatgagcaccagcctggaggatgcgctccatcttggcttggagctccccccggtgagggcatcaacaggcgggccccgagtgggcacaaggccgccggtgggcccacttggcgtcgcctcccgttccctagtcgcgaccacgacatctgtcgaagccgctgcaggagacgcactggaggtcgcaccggacccgtcttgcaccgccttcgcccgcaccgccctgcgaaggatttccacggtttcataaagtcaggcgacgaaggtttcgtgattgaaagaacctcaaaatcatctacttacttttcgccaagcgtcaccagcctttgccgtcgctgaggcgggggggggggacgtgtccgaggcctaagtatgataagcatggtgtgaggtcaagatcttccgactacgcgttaggagacaagagaggcttaccgatgggttaggcgccttccggcgggtcccaagtacagaggagaatttcctctctctcttcgggacattgctgccactcgtcgtgggagcagcaacaacgtcgaacgcctccttcgcgatgccctctttcaacgacgccgccgcctgatggtccacgagcagcccgatgacgtcagtcagagggagagcctgcacaacatgaagtcacaacgcgatcctggaagaaaaagataaaagggtcgttgagtacactcacgttgattgcagcttcgcgttcggccgtcccctcctcgcaaagggggacgacgatgttgctcgccgttgtggggccgctgatcattacttgaccgacgcagcgctccacagtttcgctgttcaaacctgtaggatcgagaagcagaactcgataagtcaggaggaacgtgcacgtaaagaacgaaatctgatatacgagaaaaataccccgaggagaaacccgggccgtgtcctctggcccagaatagtcaaaggctgggtggactcgagcctggagcggctggatccgcctaccgatgaagtcggcagcaacttcataccccgacaaccctcgtactcggaggtcatcgatgatatagatgaaagactgaagggagggagttagggcctgtgttaccctgatacggctgggaaggagcgtatccgtatcagatacgtaataggatacggatacgtatcggatatgctccgatacgtatcccgtacgtatccaccgtttttccgactttcaaaaaaataaaataattaggatacttctctgatacgcgtcagatatggcccaatctctccttctttacgggataacaaccctagccgcctcccatctctttgcgcacaacggtgccgtcgtccttgaccgcggcaccaccgcagcgtgcatgctgccgctgcgtgctgccgagcacggacaccaccggcgtgcgctgcttggctgctaagtacgaaatcaccgccaccgtcaagcgccgccgagaagggaatcgctccgccgccgtcaagtgcagtcgagaagggaatcgccgccaccgccaagtgattcctgtggttgctaggcacaacaccatcgctgcacgggttggtgcctcggtggttcaagtgaggtaggcatgagtactgacagttgagttaaatcacttctttgatctgcaatgattttttttgtttcttgttctcctttcttattttcggaacaaacaactgccatattactatttcagagatccgatagattatgaaattggaaactcaggagtactaagtgcatccaggatcttaatgttgggcgataacatcattcttttttattttggccaccgcatagtagccgtaagtgacttttacagatccagtaattactagtactgccgtacttgaaagctatgctcgatatatctgtgtattgcttcctttagttatctctgaattattggcatgttcattattttgggcttaatcagttctgctattttctttcaggagttcattgatttttattatttattatgtatatatagacgtatccccgaatccatgatttttgaaaatagccgtatcccggtatccccgtatcgcgtatccgtatccgtatccacgtatccgggtaacataggttagggcgggtttggcgatccacgccgggatcttgtctggttgctcctcaggaacaacaaagactggatccgaatcttttatctgaagatagaaccacctcgcccgccatttgctacgagaagaggggcactagaaggggatgtatcgcaacttcaggccatcccgaagcaggaaatcgacacatccggatatctttttaggttccatccagcgcaactcatagtagaagcggaagaggtcaagaaacgactctaccccaatgtaggcctcacaaagataggagaagatactgaggaaggagatggaattggggttcagatggagcaaggaaaggccgtagaaattcaagacgagaagaaggaagaaaaccgtaaagaatgtaatcctcaaccgcaaccatgcggcccaggacaggttcaggttcaatacctcttgtttctcgctccatggtcccgcggccagggagagcatcgtcgtcctgcagtttcttcagggacgcatttgtggaggtggacttgtcgagatccatccccgccggagatcgccggagatcaaaccgagatgaacaaactagggtttttctataggagcggagaaggcgaggggcgtgtggaagctggaaagtctttgctgcaagcagacttcaaaatggatccctaaaactcccttaaatagacgcactaccgacggtgcgaattccaaggaaaggagagagatagccgccggaaatttctgggtccgttacacgcagcagttttcggacttcaatttaaattcactcatgaccgttgaacttcacacggcgttgtcgattactctttgtctctacggttctcacaccgagatcgaccagtagagaacgacaacgactccgacatcagaagtcgcgatcgctcacatgagttcatttaagcagaagtcgggggctactgtcagggttatggataaggtataccctttacccttagatatacgttgtacactgatatggtatacctgcgtgtgtgcggatatttcctgtacacgttaagtaagttcattatgtaaccaaaacggagtccacggatggaatgagtcctactcgggtagaactgggtcattactgtatcgtgtggggtccgatgtctccgagttctacttggagaccaactgacccgcggtataaaatggaccccccgggaggacctaagacatcgaatctcaccgccaacacatccaccacagcctatgaagtcggagcctacaggagccaagtcgccgggtgatctagtcgaacctactcgactacggtctcatcagtatcatcgagttttgctattccctttgtaatctgtggttatcatcatataatcccataccaattggattagggctattacctttctaggggcatgaaccagtataattgctgtttcctgtttgcttgatgtcgtactagtagatcctcgtagcagtgtaccccaataccctctatatccggtctacgggtatccaccatcgacaatgcggtcctttctcctgcctgaaaaaactacttttggttgtctaggaaaacaattttcctagtagtgaatccaatgcaatgcgttctgatatgtttggcgacattctcatctctttttttcccttcacctccactaaatctggctaaacgaccatttttttttcatttcgataagtattcgatggtaatcataaccacctctgatatctattactcatgcatgatgcatgacgatgcgaacacgcatttcatatactgaagatttaaaatttagacttcgtcaagaaaatggaaccattgcatcaggatatgccatgcttttcctaagcttaaccaaatcgtcgcaaccgttgccggctggtatgctttcacagccatatccatgtgtatgctctcccgcataatcccatctgtcgaaacaagatttcggcaataataaaagggagtggctatcaagctagaaaagtgtatgggtttggagacaaggaattttatacaggttcaggccttcttattaaagaagtaataccctactcctgtccggggatgattccgccgagtgtgttattgattgtatgattgggagaaaaaagaatcgtgccccaagaagcatacggaccctccttatataggggaagggatccgtaatacaaggtacagtccatatcctaacggaatatgggattacagataaaatacaattgtagccgactaggatcccgggtattttcttgacacacaagtttagagcctaccccgagtcctcataaagatattctatctatatttagtaccatatatccaactaaagtataactgtcatgcagatatggggtatccataatctccacagtagcccccgagaccttcgcagttgacgaaacaaaaaccagtagtccgagtgcttcaattcaacttgctccagcttgctgagtactaaaaatcaaaaactatgaagggcgaaaataaaacatggtgcatcgagtagatgcacctaattaggtgtagcccccgactatgtgattagttgaaaaactaaacatatagtcaagcaccgagtggttttatagcgaagcacgcatggtacttagtaagatacccagccgactgcttctcaactttaatatatcaaggacaaaaaatacaagaggggccgagtgacaaacactcaaaaggcccaaaaatagatatatttgataggaatccgagcaagaaactcttaaaatgacccaccaaacatgacagaaaatcatggtaattaatgagtctaacagccgaggctgtgacccttaccatagccaaaataagcatataacatgctaggagaatgactactaataaaccagtcatctcaaattaacccaagagctcctgtagcctaaaaaagcttacaaaaatggtataacacctttctgttgggcaccttttcatgtgcatcataataattccaaagaattattgaatcgcgttaaaaatgattttaacagcatcgggccgtgtcattgtgagcacatattgccaaagcaaaaagcgcctaagtccctagggatcacaacgggccacgctgaaaacataattgggctgaagtactgtacaggcctaggcccattagtactcccgataccctaaaaataccgaagtccaaacgtcgcttcgtcttccccgccgagactctcgccattccccactccgtgctacagtacagaaccgcgccgacgaagttagggttcatcaatccgctccaatccatcctcaaaaacttcacaaaatttctccccgcatccaccgctccgagtccccatctcttttcagccatatctcgaactaaatcaaaccatccagttcacattcatggcggaagaaagagaaagcttcgagagtcagtgggcgccctccgatgtgacagaagacaatctgaaggagatggtggcgcacagcgttcttccagcaaaagagatcatcgggtggcgaccagcatttggtgaggcattcccgacccccgacacacacgaaatcgtggtattcactcatttcttctacggcggattttctcttccaacctcaagatttttccggggcattctgaacttctacgggattagcttgcatcacttgaatccaaactccatagtacatattgccaattttatctacgcctgcgaagcttttctaggcattaggcctcatttcgccttgttccgccgcatcttcttcctcaagccccagccaaacaaaatcaagccgtgcgttgttgggggagctggcttccaactcagaggaaccttgagccaaaaatatttctccatgcccttcaaaacctcaaacaaaggctggcatgcgaactggttctatgttcagaatcctgagcccgcactccccgagtattgctgtcttcctccggtttaccaggacacatggagctcattgcctataggagatgaagctgctcaagcagtagaactgatggagaggatgataaagctaaaagaatagggtcttcaaggagagcagatcacccggcactttatcatgtgtcggttagctccaatcaaagaaagatcccgcacagcttttgagttcgatggcaagcatgatccaaatcgggaagatccagattctcttgactttaaggtcatgaaagaaagaatgtacaagatcttctcaaatgctattgttgtcagctattcacatctgctgcccgtcgtgccattcaacgcattcaaccctcctccaccggtatgcactcaaacatttcaacctccctcaagatatgatcttgtcttcctgttgaatcaattaacaatgaaagatattgcacccaggaatttgctttaatgaagtcggatcccccaatcgctcaacgccgatctccccgccaccaaactgggcaagggagcggaggaccaagaattcggtctgaaactcaaccaggtgcttctgatccagttggccagtcagactctcgaaagaggaaactggttctgagtgacgacgaagccgatgatactaccaggaggccttgagaccgagagacaaccaagaaactaccaaaacaggctactctaaggaagaaaacatcagtcgccccgcgccgaagatcaggaagtcttccaagtacaactcatacaacgatctctcttgcattgatgcgcatccattgcggcaataatactgataatcaaacttgcaggaaaccatctgccatagatccgtctgggaaagactctgacccgactagtgtggatgcaagttcttccaaagaaaccaggccaactgccgaggaccgtccgagtgacaatcagccgacaatcgataatgtagaaaccggtgatcaaccaccgactgggaatcagtcggctgaagccgaagccggggttaatcaggagcccccgactgaaaaccagtcggacgcagggccaagccaagagattccagaagttagagctcaagcagacagccttcgcggacaagacgccagcaataaccagagatctagatctcctttaaaggcatccgaacccactcgtcctcgtccaaaaatcattacgggtaaaacactttgtctgaaaccatgtcgacccaaataactctgaccaattgtctaacctctgtcagtggatacattagggccaatgatcggtgatgaagaagaaattccccgcatacaagcagctgaggattcacaccctccgattctggtcaagtggtgggatgacaacatgcagcctcaagggatcatgataaataagcaaaaagaggacgaagagttatgcctactgaagaaggcacttggtcaggcgacccgcattgtaaatgtaagccctctggcacctgatctcaaccatcttgtttgccatttaattcatgcgccaattaaactgtcttgcagaggattcatcttaggaacgaagctaaaacagaaccttagagaagctggtccctcatctcgggaccctcgaagccaccaggagtctgctgcacgagacaaaagagcttgccaggaaaaatgagcatgatctgaggaatcgaattactgagctccaggaatccaattttgaactgagtggctcatcaaaaggtttgcgcaaactctgcccaactgacttgtgctgttagctctgtaatcctgattaaccgaagttaatatagtgcaagctgccaagatatctcagctagagaagcagatccaaattctggaaaatgacaaggcagaactggcaagacaaagagacctggcttcaaaggaagttgaaggtatcaacaatcaatacctcaaaagccattatcctccatatgctgacttattaatgtgaatctgtcgatgcagaccgcaagatcaaatctcaagctcaattcgacgtcctggttggcaagatcaaaaaacttaaaggagcccgggatgaggttcctaatgctgctgccccaattgttcaagcgatgttcctcaataacaatggcccgagtgcacttgatgcttctgaaatttttgacaagctgagagttgcttcggatatatatttcaagaacatcaaagaagctggaagtatgggagcaagtatggcgttggcgatgactaaatccctttatccgagagttgatattgacgccattgatggctttgcagacgggacgagcgaagaagctgctcttgacctcatcagtgatgcgaaaaaagcggctgacaaaattgctgctgatgtagttgagagatttcaggacaacgatcttcgaccgactggtcctgaaaattctgatgatgaaaagactgatactgattaatgtaccgataactttgatgattaacgatgatggaggcacaatttgtacaatactgatgaatttatgctgtgcttgatatcttagcttagctcctgatttcttaaaagtttttgtcaaaccttgttgagcctaaaacccgcaaaagttgttaaaaaactttcagtcctcattgactaagccaagaaatcaaacagggcaatgatacatcaagtaagcaacttgaatggataaaaatcacactccatttttattatagtagccccctgactgaaaacttcgaggaaaaacttgaagttagcagtcaaagaggaaagatacaaacgaaatgcctaagcgtaaaatcgacgaaggtgttcaatattccaagaattgttaatgatagtaccatcttcgtgcttgagtcgataagaaccaggccgagtgacttcagcaattatgaacggtccttcccataaaggagataatttatgccgatcctgtgttgtttgaattttccgtagaaccaggtcaccgactaaaaaggctcgcgatcggacattccgattatgataacgacgcaacccttgctgatatcgagtcgattgaattaaagctgcctctcgggcttcttctagtcggttgatgtcgtctactcggccctcttcatagccctcctcgttgaagttccgaaatcgtagtgattcaaattccacttcactcggcaacattgcttctgcgccataaaccaaaaagaacggcgactggccggtagcccgactaggagtagtacgtaaagaccaaagtacggacggcagctgatctacccacttgccagcataggggagtagtcggtcgaaaactcgtgctttgatcccttgtagtatcatgccgttagcgctctcaacttgtccgttactcatggggtgtgccacggaggcataacaaattttaatgccgaagtcttcacaaaagtctttaaatgctccaccggtgaattgagtgccattatcagtgatgatccgattaggtaccccaaaccgatgcacaatgttgatgaaaaaatctctagctttatttgctgtgatcgtgatgaccggtttagcctcaatccacttggagaatttgtcgatagccacaaagagatgcgtgtaaccgccgactgcccttttaaatgggccgaccatctcaagcccccagaccgcaaacggccaggacaacgggatggtttgcaactcttgggctggcaaatgagtttgtccggcaaaaaattgacaaccttcgcatgtccgcacaatctcgtccgcatcagacacagctgtaggccagaaaaaaccttgccggtaagctttgctgacgatggtccgtgcagcagcatgattaccacaaatgccagaatgtatatccttcaacaattgtctcccttcctccaaagatacacagcgctgcagtattcctgatggacttttcttgtatagttcagcttcgtgaataatgtaaagtctgctgcgcctggaaatccgctcggcttcatttttgtcttgaggaagttcttgtttggtcaaaaattctatgagaggttatctccagtcggcttcaatcatgcttacgccttgagtatccatggcttcagttgtctcttttctgggcatggtcggttcgtaaagatgttcgacgaatacatccgaaggagctgcttcccgttttgaaccaaaattggctagtctgtcggctgcctcattgttatgtcggaggacatgggtgagctcgagtccatcgaatttgtcttccaacttgcgtacctcttgtcgataagcagtcatattatcatctagacaagaccactctttcatgacttgattaacaaccgagagtctccacggacgattaatcgacgaatgcttaaagagattgcaatccttaatccatggagtagcgcctcgtattctgccacgttatgggacgcagaaaaatgtatccacaatacgtagctcaatctttctccagtcggggaaattaagacgaccccacctccagtgcctgcaagcctcttcgacccatcaaaatgcatagtccaatattccatttttttcctctggcatatcttcttggcactcggttcacttggcaaggaaatcagctaaagcttgtgacttgatcgaagttcgtggtttgaaagatatgtccaaagacatcaattctaaggcccactttgcaatctgtccgtttgcttcgcgattatgaagtatatccccgagtaaaaacgatgtgaccactgtgaccgagtgactttgaaaatagtgagataattacctgacggtaattaagacaccatataataacttttgaacctgaggataccttgtcttggagtcggctaaaacctcgctgacaaaatagattgctcgttggactttttgaatatggccttcctcttcacgctgacaaccaggaccgtactcacaacctgggaggttgccgacacatataacagtagtggctcttgtggatgtggcgaggccaaaactggtggagtggtgaggagttccttaaagtcttcgaaggctttctgtgcttcgggtccccactggaaattgtcagtcttcttcagcagcttgaagaaaggcatcccccgctcgccgagtcgtgagacgaaccggctgagcgccgctatgcaaccagtcagcttttggacgtctttttgggagcttggtggtttcatgttgaggatggcattgattttctccgggttggcctgtatgcctctctgagataccataaatccgagcaacttccctgacggtactccgaagatgcacttttccgggtttagtttcatcttgaaagcacgaatgcttgtgaaagtttcttctaaatccgcaatcaggtcatccttctgcttggtcttgacgactacatcatcaacataggctttaacattgccctgtctttttccgaaccaggactgggttagccagccagtcgggatgaaggacttcctttatgaagcctgctgctaacagcttggttaattcctccttgatcgcatccttcctgtcttgtgcgaaacggcggagtcgttgcttgatgggtttggcgtcttccttaacatgtaaagagtgctcaatcacctctctggggataccgggcatatcggatggtttccacgcaaaaatatttttattattctgaagaaaggtgatgagcgcgctttcctatttacaatctaactcagcgcctattacagcagtcttatcaggatcggagggatctaggggaatctttttcgtcttggcatcactttcttcggtcttcgtcagcttggttgcaggtacttctccctcgcttgccgtggttgcagccagtcagatctcttcgcgagcaagagtagtctcgtgggtttggaccatctcgcagctttctttgtcacatgtgacggcctgcttgatgtcgctccgtagtgatatgacccctcgagggccaggcatcttcatcatcatgtaggtgtagtgtgggacggccataaatttggctaaagccggtcgtccaagtatagcatgatatgctgtctcaaaatcggcaacttcgaaacaaacattttctgtgcgaaaactttctcgagtgccgaaggtaactagaagagtgatctggccgagtggtgtagctgacaatcctgggataacactgtggaagggtgcattactcggctttaattccgtgcgaggaatctgcatatcgtccagggtcttagcgaaaaggatgttgagtgcgctgccaccatcgatgagagtccgttggagcttgacattgcgaaccactaggtctagtaccagggggtaccgccccgggtggaccactcggtcgggatgatccgagcagtcgaacttaattgctgtttctgaccaccgaagatattgggacgtgttaggctgaaccgcattgatctcccgctctgtgagcttctgttttctcttggactcataagccaggggtccgccgaagatgtgattaagttctttgcgatgatcttgaaaaccagtcggggcatcgtcttcatcatctttcttctttgatgtgccctaatctccgtctgcaggtttgcgtgcgttcttgacgtattgctccgcgaactgtttgtagacgaagcaatcgttggccacgtggttggaattgggatgatgcggacattgagagttcattatcttgtcgaaggtgttgacgcggggacgttgtcgggaagatggagaggtggtcaccacaagttcttcgggcttacgcttgggatccttgtggttgttacttccactccctcctgtagtcgacgtgtccttctttggcttccaagtggtgcccgactgtttggacgcggtgatagcatcctcggctttggcatactcgttggctttttcgaacatctgcttaaccgtcctgggaggtttacgtccgaacttgccgactaggtcctcgtggagaatgcctttagtgaaggcggcgatgatgacgttgtcggtgatgtcggagatcttgttgcgttgttcggagaagcgtcggatgtaatcccgaagggattctccagacttctgaacgaagttgtagagatcaaactgtgtgtcggggcgttcaaaggtgccctggaagttggcgatgaagtgatcacgaagttccgcccatgatccgatcgtgccacggggtagtccgtggagccaggatcgggcggagtccgctagggccacaagtagatagtttgccatggccttgctgtctccacctgctgcgcggattgcgagtctgtagacggtgagccaagactccggattggtggtgccgtcatacttctcgattccagtcagtttgaagctgactggccaatccactcgacgcaggtcattagtgaaggcagctactccatccacgtcatcgtcataacgatttggtgaatgacggtgacctcgtgctgcacggcactggttgatcatgtcacgaaggtcgacgggacgctgacgaggtggagaacgaggtcgttcagctcggcgctccctgtgacgttcgggaagcgagtgaacagatcgttcgtcgtgacccctgctcctgcgactagatcttgtgccagtgacgctgaggcttggctgatgatgagggactcggctaccagtcggggtgcgggtgcttgcggagttgactggaaccgaggcagcgatcatggtcttcgtctggttcaagatgttgacaacatgatcggcttgattgagtgcgtcttccttgaggagggtgtcgaggagagtgattgctgcaaccgcgttctgctggggggtgcgaaagactgctgtcccgtcgacgtcttgttgcccaatgagctctctcgctcggcgcccagattcccaggcgcggtgctgtcgatcttcagcttcctttgcaatccgttcgcgatcttgttgctcccgctgtagtcgttctcactcctgtcgctgtcgctcttcctccagtcggcgacgttcagcttcttgccgtgcgcgatcttagtctgcttctcgggctcggcgctgttcttccgtttcgttgtcagccatgaatacgccgaagaagaggggtgtgtagttatcctcgtagctgtcgtcgaagttgtcgaagtcgccatggtcgtagtggtagccgaagtcatcgtagtcgaggatctcggttggtcgagaactgacgccgggggagctgaggtagccatccaactcttccgtcgagactgtcccaagaggttggagtataacgccaacctccctggatctagactggatcggggccgatgccagagctcgcctagatctccgagtgggagatgttttggctgtgaagacggcggccaagtcgtcaggaagtttcatcaagattgagggataggacccatcgtcttgatcggatcgtggaggaacagattggatctcatccgagtggcttgaaaccaactcaggagagatgatcttggagtaggcctcggccgagttcggaataccaaacggcacggggacctggtttctccccgactggtttgaatccgagtcaaggagagagatcttgccgaagtcgttggtgatgaagtcgaagctgccgaatcggaacgcctgcccgggagggaaggcgaagtcgtcgatgccagaaacgaaacccatcgtacttagtcggcgagaacttgacgcctcccctacctggcgagccaactatcgaaacaagatttcggcaataataaaagggggtggctatcaagctaggaaagtggatgggtttggagacaatgaattttatacaggttcaagccttcttattaaagaagtaataccctactcctgtccggggatgattccgccgagtgtgttattgattgtatgattgggagaaaaaagaatcgtgccccaagaggcatacggaccctccttatataggggaagggatccgtaatacaaggtacagtccatatcctaacggaatatgggattacagataaaatacaatcgtagccgactaggatcccgggtattttcttgcacggatatatcattgtagcatttcgcccgaaagtattctaagggtatcatatttatttaatcccgatggaagatttatgagagagaactatgctaataatttatatgttacttgtaataatcagtcttagcagtagttaatttaattcatggtagagtgacacaaagcagaagcactaaacactctcataaatactaaaactaagctaactagagaaagaataagaaaagaattcatccctatacctctattatacataaaactttagtatgtactttctagtatacaatcatatagccaataccccatgtcgagttccttacgacaatcagtcatggccatccaaccgaggctaactacggaggagtaccctccctaggaaagtaacttcggattatatactaacgtggaggaatacccgtactgagctgtcatcatcagcggcccacctctactgtcccgcagtatataaccccaaataatagtattcaataatttaagcaccacacttaaattactaaatactacccgacaatcgccgtcaccacttagaccaatcattaacatgatcattatacacacactaatgcatttcgcaggtaagcgagctacacaattataacaagataaatatatcgtaaagtcggtactcgaatgattcaaatgaagtaaagtaccgcaattgtatacaaaagaatattctataaatcgtataagtcttacaaaagaacaaaaagctactagagccatacccaaattcttctcaagactccgaggactaagaaaactattctactcctactccactagctctagaacactaactaaacttgagagagagctttgatcttctttcttaagtgtgtgatggagtcaagaaggtgagctccttaaatagcctcccaatgacggttatgatggttggaaaggtaggaaatgccctccatccgtcattggagttgaatctttgccgtccacccaaaaccttgcatccagcggcacttagttcggccaaaccatgggctggcccaaccggcccagattttggttggtggatctcttgttgggctttattccttgtgctgtgaattttgggctcatttgcttgtgttaattctgtgttgtcagcccatcatccctcaagtctgattctcgacagcgtataattgattgtttgtccattttctgtcgatcctcctccattttgtgtagcattctctgcaagcaaatagaatacaagttcaagtggaaatacattattccaaaacaaatatgtattgcaggtatagctagttctcctttattttagtaatattgatggtcgaaattggtctataacgaccgtcaacactggcggcaacgcggttgggagcgacgaacgacgacaacgatggaggacggcgacgatgttgacggcgacagcgaccacgaggagggcggcggccgacggcggttagggttagggtttcgattttgagtactttttttgcgtgcaggcgacataagccacccgcacgcaaaaatcggcgtcacccgcacgaaaaaaccatgatttttgcagacacttcggtgtagacgggcgggagatccacacgcgaaaacccttttcgatcgcacggaaaaatcgtttttgtggtagtgttctttttaggaaaatgcatgtcgatcttattataggttatttagcacgctttgggtcctctaatgtataggtatgccctaagaggggtataaactttacaaatgtaacactactattaataataattaagcatttgagcatgcaaaataataagcttgtattgcacataatagatcactgcatatacacaaatttaggaaccacatagtataaatggcagcctgcatgcagcttaacagatagacggggagaggggggggttgtcttgagatgaaaagtgtggagaacattggagtcgttgattagttggccacataaggaaattaggggacgtgatcacaatttgagtgctaatcacttgttttaaaagggagtaaccatattatatttgacgatcatagttttagtgataagctttcaaatctagttgtattataatcactactggaaaaacacttcttccagacgggctaaacctattttcacaggcggaccggtccgcctccaaccctacgcttgtaaaaataagtgattttcacaggcagacaactggtccgcttgcgaaaatagtttgcagtgttaaaaaacaaattgggtaccctagcttcccattcccaatccagacccattcccaatccaatccaaccaaatcaaattcacagaggcatcacaaaatcaaattcacagaggcatcacaaatttgaagcatcatagttcacaatcagaggcatcacaaaatcaaattcacagaggcatcacaatgaaaacaaacgaatcacgaattaacattcacaaattaacaaattaacttcggtggaagccgctgaagtctccaccctccttgccggtagccgccaccgccctccatgcaggcggtgccactggatctaggaggagggaggggagccgtcgccgcatccaccctcctcgccagcgccggcgccaccgcaactgtcacgtcctgataaattcatcctgaattaaaaatcattctctaaaaggaataatagaattaattaaaattcgaaaagaaattggcaaacactaaaatacgtactagaaaattcgaatgttgtccggagattttttgttaaattctccatggtctaaaaagagccctaaaattttacttgaattttcagagcaccaaaaatatttattaagcaacaacaacaattaacaaagtttactaaaaagaaaaactaaaaataaatcctccttcctcctttggaccaagtctggcccaaaatcctcccactctctccctcggcccgcggccaaagtcctcccttcctccctctctttctcttcctctccttttctccctccttctcttgggcctccccttccccctcggcccagctccctcctcctccctctccttctgggccgcccctcccctccctccttccctctcggcccagccgcccggcccaaaccaggccgagccgagccagccgcgtgcacgcgcgccgcacgcgcgctgaccgcgcgccccgcatgggtcccacccccaggtcgtcttcctcctcccgcacggcctcctctctctctctctcccggaaacctagcgccattgctcccccaaatcagtctcattcaaaccaggaattccaaaattgattagggggaattaatcctatttccctcctctctctttcccccttaattcccccttgattcgtgcttttaatcacccggaacgcccgcgccaatcccggccgctttccatggccgccggccgacttttccgccgccgttcccacctctcccgtgcccggctccctcccctatcctataaaatggaaccccctcgctccgttctatcgttttagccccttctcgagctcccccgcggccacaccatctctccccgcctcctcctcctctttcctcggtgccggccaccctccagccgcccctaccgcctcgcccgcgcgccgtccggccgtgccgtcgcctccctcggctctgcaacgctgcccccttcaccggcctcaccatcccctctcctgaagctcgccggaacggtgtcctcgccgacgtctagtggtgtcgccaccactccaccgcctccggccagctactattccttatcggtgcggcagctgtcgtcatcttctccttccccggctccacggcatcaccctccaccccgaccgctgcccgtcttcgtctggagaccgccgaccgccgcgccggcctctccatcctcctcgtcgtcaacgtcgcctccggcagccccttccgccgtgcccgtgcgccggccgacgtcgccatctcctcctccggcatcgcagcgtcaaggttgccctcggccttgcctcccctccatctgaacccctccgctatccgtcgtcgtcgtcaccgttcgtcttcgccgatcgacgtcccatcggtcgcccggctcgtcgtctcgctgcgccgccacagtcatcgtcatcacagcggcgtgttccacgccgttctcgtctcagtgcagccgctgccggctgccctcgtcgcctcctcgccggccccggtcgtcgtcgtcgtcgtcctctcgtcgttcccggtcgtcgtggtgttcgtccctccgtcaagccgatcgcgttcgccgcccgcgtttcgtcaagtgtgcagcagccccgtcattgtcttcgtcctcggccccgcgtcgtcaagccttgtgccggccgcgtctcgccttcgtccaaggatcgcctccgaagttgtcttctcaccgttcgtctcagccgcgcccgttcgtcgtcgtcgttcgcacgcctcgtcgcgtggtggtaaggatcaatccttcgctgcccgcccttgtccttttggtgttgccaccatgcccgttgtgcggttgtcggccccggtacccgtgtaccggtgtcggtagtcgttcgtgtgtgcgtgtggtgaccgtgttagtgtgtccgctcggtagccgcgtggtgttacatgtgcagcccgcgtggtgtctagtggagtccacttgtcggccactcgcctcggttgacacacggggtctacttccgtcgacccgtggaccgtctctgtgtactcggtctaccgtgatcctttaggttgacatgtagagtctgcatgtcaacaagcgcagccttcctgtcttttccaggttagcgcttacacatgttttataattgcaaaacctaattataataatccgcaaatctccagataacagcattaaacttcggatgatcatatcttggtcatacgaaccccgaatcgacccgttcaagtctcttaatgtttgttataacctaaagaaccatgtgctttctttttatgtattgttatttcttctttataggcttgtagctttgcttgtgtgcttcgcatagcttttgtcgttccggaggttctcgaagcgtgggtcgcggtcgtcgccgaaggttcggaaggccgttatctctgagcaaggcaagtcgcatcacccttgagcatattgaatcccagtttatggctaggatgggttgggaactatgtcacgtattccgtctgtatgccatggtggtatgtggcatgtggttacacatgaggaagatgtgtcttgtgggtaaagatgtacacttctgatcagagtaaatctattcgaatagccgcgccctcggttatgggcaaacctagcaatgtacccaagttagtggtttacttcttaaaattttcttaacaactaaaatatggaatggttggcctgggttggcttgggacgagctgggacccaggtcgagttgccagttcggtctgaatcatcgtaggccttggattaaggcaggttcgtgtgggttcacggccttgattaataacactgtgtagctctaggatcgtctttataaatagctttgggcaactaagtgacttttaaatgccgtttactgcaaaacctaatcccctatattattaccccttgtacccccttacattaatcatgcatctgccggtgtggcttgctgagtacggtggttgtactcatttttgctctatctttccccccttcagtaagagaagctttggagaagaagtcttaaggtggagtactggcttataccccagttgagcgcctgtgaagatggagccgtaggcccgctagtccgctgctgtttatttctgtttgtcaggccttaagtgttttttaaataatgtaaacattattgatataataaagatgtgccttttgtatcatgtttgtttggtgtaccccggcttttcctgggacggggattaatacactagtgttcgggaaaatgcaaattttctcggtcgcgacagcaactgccctccctcggccacccttcggccagatctggaagggtggggcgctgccaccgacaccaccgccctcccacggcctccgtccggctggatttgaaagggaggggcgccgccgccactgccctcccccggcctcccctggcctccctccggccggatctgggagggaggggaggggagccgtgcagcgctgccgggggtgggggccgccgctgccgaccccgcgtgtcgccgtcgccattgttggttcccgccacctgagggagagagcgctggtggtgagggagctgagggagaggacaggtgaggagggagagagagcttcggtgagggagagaggagactgagacttagaaaaattttgatgcctatttatatgcacgctaatttttgcaggcagacaacgtaagaggtccacctgcaaaaataaagtggtccgcctgcgaaaattgatttttgcatgcagatagcgcgtttcaccagtttacatttttatatgcggccatttggctccgatgaccaaacttgcctgtgaaaaatatactcaacatcggtaaaaatgttttttctagtagtgaattataatgtttacatagctagtatagaatatagaatcaaccaaaaatcaaacatgcccagttagctagcctcacacactctcgcctgtcacccgagttggtggcttcgaagccccctcagagccaaaaaaaaaaattctcatgcccttgcaagaatctcactacaatccgatggttcacaaattgaaagttctagagtcaacattattttttagcaaatctggttttcaaatggccgcaattcataatctcttctcccaaaagaaaaggtattgataatatctcatctatctttttttagaagatcaatctctcataagtcatcctttttggggggcgatttgtcatctattaaattagcttgtatattggtcaccatttagggcccattttgtgaaatggatcccataatgtgttggccgggcccctgaacataagcattcccttaaccgtaacaccagaaatgttgaacctcaaatttgcaaaaccggattaaattaggtcctccgtcagtataagtatccggtttcgtagatgtggcaattttttcttgctagaaatatttgacgtgttaatttgacctggtccactcgtgctaactagacatgtggcaaaaagaaagtgggccccacgtgtcatcttcaccatcctcccttcacatctctctcctctgctttctctctctctcacctcttctcccttcattccagatgattcagatgcaatgtagtgatctgtggcggagccatcaagtgtgacggagggggccaacgccctcctatctgacccccccttctacgtatgaggccatgtaaacattcagtcagctcattagcaaatctagaaaaaggtcagccaagcaaaaaacatatctataaaattaattaatgggatagattagggaagcaacgatcaacgcatcatgctcaccacttcagtttctcacgcatatgcaacagcgatgcacgcgtgtctccgtcctcccatcgtgtcttgccgttgggcatgcaccgacgaatgtggcctgagggctgatctctcttgcaatatggcaatacctaaatacatgacttttagttttttttctatccttaatccattagattgtagtcagactgagtactcggtttgtaatttcccatcttttcaaaataaaatacaagattcttatttgtaagattactagtagtttacgttgaaacggtttagcaataactaaagactagtttcaaattgccagtgatattattaaggagatagaattgaagttttttataggaccagtttatgcattgattgttatcgacagtgaatatttggcctcctttgctgccgacactggttaggtcttatggcttatcctccaacacccccaacctcaaatcccggcttcgccactggctgtagtgcctcctgcacggcgccagatcagcgacgggacatggcaggcattcactggttgtcgaggtgaccgtggcgcagaacggcagcaacaattattggacgattgttgttgccttggccgcagcgcccaagagcaagaagaaggcaaggttgtcctacactatccgtatcggggaggggacgtacatcgagtggcggagccatcgggggtgccagagggagccagcatcaccatatccagtagcggagccatcgggggtggcggagggggccagcatcccctatccgaccccccccctctacatataaggccatgtaaacatttacaaaaacgtcagctaagaaaaaaacatatctataaaattaattaatgagagagattagggaagcaacgatcaacgcatcatgttcatcacttcaggttcgcacgcgtatgcaacaacgatgcacacgcgtcctcctatcgtgtcttgtcgttgagcatgcaccaacggatgtggcctgagggctgatctctctggcaatatggccataactaaatgcatgactttgagtttattttctatccttaatccatttaatccattagattgtagtcagactaagtactcagtttgtgatttcccatcttttcaaaataaaatagactattcttatttgtaagattactagtagtttacgttaaaacgatttggcaataactaaagactagtttcaaattgccaatgatattattaagtagctaaaattgaagttttttttataggactagtttatgcattaattgttatcgatagtgaatatttggcctcctttgctaccgacactgattaggtcttatggcttattctccaacacccccacctcaaatcctagcttcgcaactggctgtagcacctcctgcacggcaccagattagcggcggcgcacggcaggcgttcgctggttgtcaaggtgaccgtgtcgcacaacggcagtggcgattacaggacgattgctattgccttggccgcaacacccaagagcaagaagaaggcaagattgtcctacactatccgtatcgggtaggggacgtacatcgagtgatagagccatcgagggtgccggagggggccagcaccccctatccactggcggagccatcaggggtggcggatagggccagcaccccctatcccccccccctcttctacatataaggctatgtaaacatacggtcagcccattagcaaatctagaaaaacgtcacccaaacaaaaaaaacatatctataaaattaattaatgagagagattagggaagcaacgatcaacgcatcatgttcatcacttcagtttcgcatgcgtatgcgacagcaatgcacgcgcatctccatactcccattgtgtcttgccattgagcatgcaccgacggatgtggcctgagggctgatctctcttgccatatggcaatgcctaaatacatgactttagtttattttctatccttaatccattagattgtagtcagactgactactcagtttgtgatttctcatcttttcaaaataaaatagaagatgcttatttgtaagtacgttgaaacgatttagcaataactaaagactagttttaaatttccagtgatattattaaagagctaaaattgaagtttttataggactagtttatgcattgattgttatcaacagtgaatatttggcctcctttgctacagacactggttaggtcttatggcttattttccaacagccccccaacctcaaatcctcgccaactggcagtgataccagggcaaaatttgctacgggacacccaaaaatcgtgtaattggctgtgagacaccgcaaaatcgtgacactgctcacagacactacgaaagttgtgaaattagctgtaggacattggagacaatattttataattttcgagacaaaaaaggtcagagaaatttctaaaagaccggattgcccctacgcgccgtagcttgtaaacccgactgggtctagtcgtcgtgtccatctcccccacccgattttccctttcctccccaatccttaaccctagtcgatggtggcggcagcgccgacgccggcggcgacagattcggcgctggcgacagcggtgacggcggagacctcaatggtgcaagcctggtcgaaacagatgcagcagagctccatgtcgctcacctgagcccaaatgatcaacacagaaaactaaattacataatgtgtttatgggagcccaatctgaccgataacactgaaattgttcagcactcaagtacctctgagcatgcatcgtcattggtactgtcatcaccgggcaaaggggatggcagggagtactttgtgtcattcaggattttcttctccctctccctgttggcttccatcagagctgcttccaggcaggggcagatccaacgtgggtgcagaggggactcaagtcccccctacacccacaaaactcatggatacctccggagcacctccttcaattttttcaccatgaatgataaattaaaggttcctaaatggctggaggttgaagaaactatgtaattgagtcccccaattttttgttcctggatccgcccctgcttccaggagagccttagcttctgattcaagctcaccgatgaacttaagtggggatggccacaccggctgtgctgatgtaaggttcagtggcagagcatgggcaattcagcaaaatgacaagtcaagtttgagaaaaacagcaaacacctgtgaattcgcaaaatgtgttgatcatttgggcacaggtgagcgacatggaactctgctgcatctgcttcgaccaggcttgcaccattgaggttgtcgccgtccccgtcgtcctcaccgtcggcgcctgtgccgaatctgccgccgccaacaccgtcgactagggttagagattggggaggaatggggaagtcgggtgggggagatggacacgatgctgactgggtctggtctacaagctgcagcgtccaggggcaatatggtcttttagaaatttctctaacctcttttgcctcggaaattataaaatattgcctctggtgtcctacagccaatttcacaactttcatagtgttcgtgagcagtggcacgattttgcggtgtctcacagccaattacacgatttttggatgtcctgcagtaaattttgccaatgcggataaacattacctgcacgagctttctgttggaataaatgggctaggcccaatttaattcaattaaaatctcaagagcccacaagtaatgttagagagaataatactggcttgaaaatttaggtggaagaacctcaacttaaatagggtgatattagagattccctgttgaccggttgaggtgatggttggactgccacacgcatgcgcgcatgccaagtcggcctcggccgtgggcgtagcgaggcgaggcggccgaccgagccgagcctgcctgctgctcttccgttttgaaacagacgagaataaagtcaccattaacaaatgaaattcattgtgttgtaacctccacaacaaatgagagattcattgtgttgtaacatccacaacaaatgagagatttatttgttgtaaccttcacaacaaatgaaagattcattatgtggtaaccttcacaacaaatgagatttattttgtggtaaccttcacaacaaatgatatttatttgtgtggtaatggagatctctctctctctacatataacacaaggcagaggctctcaaagtatgtgtcttcctcctactattgttccttggcgatactctccttctgttcctacgctgtctctctgtttccccggttctgtttatcccacgtgcaagggtgatcggaacgagcaggtgcctccgaaactccgtccgcttgagaacctgcacgggtaggcgggcgatcaagtttttgggtggcgcttcaagcgcgactgctctgcatcatcttcaccaacatgtcgacaaccggtgacaacaccaacaatggagacaaggagaaggagcctctcgtcaacaccaacggaggcaatactgcctcaaactccagcggagggccattctcggggtataacgtttcactattaccgttcgttcttcgtttcctacaactgtctgtcgcagtattattgctttctcttatctatgttgttgcttattctatattaagcatgctcatgttgtacacatctagcactgtcactagatctactcaaattacaaatgtcatgtttattgtcttaatattttggattaaaatatgccgaattatgaccaaatttctaacaatccaaaaacttgataggtctttttcggtagttggctttgctgcattcctaaaaccacatgcttttgatggttcaaattataaaagatggaaagcacgtacacttttgtggttgacggcgatgcattgtttctttgtctcatggggcaaaccgagtgaaccgcctctctcacctaaggaggaggctatgttcgaggctgcggattgcttgttccatggagcattgatcagtgtgctcaccgacaatattgtggacgtgtatatgcacatgccttcagggaaggacatgtgggatgctcttgaggccaagttcggggtttccgatgccggcagcgagctgtatgtcatggagcagttctatgactataagatggttgatgatcgttctgtagtggaacaggctcatgagattcagatgttggcaaaggaacttgagaacaacaactgtgagttgccggacaagtttgtggcaggtggcattattgccaaactgccaccttcttggacggactttgctacttctctaaaacacaagaggcaagagttcagtattactgatcttattggctctttgagtgttgaggagaaggcgagggcaaaggacaactggggcaaaaagatcgagggaggttctagcgccaatttggtgcagaagaagaccctcacgcatcccacaacaacaacaagaaagtcaaacccgacgtcaaacccaaggctacaaccaattttaagaagaaaggcaagggaaagacaaaaggaggttgctttatgtgtggcaagtctgggcattgggccaaggattgtcctgagctcaaggacaagaagtctgcaaacatggttattagtgcgggctgaggaacatcgaggtatggtaaatttttacctacagttctctctgtctatcactcacctgattggtgggttgatactggtgctaatattcatgtgtgtgccgacatttccctattttcttcttatcaggtcgggagaggttcctccttgttgatgggaaatagatcgcttgcggctgttcatggtgttggtacggtcgatctgaagtttacttcgagaaagatcgtgcagctgaagaacgtgcagcatgtcccttcaataaagaagaatctagttagcggctctctattgtgtagagatggttttagacttgtgtttgaatccaataaatgtatcgtatctaaatatggaacgtttattgcaaaaggttatgacagcggaggcttgttccgcttttccttggatgatatgtgtaataaagttgtgaaccatgtaagcaatgatgatgatgagtctaatgtgtggcattcacgactctgtcatgtgaattttggttgtatgacacgcttagccaacatgagtttaattccaaaattcactttagtcaaaggctctaagtgccatacttgtgttcaatcgaaacaacctcgcaagcctcacaaggcatctgaggcgaggaatttggcaccactagaacttgttcattccgatctgtgcgaaatgaacggcgtgttgactaaagggggaaagaaatatttcatgacactgatagaagattgcactagattctgctatgtgtacctattaaaaacaaaggatgaaacattacattgcttcaagatctataaggctgaggtagaaaaccaattggaaaggaaaatcaaacggttgaggtctgataggggtggagagtatttttccaatgagtttatttctttctgcgaaaagtatggaattattcatgagaggatgcctccctattcaccccagtcaaacggggtagccgaaagaaagaaccgcactctaactgagatggtgaatgccatgttagacactgcaggactttccaaggaatggtggggtgaggcaatattgactgcgtgtcatgtcctgaatagaattcctactaagcataagaaagtaacaccattcaaggaatgggaaaggaagaaattaaatctctctcacctgcgcacatggggctgtttggccaaggtaaatgtacctataaccaaaaagcgtaaagttggaccaaagaccgtagattgtgtgttccttggttatgctatccatagtgtgggatataggttcttaatagtaaattctggagtacccgacatgcgtgttggtacaattactgagtccagagatgccacattttttgagaatgaatttcctatgaaaaatgcacctagcacttctagtcaagaacccattttatcccctaagcactttgtgccgatagaacatattgatcaaacgcttgaggaaaatcctgaggaggataacattgtagcaactcgaaagagtaagagacaaaggactacaaagtcttttggagatgactacattgtatatcttgtggatgatactccaagaaccattgaagagacatattcatctcctgacgctgactattggaaggaagcggtacgcagtgagatggactcaattatgtctaatggtacttgggaagtcgtcgagcgtccatatgggtgcaagcctgtaggatgcaaatgggttttcaagaaaaagcttaggcctgatggtacaattgaaaagtacaaggcaaggcttgtggccaagggttatacccaaaaagaaggcgaggactttttcgacacttattcaccggttgctcgcttgaccatgattcgagtactactcgctctggtagcctctcatggtctactcgtccatcagatggatgttaagacagctttcctcaatggagagttagaggaggagatctatatggatcaaccagatgggtatggactagaaggtcagaagggaatggtgtgcaagctgttgaagtccttgtatggtctcaaacaagcgcctaagcaatggcatgagaagtttgcaatacacttacatctgctggctttgttgtgaacgaagatgacaaatgtgtgtactatcgctatggtgggggagagggagtgatcttgtgtttatatgtcgatgacatattgatctttgggaccagcctc

SEQ ID NO: 8632 - DNA, 11293 bp, Oryza sativa
tgagctccgtcgccgctggctccctcgtcgcttgcccgcgaggagacgagaaggcgagaatgatacgcgaagccgagacggagtgtcggtttcgagaaaaataaggagaatatatatgggagattgggagtgcgacaacgaggccgccggggacgatgcacgcgcgacgccgaggggggtcgctaatcggcgcctgggcgcgcgctagctgctcgcgccgtccccattgctgccggcagtaagtaaaaactctagatcgtgttgctgtagaaaattaagttgtatagtgtgtacaaataaattatattatattttgtaaaccaaaataaaatgacttcctatgttttatatagttaacacatgattgtaaacataatgcaaagtgaacatattttatttaattgatacttatgaattttgaataaaaacaattgagattgtagggttttatgagagaaggagaggagactttttttatcatatatctatcatccaaaagctaaaaataattgcaataatgtggcttcatgagagaagagagaaatagcattaattacacttagtggggatgaactatataagcatatacgataatgcgtacgatagcttaaacaatataatataagtttacataagttaatgtgatttaaatttaaatagtatgtggaataataattcaaatgtaaaagtaaaatgatgtggctctatgagatagcaaagaagataatttagaccatacatctaagggataagaaaattatgatgatatgacttaatgggaagaagaaaagataagaaataatttgaaccatagattaatcatttaagaacttaaaataattgacgtgatatgacttaaggagagaaaagaaaaataatataaactaagtaaaaataaactatacagatatacaggatattataaaaaatgaggaagtgattgtttgaatagtcatatgtagatcctattgtttgaactgcacagcaaacaatgcaaacaagcaacaacttcaaagctctagatccaaaccacaagcaaggaggtgagctcaaacaacaactacacaagcgtagaacaaagcaatgcaacaagaagataaagagggaggaggatatcaccaagatttatgtgacgatatattttccggaattcaaattcttgacggaattttcgttgagaagcacacaaaaacagagacttttttaatcctattctcatgaggttgcacaaatacattcctttcactaatggtatctttttcttgcggaggtgagatccggccttcacaaactttctttggtagatcggaggcacaatagcgacacctagctgtctatactgttggtaggtgaaaactttgacgtttaccgttatcttaaacttccataacttcttgtaagggaaggaacaatctactccctccgtttcaacttataagatgttttgactttggtcaaagttaaactgctttaagtttgattgagtttatagaaaacaataataatattttcaacccaagataaatttattataaaaatatatttaactattaatttaataaaaataatttggtgatgtaaatattactaatttatctataaacttagtcaaaatatcttataatctgaaacggagggagtaatttatatccaagctaataaagtatgccacttggacgttccattattttctcatgggaatattattccctattcaatcatatggataattgggaatttcatcagtgtcctcatccaatcataaaaaacatacaaccctaattaaaatcagccgtacgtgcaatatggcctcttttctcagtcctgtcgtcaaattaaaatcagacagctattcatcaagagtcagttggccaacttcgcccgatgctaagattcaaaccgaattattaaactcaaaacacaagacttaattcctagtatactagtacatggtaaacactatcaattccagtttttagctaccctaatcaattacactggctttcgtctgtacatgacgtccaacataaccatcaacacggacgattgtctcaaacaccatgacaataaccaaggctaaaagcttactaattaattcacccaaattaactgcatagatctcaaagcaaacaattttttttataccagtcacaaattcacaattgaactctatgcagttttctccagaaatcaaagggttaacatttgtcaccagtcatgagttgatgcgtacatagtggtctttgttgtaaggccatataaccgtatacattggctccagaagtatatctgtgctgaaggaagcaagtgcagcacagacaacaacaatgtgcaagatcttgttaatttgaatgcagtctgcactctgcagggaaattcaaatgattactttaagcaagaggagggtgagggttaaggcaaattgcaccaaccgcatacctcctcaagtgtagtctgttaagagcattatgtgtttatgggtatattggcaattcccatctctattttactcaatatatgacctttgggctaactcaatagatatagttcaatccccaaattccctaatttcctcaaattatgacatagtcaacaggtagatcatcaatatggacatctagattctcccttgctgccattttacattgcatacttagctcctcgctgcaacggcgtacatgcagccgtgtcagcgacggtggaaggcccatctccgggagcctcgcgacgccggggcagtcttcgacgtctaaccactcgagggaggccagccgtcgtaggcctgcaggaagcgaacggagattcggcaggtgccagaaatcgaggcgatggagggaggccaggagctggagagccctctcctgttcctccgtcaggtcgatcatcgtctcgccacgcctgctatcccatgaccagaaggatagccgtcgcagagacgcgagccgtctgcagagaggcacggtgaggacggagccatcgccgacctggagggtttccagtcgggacaagatctccgcagaggccagttgctgatgtgacagaagctccaagaatgcaggtactccaggtgagttggataccgccagggacctaaggtttgttaaggagccgaatccctcgatcgaagcaagtgagccgcagtctataatcttcagctcccgcagtgccttggagtatcccagctggagagatgtcagctctggactctgccaaatgtacagtgctgtgatggttgggaacaattgcagcaaacgggactggtccttgtctgtgaggttagagatatcgagttcttcgagtgacggatgaggctgcagtgggataatctgtccatgctcctgcagtttgagatcccacgcagcagagagctcaggactcatatcaatctccaggttctcaagagatggtgggagtaatgcaacatccaccttatcactcatgaccaacaacggcatcagcttggggcaacgctgaattcgaagacgctcaagagaggtgtatcctaggagtactctctcccctgcaacaaactccagttgggcagttggagatgtctagccaccttagagaatggatgatattagatggaatttccaacagctgtttatcatctctggctaagggccttgctgctgtagcttccaaactgctcatgccttccttctccgcagcttgatgactgaacgaaacaaattttagttgtgggatctcgtgtaattccaaactatggagggactgcacatgagaaagcatttctgttaaacaatgccctgatatgccacatgcctgaatggagataaattggagagatgggacgacaaagctgcttggaatgatcaaattagggcagttctttatatgcaatttctctaaaactgtgcactgattgagaccttcagtagatagagagactaaatttgggcaatccactagacagaatgatcttatgcgcgcaaagttatggaatgatatgatcttgtcatcaagcataaccaactcttcagatttgattttcaaatcatatgttaactccattgttggaagagttggaatcccgctgatggagaagcgccgcatctgagcagaaaacgggagaggatgtgaaactaccaaacgaggacaatcatgaattgtgagatcatgaagaccagatagcgactcatttcgatctcctaaggaagtggaaatttgcagggatggagaagttagcccactgcaatattccaggcttgccatcttaatcaaaaccaacttctccagtggaaggactaacaactctttgactgcatgcaggtgtactaactccaactccttcagtgattgcatctctctcagaggaagtatttcccatttgctgccatatcatttacagagaatctaagttattaaagaattgaaataacaactgttcaggaaaaggtaaagcaacgaaacaactgctataccttatatgaggacaacacccaatggtgagtttgtttagagatggaaaccatgacttctgctcggttctgaaagaagagaagctctggaaaggagtgaactcattcaattgagggcagtccttgatcttcaatactctgagacgggaagtcaattctgtcccataagtaccaaagcacttctccaatttcggcaactcaattaaaatcaacttctccaaagagggaattgagagttccactagattccacatcttaaccaatttcaattccctaagcactggaagcatttcaagagatccaagaattcgccactccctgcaattgacaagatgaattgtctgcagtgatgtcactgagagattactagaaagccatgttggagatgtaggaccagtgtaaccagctatacacagagctttcaggttatgatgtggttgaagaccctcaagcacatcttttgtcctctcaggttcaaggctcatgctgccaacactccatgacaagaacaacttttttagatactctttatctataagtctggccccgttggcttcatctttagtcttcacattttcaagatgagaaattacaagagttacaagcttattcatggattggagctgtcttatatcaaaaccgctaatattttgaaccttgaacttaagtttttgaagagagatcatgttgcccacaccacctatcgaaaagtgcactttagcatcagctataagatggcgcaacttaactagattattcatagcagcaggcacagaaatatttccagagaaccccacgtccaacacttgaaggtgataaaaacttgtcaaagctcgaggaaaagcagcatccttgtagtctccatataccaacatatctttagtctccgagacacgaataaattcaagatagcggagatgatgaggatttaggaaagtatgtatagcactgatgtcagcgttcaagacgcaaactcttaacaaccgtaaacatttggcttccttgcatacagtttgtatggacttcaatagatatacactgctgcttccaaaaagcatcaagctcctcaacttttgcaaaggcctaatcttttgtaatatctcatatttctcagtgggaaaattggtatttttatcattatcatcaccagtggttatgatagacaaatgacgaataccttgtcgaattgtgctagattgcaaccctcttaccgtataacattcttttgctgaaacctgttgtgctaaatcatgcataagatcatgcataacatagtgccggtcaaccttttggaaaaatccaaaatccaccaaactacctagctattgcaaccctgtctcctccaaccccttgcctatatcttcacattgcacaaaattttgagatatccaaacctgaaccaaagttgctgcactaaacgggtgatcctctgggaataaagaacagtaggagaaacagcgctgcaggtgagaaggtagataatcatagctaagtttcaggatgggtataaaatcatcatcttttatttgaagagatttccatttgtctcgaattgtcctccaatgttcatagctaacatttctgttcaaaagtgcaccaacacttcgtgctgctagtgggcagccctttagtgctttagcaatttgtcgcccaatggattgcaaactaggatcaccctcgtagttttccttgccaaacgcacatgctttgaagaactgccaaaactccttttcatccagaccactgatttggaatgcattcactgttcctatcatttctgcaactgagttttttcgggttgttgctagcaccatacagccggttacttgactatgtttcaatggagctaacagcttatcccatccactcatgtctttttccttccacatatcatccaatacgagaagaaatcttttatctctaatattcttcaaaagaatctcctgtagtacattgaaattgctaacatctttgaattcctgtttatcttgtttatcttcaaatatatgctctaagatctcacgtgttatgtccacttcattgaagtaagtggatacacagatccaaattcgcaaatcaaaatgatcaataattcttcgatcactgtatataaatctagtgagtgttgtcttcccaataccaccaatgccaactattggcaaaacacgtagatcactagattcctcatttaataatatctctattatcctgtccctgtccgcatccctcccgtacaccttaagttcaataggaacagaagttgtcaagcgtgtgttcctgatcttgctttgcctctgatttgatgttaaagctgggtgtgagacacctggtagaagaatccccctcacagaattgccagctttctgtaaatcgttcactattccattgatcctcttagaaatatcaagtctgatctcaagaggcagcatggtgcaatgagttgtgtctccctctccttgtttcctttttctacaatatgaggcccaaacagtaatttggctcctggcactgtgtagtagttgataaggagaaaatggagttgatgaagacgcatagcttgcctcaggataattagcagcagcagcactgcaaccttcgcctgcaaaggaaacccagtttgttatgggaacctgaaaaggaaagtcgcccaacttcttaagcaaaattagatggactcttgcaactgtgaatctagcagaggttaaatcatggattaaaaatataccggaactaaccaacatataaactgagatatggttcctatgttctcaactacaccaatacaagtaagagaagatcatagaacaagacagctatatatctcaaacctttttcaatctgttgttgtagccggtagtagtcaagctcatccataacgtcttctgcatcataaagcaactcccttagaacatccagcgactggataagtggcttcttgtcaatcctccttccctcggcagtagcaagcaccatctccacgttcctcatctcaaattcaagcttcttgacaccttcggtaagctcaactccacgaatccaggcttccatctgctcagtgaagaaactcccgaggatgctttccacaagccatccaattgcagcttctaccgtagctccagctaaccccatcgtctcatggactaccgaagaccgcagcgacagcagcacagcagcaaccttagcataagggagaaaccaagcagatggattcgatgggagaaaccaagtagttattgtcttggctccctaattgtagtaataaactaaatcaataatatactccaacaatagacgtgtctgattgttacctttctaattatatatatttacacaaaaatatagctatattaaaaaaaaacatgagtctagatcatccgctggtattcttcaaagcagtttcgcggaagtcaatggtatttcattgtcagcaagggtgtttattagaatataatcgttttatcttatcagaaggatgctaataccagagcatcctatgcagcataatgaaatggcgcactggatatggtctactctggagagaagggtacttttaagaaggaaaatggagagaactaatacatgggtgcttaatggattaatacatagcacttcacattaggaatactcgaatataatctatgcgtttggctctcatgatgaacatcttactacctattatcttttgcaaattgcgtgcagcagacaacccaagctagtagcttgcggttgcagaccggaatatattccggattgataccaattatataaagtataggagagcccatgttctaaatgtagtcagagttgtcaggtcgatcagaacaatatatccagctgtctacagtaggcatttgttagttcccaatgggaaagtggatgtgtggctccttttagctatgtctttctcttcactatatgactagtgaacttccagcacatgcacaaactactctacacaaacctaaattaatatatctacttgaaggtagaatcgcagtcctaaatcctaattagtacatatgtagtaccttgcaatagcacatagcacaggggaaattatgtaaatcctgcccctagtcctagcaaaaactagacagaatactaacatgcctgtgtgccacacaagctccagtctgctctgatcatgaatctacaagagttttccccaggctccgacctctgccaccgtgcgcccatcaagcaagacacatgcctgctcttcagcactaggcattggagaggagcaagttctattcctgtcttgccatctccagaatccagatggcatgcttgcggaacacaagccagttgattatccacaaatgtcaaatctaagtgtgttaatttggacgatgaagtgtagatactccctccattccataatataagacacaaccactttttttagatgttccataatataaggcatgcatgcatgtaggcaattaactatgacccattctccattaaattattactttttaaaatcctccactctcatattctctaattctattggatgcatgcattgtatttattaggatgatccaaactacaagatgataataattattttttggtctttgggttaggggtggttataccttatattttggaatggagggagtactatatagctataatcactctgaccgcattgagagggtacagagtttcccttggttggaccagttggtaatcctgaatgaggagcaaatattgctagccatccaactattcaaggatccgtcacgaacgaaaagaaaaaaatttctcaaagtatcaaaactggacttactgataagatgcatacctaccaggaatcaccagaggcttacctatgtgtggccatttgccaggctagccaagaagggtgctgtctgtgccgggcaaaatgatgggagattggagagaggcgttggtcaggcatttcgtcgaacgtatgtagggcgcaccgtcaacgtgcgtcgagcgagcacctaccctcggggctcggggcacggaacagcagaggcgcgtggatgccccccgcgcgcgccctcttcgatcggatggcgcccgagatgcgccgcgcccgcgccctcttcgatcggcggccgcggcgcggggggagccggtgcgaacgacgacgaggtctgcagctgcaaggtcgagagtcgagaagctgcacggtcgctggctgtgcgcgaccccaaaaaaggccggaccagtgaatcatgggccaaaaatggggtctcggcccacgagcaccatcgttagatcataagactttcaggaaaaagtatacttttcctcaactatcgctcgagtatgattcatatcctccaaccataaaaccggatatattgactcctccaattatcaaaaccggtgcaaacaatatccctagggacacaggtcgtctgcagtactgcacatgcagtgcagtactgtaggggatctcaattgatatccctaggtggttttggctgacgtggtacctacgtggcgcttacgtggcattagaaaaaaaacaaaataaaaaaatatgtgggacccatatgtcattaaaaaaaatattgcggaacccacatgtcatcctccctcattcccttcttcctccctctctctctctcccttagctctctctcccttatagctctcgagagcggcggtgggccggtggctgtggcggtggggacgggtcagcggcaaggaggtgagacggtgactcgactcctccctctcccggctcggtgatgaggagaggagatggcggcggtgctccaatcgtccctcccttcctcccagatccgtcctccggcggcgggcatggggtggaggagcagccgacggcggcggccaccgtaaaaagcactggccctacccctcccagatcaggacggagtaggggagccggctagcagcggcggatggaggaggagagtcgtcggccggaaggggaggccgctggcgacggtggcgggtaggggtggtggcagtgtatttatttattttattctctgaaaatattttcataggcgggtggatctaccgcctgcaaagatggagatgccgttgcgtgcatgcgtgttagggttaaggataaggtatactctctacccttggatatacgttgtacactgatatggtatacctgcgcgtgtgcggatgtttcctgtacacgttaaggaagttcattatgtaaccaaaacggagtccacggatggaaggagtcctactcgggcagaactgggtcgttaccgtatcgtgtggggtccgatgtctctgagttctacttggagaccaactgacccgcggtataaaagggaccccccgggaggacctaaggcatcgaatctcaccgccaatacatccaccacagcctacgaagtcggagcctacaggagccaaatcgttgggtgatctaatcgaacctactcgactatggtcttgtcggtatcatcgagttttgctattccctttgtaatatgtggttatcatcatataatcccataccaactggattagggctattacctatcaaggggcctgaaccagtataattactgtttcatgtttgcttgatgtcgtactacgtagatcctcgtaccagcgtaccccaataccctctatatccggtctacgggtatacactgtcgacagtggcgcgccaggtaggggaacttggtgcttaaggttctactactatgtcatcaagcttcgtcgacaacagcgtcaaccccggcattaaccaaggagtttcttcttcaacaatgctggtgtggactcaagtcggcgaaatcgtcttcccggtttacaccacggtgccgatctcgactggtccatcaatgaccggaagcgagaacacc

SEQ ID NO: 8633 - DNA, 12399 bp, Oryza sativa
atgtgcttcaattgcaggtttatgctgtttcatcaactgtccatgctgtgagtagacatatagaattataatttccttttatacttttcaaaattgactaatataaacttctgatgctaataaatttgtttatctgttaaagtttgctgtccgtcttattttactcctatggagactcgagctaccctgtttcccgatgctggtgattgctgcttgcaactactgtgagtttgtaacttcgtaatgttgttgtagccataaatttgcaatatataatactttgttgtttgtttcatgatttactatctgccttttattgtaattcccaggcacatcaactgcaatgttatttgaaagggtgaaaccatcccagtcaccagatagtttgaaagcaaacaagattatcgcaactggtgctgcttttggaagctatattgccctgagtacagtcgtttttttcataatgactactaggactgacttcatatctgtaagaacttgtcacccttattatttgtgtgattttctagtaccaaacctaattaacagtatttgacagcacataatcaaagctagattgcttgttggccatgatgaggagattaaatctgccttattccttcaaatgagcattgttaaccatgctattggacttttcgcacattcacgcgatggccactgctctgggcctattgttacaatttcttctgttctatctcaactggtgagttattcccctgctcaatttccaccccaatgtgatatgtggcttttattgcaattgatttagacaaccacctgccaattctcgagtacaatgaacttgcaatattcttgttcctgtgtcctcagtcctaaattggctcagtaacactgatactataatcagaggcaaattatgtttctgaaacagatttgtgatgtggacataacatagtctggtcactgatcaaaccacttgacatgaacaaataaccatataaccatttctctttgtgtacaaagtatttgattattgcttgcagctgtagtaaagtatcatgccaagcttaatttttaagctcaatacatgcatgggttactgaacaaacttattttcaggtggcaaccgtcattgctgtttatggtgacgtgaactctcctctaccaaagggcattggctggggctgggcaggatttatctggctctacaactttgtcttgcttttgagcctcatgttgatctgtatgtatcggaggatattttatttgattttttttatttacatcttttgaagttggtgcatcactgcatgaacctaaaaacttgatatattgtctttcactgcttcatctgaatgcacagtagtgaagccttattgtcaagcactcaagcatgctcaccttttacaatcgtagtagtgaaatttgggagttgcatatctgtcaagagttcaatttagtctaatctagttgtcacgttctttggcaggtgacctgtgtaaccttgcaaagttcaacatatttgggataacctgcaggaggctgttcactggttggaccgagtggatggagaggtgcaggaggctgctcaacaggggtaaaacgtggatggagatgttgaccttaactgctatctcaggcttgattcttgtctggtcgatatatgcatatcatgtcatgaaggtcccgcagcagtagggtggcacttgacaggtagccttgacattaacatatagctttaggtcgcaaattagtgactaagcaatgtagcaatgtatattattaacccgtgtaaagtaaatgtcatcgacatggttttgtttctgtctttttcttttttcttttcttgggtccgggcttctactgccgtataattttgataagagggaagtatatgggtggtcaacttgtgcggatgtgtcattcgaatctgaactctcaaaatatattttgggtatcaaacttgttttgggtgtcatgtaggcccaaacgagctctgacctgttttatgcacggatgtgacacaccatactgatgtctattgtctacgtgttagtgggacctatatgtctatcatatatatatatatatatatatatatatatatatatatatatatatataaatataagtataagtaaagtcatattttctcctcttaggtaaagagggaaaaaggtaaacctaaaaaaataattctaaggtattgaggagaaaatatgttttttaaattttatttttttttctatgtgactgacatgtgggtcccattggatacgcaagcgctactatggcatgccgcgggtcaaagcctgtttagacctatatgataagtttgaggattcgaaaatatattttaagagtttaggaatccattagaccactagtgcacttcacccttttgagaaaatctaagaaatttggatgcgattaggcattagacgtctgatctagaccaaaatgtcagacagttggatacttggatgatcaaatgtttcactagattgtcaaaatggttcaatgcaacacatgtgaaaaataatagtgaaatattacttaaaatagtataatcctgccacatttacaactaataagttgcggaacatcacaaaaaaaaaatggtgtggaacatttttgaaaagaaaattgtgctacatctctaaaaataaattggtgcaatataaaaataaaatgcagtgaaacattccaccacaacattcaactagttttactcctcctgttccaaaatataacgaccttttatgtgagtagggccctagatgtgagtgagacggttagagggtgaaccatcaacaagaaaattatgttactcaattgtagtcaatgctttcttttgtgtaggtgggtgtgtggggtagcatatcgatcattcctgttcgacgcaaactatactcatccttaacgtattgccatttgcatcatatgctcacgacttctcttcctggacttccttttcttaatgcaatttttggggcaaccaattttttttttttttgtaaccagttttctgaaaccatcatccatcctgaatattgcaggcatttcaagaatggaatctgtacgcacggctgagctgagtcggtttcaaaagcaagtctaagaacagtacatgtctaacgttgaggggcagtataggtccaaagactcgatgagttgctgagtgtgcgtaatgacgattaggaacatgctgaggacatggccgcgcagaagattggagaagacatgttcaaattcgtagtacgagatagtgtctaataaataatgcatgccgtaaacttgagttcatgattatgcacctttttatcaactttggttagagattcacaaatagaatttagtaaatgtggggttctttatcttgtggtggtatctatagtttgtgtttgctttatgttatatcagtgtgtggtgagattgttcttgcgtgaattttgtaataattggctgtgaattttataataattggctgtagctcgttgagcaaaggctggtattattatctaaaaaaagggagattgtgactaatcgcgtacaagttattatattttgagacaaacactactacgaaaaccatctttcatgacggctattttgggttttcgctggcggtatttggcaccgccataaagcaaaggccagtgaaaatatagcatctccgctgacagcgctaaaccactagagaagataacttttcgctggtggctggttaaagacaaccactagcaaaaatcgttttcgctggcggctttcgtatgtgggccgccagcgagaatagtcttcgctggcggctgacttatgtgctccgccagcaaaaaaaatagtcttcactggcgggccgccagtgaaaatgattttccataaagaaattaatcaccaaaatctcttttcgcgaaaaagagaaaataaatcagattttccacggcatgtacagattcaaatccacatccaaatttttgagcatcgattcaaatcctcatccaaagttcattagattcaatcaacatgcaagtgaacacggcatacaagcattttgaacatgaaaaaaaaaaaagaaaaacagcatcaacaggagagaggaaggaggtcgtcgtcgccgtcgccgaccgagcagcaccggagccccatcgccgagcatcactgccaccgaggtcctcccgccgcaccaagccccacagcaccggatctgggaagcccagccgccagcgggaccgtgggagggggaggtggagggggaggaggagctcgccgcgcccctgtcaccgttgccgtcccgttgccgccgcgtcccccgacgactcatcccgtcgccatcgccgaaccccccgacgaccgcctcccgtcgtagtcgcgcgcccacctcccatcacggtcaccacctgcgcgagccaccaccaccactgccggagccgctgccaccacctgcgcgagccgccatcgcctgtgtatggggagggaggagaggatgctggtggctggatctggaggaaggagatgcgcgcggtagcggcggcaggtgtgagcagagcggaggaggaagggcgggtggtggcggtggcgggcgtgggagcgaaccggaggaggagcgaaaccggcggtgactgatgtgggagcggagaggaggaagcgcgtgcggcgatagagaggagacgaggagataaggttggggagagaaggagtggataaggagtggctggtaggcggcgattttttgtaatgggtggacgcgcgcggttttttttttaagggcggtgtttttagtaaccgctagcgaaaatgagattttctctgacggttagttaagaggcccgctagtaaaaatatggttatttttgcaagcgtattttgaacaaccgctagtgaaaatccacactaagtaaaaataggtttttttttcaagcggatttcttaagaaatcgccagcgaccctccaccccttgttagaatttcacaagcggatttctcatataaccgccagcgaaaataataggataccgtcatgaaaaatcgatttttctagtagtgaaatggactaggaacaagggaaagtttcacacattcgacatccgcttcagtcgccttccttttccgacgctcatgtatggagaaaatccaagaaatgacattaacaagtgctcaattccaaaaaaaaaaatgccatcgacgagtataaattctataaaatgccattgtacaaacgatttttttctagaaataccatcgccgttagggttccgtccattccgtgccgttaaatacactattcatcctatagcacttaacggagggttgctaacggaaccctagacgtttgtcaatggtaattcttgaattttctccttatgtacagtgacactcaagtttttccccgctggtatcaatcagattgttgcgggatgtgacgtcttgataacaatctgttgctgtataccatggagaaggctgtgaaatgtctttacattatacatgcatcatggataatatgcaatttgaagcacataaatttagaaccgttttgcaactttagagtgaaaaaaagacgcagttgtaccgagaaattcgttggatcttcacaacaaacatgttgagcgtacaaacaattcgaatggacatgctaattctttacaagatctacacatgtgggatcgccgctatttactgttcggtctcgctcagggaaaagcttctccaatacaaattgtctaaatcgtattgaatacaaattcggatcaacagctgataccgaaagtggatcgaacttcagtgatttgagagcatgttcaattctgttagacacattatactctagtagtatgttgagcgtataggacaacatcatactcttcaatggtgtccacgttttctagttctatgttgttatatatacacgcacacttttcgagcttgagtaaccaattgaccatagctgaacacggaacctgaaaaatgaaaataaggaaaaatgtgtcaaaaacagaaggcaatctttgtgagaacaaagaaccacgcagaccaaagtttccaaaataaaaaaggggattttctgcccttatgatatgcaactacacccatcaggattagcacaagtttaagaagcacactactatatagcaggggcatagacgcaaaaaaagtgcaaaaccaccatcacatgtgcaatacaagaagacaagcaatgtatattactgatattgccaaatatatatacacaaacttgtcatttttttatcatgcacaaatatagtcaacttttgacacctcttcaaatgcacaacttataatatgctctacatctatgaatgcttcaagaatttgcacttaattacggaccaagttaaagggtttaaagctaaaggctgatctaaaagttaaaaattcaaataacggaccaagttaccaaaaatattgaactttgcaagtaatacaacttcctcattgtattttgaactttaaacatgctaatatacttagaaatctttcctgaagagtgtgataactatactagatattatctcaatttgtgttctttcatttatgcatgttcaaagaccatacagtaataaatgtacccaatgctgacttgaactttgaaatatttgagatagaagtaaatctaccttccagggactcgcaaaacaagatcaattccttcataaccgccttttgttagccttttgttatgtgtgaacatatcttcctctttaaaaaagtgaccactcaaacttttgctgattcttcctcttgaattttctgtacacgaaaaattactgttatgacacattattctcaaacgaaataactagcaaatcacataataccttcaattttgaaaccaaagtagccattgagggacgatcatctggattgttaacaatacatgtatctgccaaaagtatcctgggacatttcgtggggctccactctttcctttctagtaaaaccagttctctgatgagatttccaaaacagaagacaccaattttttcctgggcactctctgttcaagtacacagatcattagttttaataagaacatattttggaacataacaaaatagtatagatgcaatacaaatctaagtatacaaatacaaatggtttggagaattgaaagatgacatttcatgtcttaatgaaatataggaccagcacccagcaacttacagttgcacgcttctgttagctctatgagataacaatgaatctgctctacatgaaagaggaagacacaaattcttattttattattattattttgcttggttactcatataactaatgcatgaacattgacgaatatatctacacttaaaaacaaaaataacaatcttaaactttcagatagaaactaaggactattttggatgtctgaggcaaatgcatgacatattatcttgaaaaagaatatcccccataaaaagtgagttgaaaaagctagctgataaatctagtaaagatgctagatccttctacttctctaactctattatgctactgaataaccttttacatccatctcccttctatcttgtgaaattcttcaattatgaactttactatcttctgaacttgatgtatgatgccaatgccatactaggtttagatataggacatagtattatagtttagggggaagtatgggtgcattttcttttatggctatccaaagttaagatcatagttaatataaggcccttcagggctgttaaccttcactcgcacacacacagaagtgcaccatataatgacttagaccatctaaaaaatatatatgttgcttggtcttattagagttcagacaaaaaaagcatacctttatcatttgcattaaagatgccaaatcttctatccttgaagaaactcatcttctctcccttccttgtggccaatccaaaatcagcaattttaactgtattatcctgaaattgttatcatttattagtcaaagtagacaattacatggttctctaacagcaacacatttttcccgtaataataaagtattgactgaatttcacaaaagtaaatatactttaaccaaactgttgcaaactacatatttaaggtgttgtatcacaaactgcagcttcagcacaaaaaaattatcatagaactacatatttaagaccaggtataacaaaactacatatttaatattgaagttatcaagaaactataggttttagagtataaatccctagcacgactgatatgtttgagctataaacattgtagtctttgtgattaaattggtgctaaatctgtagttttatgatacttttgttactaaatctgtattatcgtagtacattgacttaaggctgtaattttctgatagtttggtcaaagtatatatatatatttttttgaaatttactctaaattattcgtaaatacaacaagaatttcaccttcatcaaaagaatattcctcaactgaatgtcccaatggacaaagcctgcagaatgaatagcttccagtccagatgccactccaagcaagatagcatccaactcacctttattggatgctgttagtagcaaaatcaataccaatcaaaataagattagattggaaaccctaaaataaaaaaagagcagtaaaatttatttacctctgaatccttcgaggtcctgtttagccctttcataaactagagcatagtactcctctgtgtcagcaaaacccacaagatttatgacatttgcatgtgaaattgaacttagggcattgatctctgctgcaacaaaacagggtgcaacaatttattgacaggtcagaaacttaatcatttttaaatcaaataatggtaatttcttttactgtgtacagacaaccacaagctacctagacacatcttatataataatggaattcaggcaatatatatatatatatatctttcaaatatgcacaatctacccaaacacgcttgaataataatgcagcaaatgcattactgcaccaattaatttcatggcaattattaccttccacataatccggacatactcatccttccttttagaaattttgatagcaacttttcgagggcaatttgcatagttattccctttattcctgcccttgtaaacctgcccaaaggctcctggttttccaagcaacctcttctctgagaaacctttagtaaacttgtgtaagtcttcatcactgaagttgataagctccatcattgttaattcctgataaaaaaaatgacagaaacataataaacataaagcaaatagcatggataatttgggagacctagagacagcacaacattagaacacagtaaagtaaggggtggaagcctagagatgattggattccacttttcacgataactcatacctatggtgtagatgaagtgtatggaggtgagctcagttgctccaaaatcccacagtatgtagcaacggcgtaacagcagagcaaaaatccagaactccagatacaaaatgctattgttttaacatggacaacaaatgggcgaaggctaccccgaggattacccctcgtagaagccctcgcccttttgccctaggggccatgtgagatgagccaaaaacttgtgagatgtgttaatgttggtgtctaagacaagaagataaactttgtagaaagatagtagagtgaagtagatatggagaccatgagtaagcttaagtatagggaatcccctttccaccccttctagttgtattagccatgtactagaagtgcagcaaggggattctccaaactaaccctgcttggcactgggaggtattgcattttcaaatattgcatattggaaacaaacagatattgcatttttgtgatattgagccctcctttggatgatacctagggttcaggtcagcagagccaatgtggccagtggatgaagtatcaggtggggtaggggctttggggaacagggttggtgatccaaaaagatattattgggcttaaccggaggagttgggtcctgtcaacaacacatgaataaagacaatgaatatatgttagcaatgtcatgatgtgattaaacaaaagccaaatgcatacttagcatacaaaggataattaataatcatacgaagttaaagtccatgcgtactggaaatgtattctaatttggcttgttcatatagaagaatcataggattctttgaacaaaaaggtcaaaattgcctccaaaagaaaaggaaaaaaaggcatcttggggataaaacactcgatagaatttctcgattatccacctagagtggatgcatcggaattcatgaaagaatctcaataagccctgtagttatcaatgcttgatgggtcttggatagagaaagttaagtaattagtccattttccaacatcttatcgtgaattttgctatcctgatgtatgccttactcatgaacaaaataaccaaatgcaaataatcaaactgagaattttaaaagtatttcccaagcacatatgtaatatagaatacaagaataaccaataatcagtcaaaagtaacataattatacagtgaatattacatatgttcccaaaataaacatctaacaagaaaaacacgcaaacaagtattagttccattgtcccacaatgcagtgcaagctcatcacacagttcatccaggtgttatctcatcattgtgcaattcaaccattatggtcccaataagaaaatttaagtgattgtccagtacttcccgaaatttcttagaatgaccaatcagcaccaaacaactatcaatttgcaacgtacacatcactactaccttaatgttcttcccgaccaataactattttcttacataaggtacagcaggaaatcattgacgagtttagatggtaatttaatatagaatattaagtcagtcattgtttagatgactcttatttgattatgatggcctgcatatacataaaatcaacatgtgcatagggatgttctaaacattaaggtcagtagtaacatttgaggccagtgttacataatcccaagagatggtaggctttgggccaggctacatgtttaacaacttatgaaaccaaattaatagtacacattgtaccgcacaagtgcaaatggatcaattaaaggaccagcagagatgaaccatccaactttggaattgatcaatcgattagttaattcactgagtcacagaatcacagttgattaatcgattagttaattcagatttagcagaaaagtataatacgccaccagcaaggagtgatagctactactcaatcacttagtcatgtagcagctgttgtcgtgcaccaaaggaaacaaatcaatgtaaattataacagaaacgtataatatgacaccagcaacgggcgatagctactacagtatactcaatcactcagtcatgtagcatctggtgacttgcaccaaagggaacacattaatgtaaattatcatagatgctcctttcacccaacctgctttcagttacacagaacaactttgaaagacccatgcctcaagtggaatttccaaagggaaaactattaagccatctaataggaggtggtacaatcagcattgaatattatatgacctgtacaaacaataccaaaaaaccttggttgtaacttcaatggttccatcagaaccagcacataagaagacaacgattgtcatgcaaaaatcaaatcactggtgacaaaaaacaacaacaaagaaagtcagcactgggcggaaaacattcatcgaaacctgcagaactgaagcatggaggaaattgttggtcacattttgttatgctacttgtcatcactaaatcgcaagctggaaaaactgaagctatctctgctcgaaatgagattagagccaatggaccaaaacctatatatatgtgactcaaatactctccctctcccttgaccctaaagcactgagttgctagataccataattaaaggtcattctattgatgagaactcaaatgcagatgctacgcatgtgaaagtaatatagcattcaaacatgaagattaaggaaggggtaagctcaaaaacaaaaaaagaaggaaaacattcaaggtcattttcaaccattcaatccaaccataccaaactgttccaaattattcaatattttagctatggttctgaattgttggatcagaaaatctgcaacactatattaattgtgtgacagaatcacacatttttcgtatgccactaaatcggggggaggggggggggggggggggggcagcgttaaactacacctgcttcacacgaaaagtaagcaatccaacgaaatgcatctttaagggctaccaaattcggcgtccagctgattgcttcggggcctaccctgattgctaggatggagttaaacaagtgatcaaccccccccgctggtgaatgcccttaccggggg

SEQ ID NO: 8634 - DNA, 1136 bp, Oryza sativa
ggcgcccaacacgggcggcataatagccaagccgtgcaggcgagtacaccagtcggcggcgacgaaggcgagccggtcggtgaagacgtaggcgcccaacaacggcggcataataggccagccgtgcaggcgaggacaccagtcggcggcgacgaaggcgagccggtcggtgaagacgtaggcgcccaacaacggcggcataataggccagccgtgcaggcgaggacaccagtcggcggcggcgaaggcgagccggtcggtgaagacgtaggcgcccaacaatggcggcataataggccagccgtgcaggcgaggacaccagtcggcggcggcgaaggcgagccggtcggtgaagacgtaggcgcccaacaacggcggcataataggccagccgtgcaggcgaggacaccagtcggcggcggcgaaggcgagccggtcggtgaagacgtaggcgcccaacaacggcggcataataggccagccgtgcaggcgaggacaccagtcggcggcgccgaaggcgagccggtcggtgaagacgtaggcgcccaacaacggcggcataataggccagccgtgcaggcgtggacaccagtcggcggcgacgaaggcgagccggtcggtgaagacgtaggcgcccaacaacggcggcataataggccagctgtgcaggcggaagcaccaatcggcagcggcgaaggcaagccggtcggtgaagacgtagacgcccaacaatggcggcataaaggccagccgtgcaggcggaaacaccaatcggcagcggcgaaggcaagccggtcggtgaagacgtagacgcccaacaacggcggcataaaggccagccgtgcaggcggaaacaccagtcggcggcggcaaaggcgagccggtcggtgaagacgtaggcgcccaacagcggcggcataataggccagccgtgcaggcgaggacaccagtcggcggcgacatatgagtgacatgagttcgtcaaagtttcacggatcggagtttactactcgggtacttttgcaattattaagagcagaaaataaatttatctcatctctatgcttttgatttattccgaataatacttagcaccttgcgttactcggtccatccaacgagcccccgggtgctag

SEQ ID NO: 8635 - DNA, 902 bp, Oryza sativa
gacgatgcccatcaacggtggtgtgaccaaccgaccgtataggcgaggacaccagtcggcggcgacggaggcaggccggtggtgaagtcgtagacgcccaacagcagcggcataataggccagccgtgtaggcggaggcaccactcggcggcgacggaggcaggccggcggtgaagtcgtagacgcccaacagcggcggcataataggccagccgtgtaggcggaggcaccaatcggcggcgacggaggcaggccggtggtgaagttgtagacgcccaacagcggcggcataataggccagccgtgtaggcggaggcaccactcggcggcgacggaggcaggccggcggtgaagtcgtagacgcccaacagcggcggcataataggccagctgtgtaggcggaggcaccactcggcggcgacggaggcaggccggcggtgtagatgacgatgcccatcaacggtggtgtgaccaaccgaccgtataggcggggacaccagtcggcggcgacggaggcaggccggcggtgtagatgacgatgcccatcaacggtggtgtgaccaaccgaccgtataggcgaggacaccagtcggcggcgacggaggcaggccggtggtgaagtcgtagacgcccaacagcagcggcataataggccagccgtgcaggcggaaacaccagtcggcggcggcgaaggccagccggtcggtgaagacatggacgcccatgaacggtggtgtgaccgaccaaccgtataggcgatgacaccagtcggcggcgacggaggcaggccggcggtgaagtcgttgttgctatcagcaatggcggtggcgaggacaagccggcggagtggactcgcggccgatcgaccggaaagctgagacgcctcgagtccatgaccagca

SEQ ID NO: 8636 - DNA, 7843 bp, Oryza sativa
gatccccctagccacctcagcatcaccccgccacgtcggcagggggacggcgccaaagaggctggcgccgtcctgttgaacgacggcgccagccactctggcgcctcaaaaaggaccattttttggataagtttttctaggggtctacttgcgaaataagtttttcaaaaggaccaaaatgtgaaaaatccagggccaagacaggtgccccacctgccaggtctgcttcaagcgcgggcataccgcagcagactgctggtatcgcttcgacgaggactacgtcgcagatgaaaagcttgccgctgctgctactaactcatatggtatagatacaaattggtatattgatacaggtgctacagatcatattaccggtgagctagagaaacttaccaccaaggaaaagtacaacggcggcgagcagattcacacggctagcggagcaggtatggatattagtcacattggtcatactattgtgcatacccctagtcgtaacattcatctaaataatgttctttattttcctcaagctaagaaaaatcttatatctgctagtcagttagccgctgataattctgcttttcttgaacttcactcgaaattcttttccataaaggatctggtaacgaaggacattttgcttgaagggaaatgtaggcatggtctctacctgatccctaactcctttggctgatcaaccagcaaacaagcccttggcaccgtcaagctatccttgtccaggtggcatagccgtctaggacatccgtctcttcctattgttaagaaagttattagcaaaaataatctcccatgcttagttgagtcagtcgatcagtctgtgtgtaatgcttgccaagaagcaaagagtcatcagttaccttatgttagatctactagtgtgtctcaatttccccttgaacttgttttttctgatgtttggggccctgccccagagtctgttgggagaaataaatattatgtgagttttattgatgattttagtgctaaaatataagtctcaagtctttgagaagtttaaagaatttcaggttctagttgaacgaatgtttgatagaaagattattgccatgcagactgattgggggggagaatatcaaaaacttaattcctttttttgcaaaaataggaattgatcatcatgtgtcatgtcctcacactcgtcaactgaatgggtcagctgagagaaaacactggcatattgttgaagtgggtctctctcttttatcttatgcatcaatgcctcttaaattttgggatgaagcctttgttgcagccacttatctcatcaatcgtgtgcctagtagaatcatccaaaattctacacctctagaaaaattgttcaaacaaaaacctgactactcatccttgagagtgtttggttgtgcttgttggcctcatcttcgtccttacaatacacattgtggagattatgggtaccccatacccacacggcatggttatccgactagttataggggataacttatatgtatggaatatgtaacagattatgacttgggtattacgtttccttgtatattacggaacggcctaaagtcctggtttgataagattgtaaagtagagttaggaaaccgataccgtattggataatgtttctatcttgtaatcctgccccccattctatataaggtgggcaggaggccctctagagggcatgagacaacctgatcgtcagatcaatacacactcagcggattcaaatccccaaacaggagtagggtattacctctcattgagagggcctgaacctgtctaaatcctttgtctccacatccatccacttttaggtctcgtgcgctaccccgttttattattgccgaattcatgtttcgacagttggcgcgccaggtaggggctgcgtcgagtttcctatcaacgagcgcgatggaatcaatttcatgagtcgccgacttcgctttcgctttgggagttttcacttcctttccgtcgaccacttcttcaagctcctcttctctgacttgatccaaatcagtcagggggaaactcaatctgatttttatcattatttatcatattgatttttaatctcagattaatttcttgctattttttgttgttgttcgcatataactacgcggcactattgaggcgattgatgctggtcatggactcgaggcgtctcagctttccggtcgatcggccgcgagtccactccgccggcttgtcctcgccaccgccattgctgatagcaacaacgacttcaccgccggcctgcctccgtcgccgccgactggtgtcatcgcctatacggttggtcggtcacaccaccgttcatgggcgtccatgtcttcaccgaccggctggccttcgccgccgccgactggtgtttccgcctgcacggctggcctattatgccgctgctgttgggcgtctacgacttcaccaccggcctgcctccgtcgccgccgactggtgtcctcgcctatacggtcggttggtcacaccaccgttgatgggcatcgtcatctacaccgccggcctgcctccgtcgccgccgactggtgtccccgcctatacggtcggttggtcacaccaccgttgatgggcatcgtcatctacaccgccggcctgcctccgtcgccgccgagtggtgcctccgcctacacagctggcctattatgccgccgctgttgggcgtctacgacttcaccgccggcctgcctccgtcgccgccgagtggtgcctccgcctacacggctggcctattatgccgccgctgttgggcgtctacgacttcaccaccggcctgcctccgtcgccgccgattggtgcctccgcctacacggctggcctattatgccgccgctgttgggcgtctacgacttcaccaccggcctgcctccgtcgccgccgattggtgcctccgcctacacggctggcctattatgccgccgctgttgggcgtctacgacttcaccgccggcttgcctccgtcgccgccgagtggtgcctccgcctacacggctggcctattatgccgccgctgttcggtgtctacgacttcgccgaccggctggccttcgtcgccgccgactggtgtccccgcctatacggttggtcggtcacaccaccgttcatgggcgtccacgtcttcgccgaccggctggccttcgccgctgccgactggtgtttttgcctatacggttgacggacttcgccgctgttaatgggcttcatcatctacaccactggcttggttccactggcgccgactggcgtttttgtcaccattgatggactgcttcgttcccacatcggctacttctgccatcaccaaggggaatattacaaagctaagtcatcatttattttattctttatatgatatttttccttttcctctgcctcactacaccaattggtcttccattgagtagtgagtcgggggctacagatgttatatcatattttttataatatttatcttgattgcttgcgacataatctgagtacaaaagtacctatcgagttatggagttctatcttcctatgctttccgtttggtttgccaatggatggttgcctttgggccgattcctagcacccgggggctcgttggatggaccgagtaacgcaaggtgctaagtattattcggaataaatcaaaagcatagagatgagataaatttattttctgctcttaataattgcaaaagtacccgagtagtaaactccgatccgtgaaactttgacgaactcatgtcactcatatgtcgccgccgactggtgtcctcgcctgcacggctggcctattatgccgccgctgttgggcgcctacgtcttcaccgaccggctcgcctttgccgccgccgactggtgtttccgcctgcacggctggcctttatgccgccgttgttgggcgtctacgtcttcaccgaccggcttgccttcgccgctgccgattggtgtttccgcctgcacggctggcctttatgccgccattgttgggcgtctacgtcttcaccgaccggcttgccttcgccgctaccgattggtgcttccgcctgcacggctgacttattatgctgccgttgttgggcgcctacgtcttcaccgaccggccgccgcatccgccgctgactggtgtcaccgcctgcacggctggcctgttataacgccaactgatgctaccttcttcacggctggctacatcgctgtcactactaataggcatcagtatcttcaacacaagctgcctacgtttgccatggctgccgactggtttcttcacttccatggctgcatgattctgccagtgttgattggccttatcttcttcaccgccggtcgtctcgtctgctgctgactagtgccctcacctctacgtctggtttatacagctaccactactgatggacatcatcgtcttccgttgccgactggttatgccgccgccgactagtgcttttatcttcacaactgcgcgtcttcgctaccagtttgcttctgttgctgccgactcgtgttcacttcatcacggcgatgcaactttgtcatcatggtggagcgacttcttctttattatcttcggcactggcaaactctattgctgctacttcgcaagttttactacttcaccaaccacgacgtctttgtgaacctcgacatctcggcatgcaatgccatgatattttactacaacaagtgactctccaatattcaggatttctacttggacaccttcaacacatatcttcaatcaagcaatgactactcgacgacaagaagctataattctcgactctatgttcagttgttttccaactaaccaaagagtcgggggctacacaaatataaggctcaaaatttgacaaattttatgtcaagctgaagaaatcaattaatcagccaatgagtcaactccaggagtcattatcttcatctttgcttcggaacagacattctacttcaacaacttcaaatatttcggtttagacgagttgggcaacaacatcaactctcctccaattatttgtcttcacggttggcctactacgcaactgccgatagaggatctcatcgttatcatcggctgctacatcgctattgactggatcaccgacatcgtcatcttcatcaacatcttgtcaagcctcatcaacatagcctactctgctgccgttgatgggaaacttcgtcatcatagtcggctatctctgttgccgctaatcatcattaccgtcggatgcgtttgtcgccgccgattattttcttcatcttcatgattggtggatttcgccatcaccgttgatgcgcgtctacatcttcatcgtcggtttgcttttgtcaccaccgactgttctttcgttgttgttgggcgcctacatcttcactgctagctgacctgactgttgccgactggtttcttcgcctccatggttatgcaacttcattacatttgattggtggcatctttactaccactgacatcttccgttacttctgatgagcaatttcgtcttcatgttggtcatttcatctccatgccgactgcgtcagctattgccaatagacaattttgactatgacagaagaacaagctatatgctcaggggctcatcaactcaagcgtgaggattatatctccaatttggacttgttccggatacattccacatggattcatagtcatgagtctattttctatgctcaaagactggaccaattattattccccgtaagggctatcaaccgaatacttgcgccagtcgggattcaattattatatttattttggagtatcccataagggataatcattcagatcagaagctattcatatgagctacacttggtctatattacccggaagatttattactcgggagcatgttacatgcgtcatcctttaaagggtgtcgaaggcatattttttggcctaggcctaatatgtctgcagcccatattttcaggtgtggcctgtcacgttcttttagggacttaggcactttttgcttaggccaaagtgcgcgtgatcaagtgcccaataccttaaaatccttttataccgcagttactcaactttttaggagttggtacaatgcatcttaaaaggtgtcaaacagtaaagctttatatagctgtcccgctgactttttaatatagtcatggtgctgtttgggttttaaagcaattgattggttacaatatcgttgctttttgccacgtaagtgtgcatttttattgaccaatattatggcttaggctgattatatattgtggtcatttttcaggcggttggtaaatcctttatgagtttatttactcggattttataccacatatgccgtatatttccaggtgtggtggaaccatgtgtcttctagggacttaagcacatctgttaaagcagtgtgcgcatggcgtatgcccaatactttggaaatttctttattcacaacatacaagcttttttatagctgttttgctatgtgaattttcaataatgtagccaactttaggttacactcatcatattttacaaagcagtcggtatatcactcggatcatgttattcagggatttacaccgcatatgctacatattaatatcaagtcgcttggttaactataattatcgaagccactcggttggttggattatttattccttgactatatgcttggtttgttcacttaaccgcatagtcgagggctacacctattaggtgcatctagtcgatgcacctgactttatttttcagccctccacagtcttcagatttggtaaaagtactcgggagaccatggcaaagatgattgaagtactcggccttggagtaatctggttcgagagaagattatcttttcgactgtgaaggtctcaggggctactgtggagattatgggtaccccatacccacacggcatggttatccgactagttataggggataacttatatgtatggaatatgtaacagattatgacttgggtattacgtttccttgtatattacggaacggcctaaagtcctggtttgataagattgtaaagtagagttaggaaaccgataccgtattggataaggtttctatcttgtaatcctgccccccattctatataaggtgggcaggaggccctctagagggcatgagacaacctgatcgtcagatcaatacacactcggcggattcaaatccccaaacaggagtagggtattacctctcattgagagggcctgaacctgtctaaatcctttgtctccacatccatccacttttaggtctcgtgcgctaccccgttttattattgccgaattcatgtttcgacacacataaactccaattccgttccaaacagtgcgtgttcctaggttttagtactcaccacaaaggatttaaatgtcttgatgtgtcatcaggccatgtctacatcttaagagatgttatctttgatgaaaatatatttcccttttctactcttcactcaaatgcaggagcaagacttaggtctgaaattcttctattgccttcctccatgacaaattataatacgactagtccagggggcacacatgtagttacaccagtggctaatattccattacctagtaataatttaattgtgtctgatgctgatgatgttgtttctggagaaaatggtacaacacatgagcaggaaatggagaataccatgcatggggacgtgcatggcaacatcgtgcatggggaggcggcactggaatcgacgctacaggacagcagcactgtgcctgaccaggacgctgacagcagtggcgcagcctctgctgcagcctctgccgggctgcaggaa

SEQ ID NO: 8637 - DNA, 24302 bp, Oryza sativa
tccccctagccacctcagcatcaccccgccacgtcggcagggggacggcgccaaagaggctggcgccgtcctgttgaacgacggcgccagccactctggcgcctcaaaaaggaccattttttggataagtttttctaggggtctacttgcgaaataagtttttcaaaaggaccaaaatgtgaaaaatccagggccaagacaggtgccccacctgccaggtctgcttcaagcgcgggcataccgcagcagactgctggtatcgcttcgacgaggactacgtcgcagatgaaaagcttgccgctgctgctactaactcatatggtatagatacaaattggtatattgatacaggtgctacagatcatattaccggtgagctagagaaacttaccaccaaggaaaagtacaacggcggcgagcagattcacacggctagcggagcaggtatggatattagtcacattggtcatactattgtgcatacccctagtcgtaacattcatctaaataatgttctttattttcctcaagctaagaaaaatcttatatctgctagtcagttagccgctgataattctgcttttcttgaacttcactcgaaattcttttccataaaggatctggtaacgaaggacattttgcttgaagggaaatgtaggcatggtctctacctgatccctaactcctttggctgatcaaccagcaaacaagcccttggcaccgtcaagctatccttgtccaggtggcatagccgtctaggacatccgtctcttcctattgttaagaaagttattagcaaaaataatctcccatgcttagttgagtcagtcgatcagtctgtgtgtaatgcttgccaagaagcaaagagtcatcagttaccttatgttagatctactagtgtgtctcaatttccccttgaacttgttttttctgatgtttggggccctgccccagagtctgttgggagaaataaatattatgtgagttttattgatgattttagtgctaaaatataagtctcaagtctttgagaagtttaaagaatttcaggttctagttgaacgaatgtttgatagaaagattattgccatgcagactgattgggggggagaatatcaaaaacttaattcctttttttgcaaaaataggaattgatcatcatgtgtcatgtcctcacactcgtcaactgaatgggtcagctgagagaaaacactggcatattgttgaagtgggtctctctcttttatcttatgcatcaatgcctcttaaattttgggatgaagcctttgttgcagccacttatctcatcaatcgtgtgcctagtagaatcatccaaaattctacacctctagaaaaattgttcaaacaaaaacctgactactcatccttgagagtgtttggttgtgcttgttggcctcatcttcgtccttacaatacacattgtggagattatgggtaccccatacccacacggcatggttatccgactagttataggggataacttatatgtatggaatatgtaacagattatgacttgggtattacgtttccttgtatattacggaacggcctaaagtcctggtttgataagattgtaaagtagagttaggaaaccgataccgtattggataatgtttctatcttgtaatcctgccccccattctatataaggtgggcaggaggccctctagagggcatgagacaacctgatcgtcagatcaatacacactcagcggattcaaatccccaaacaggagtagggtattacctctcattgagagggcctgaacctgtctaaatcctttgtctccacatccatccacttttaggtctcgtgcgctaccccgttttattattgccgaattcatgtttcgacagttggcgcgccaggtaggggctgcgtcgagtttcctatcaacgagcgcgatggaatcaatttcatgagtcgccgacttcgctttcgctttgggagttttcacttcctttccgtcgaccacttcttcaagctcctcttctctgacttgatccaaatcagtcagggggaaactcaatctgatttttatcattatttatcatattgatttttaatctcagattaatttcttgctattttttgttgttgttcgcatataactacgcggcactattgaggcgattgatgctggtcatggactcgaggcgtctcagctttccggtcgatcggccgcgagtccactccgccggcttgtcctcgccaccgccattgctgatagcaacaacgacttcaccgccggcctgcctccgtcgccgccgactggtgtcatcgcctatacggttggtcggtcacaccaccgttcatgggcgtccatgtcttcaccgaccggctggccttcgccgccgccgactggtgtttccgcctgcacggctggcctattatgccgctgctgttgggcgtctacgacttcaccaccggcctgcctccgtcgccgccgactggtgtcctcgcctatacggtcggttggtcacaccaccgttgatgggcatcgtcatctacaccgccggcctgcctccgtcgccgccgagtggtgcctccgcctacacggctggcctattatgccgccgctgttgggcgtctacgacttcaccgccggcctgcctccgtcgccgccgagtggtgcctccgcctacacggctggcctattatgccgccgctgttgggcgtctacgacttcaccaccggcctgcctccgtcgccgccgattggtgcctccgcctacacggctggcctattatgccgccgctgttgggcgtctacgacttcaccaccggcctgcctccgtcgccgccgattggtgcctccgcctacacggctggcctattatgccgccgctgttgggcgtctacgacttcaccgccggcttgcctccgtcgccgccgagtggtgcctccgcctacacggctggcctattatgccgccgctgttcggtgtctacgacttcgccgaccggctggccttcgtcgccgccgactggtgtccccgcctatacggttggtcggtcacaccaccgttcatgggcgtccacgtcttcgccgaccggctggccttcgccgctgccgactggtgtttttgcctatacggttgacggacttcgccgctgttaatgggcttcatcatctacaccactggcttggttccactggcgccgactggcgtttttgtcaccattgatggactgcttcgttcccacatcggctacttctgccatcaccaaggggaatattacaaagctaagtcatcatttattttattctttatatgatatttttccttttcctctgcctcactacaccaattggtcttccattgagtagtgagtcgggggctacagatgttatatcatattttttataatatttatcttgattgcttgcgacataatctgagtacaaaagtacctatcgagttatggagttctatcttcctatgctttccgtttggtttgccaatggatggttgcctttgggccgattcctagcacccgggggctcgttggatggaccgagtaacgcaaggtgctaagtattattcggaataaatcaaaagcatagagatgagataaatttattttctgctcttaataattgcaaaagtacccgagtagtaaactccgatccgtgaaactttgacgaactcatgtcactcatatgtcgccgccgactggtgtcctcgcctgcacggctggcctattatgccgccgctgttgggcgcctacgtcttcaccgaccggctcgcctttgccgccgccgactggtgtttccgcctgcacggctggcctttatgccgccgttgttgggcgtctacgtcttcaccgaccggcttgccttcgccgctgccgattggtgtctccgcctgcacggctggcctattatgccgccgttgttgggcgcctacgtcttcaccgaccggctcgccttcgtcgccgccgactggtgtcctcgcctgcacggctggcctattatgccgccgttgttgggcgcctacgtcttcaccgaccggctcgccttcgccgccgccgactggtgtcctcgcctgcacggctggcctattatgccgccgttgttgggcgcctacgtcttcaccgaccggcttgccttcgctgccgccgactggtgtcctcgcctgcacggctggcctattatgccgccgttgttgggcgcctacgtcttcaccgaccggcttgcctttgccgccgccgactggtgtttccgcctgcacggctggcctattatgccgccgttgttgggcgtctacgtcttcaccgaccggcttgccttcgccgctaccgattggtgcttccgcctgcacggcagacttattatgctgccgttgttgggcgtctacgtcttcaccgaccggccgccgcatccgccgctgactggtgtcaccgcctgcacggctggcctgttataacgccaactgatgctaccttcttcacggctggctacatcgctgtcactactaataggcatcagtatcttcaacacaagctgcctacgtttgccatggctgccgactggtttcttcacttccatggctgcatgattctgccagtgttgattggccttatcttcttcaccgccggtcgtctcgtctgctgctgactagtgccctcacctctacgtctggtttatacagctaccactactgatggacatcatcgtcttccgttgccgactggttatgccgccgccgactagtgcttttatcttcacaactgcgcgtcttcgctaccagtttgcttctgttgctgccgactcgtgttcacttcatcacggcgatgcaactttgtcatcatggtggagcgacttcttctttattatcttcggcactggcaaactctattgctgctacttcgcaagttttactacttcaccaaccacgacgtctttgtgaacctcgacatctcggcatgcaatgccatgatattttactacaacaagtgactctccaatattcaggatttctacttggacaccttcaacacatatcttcaatcaagcaatgactactcgacgacaagaagctataattctcgactctatgttcagttgttttccaactaaccaaagagtcgggggctacacaaatataaggctcaaaatttgacaaattttatgtcaagctgaagaaatcaattaatcagccaatgagtcaactccaggagtcattatcttcatctttgcttcggaacagacattctacttcaacaacttcaaatatttcggtttagacgagttgggcaacaacatcaactctcctccaattatttgtcttcacggttggcctactacgcaactgccgatagaggatctcatcgttatcatcggctgctacatcgctattgactggatcaccgacatcgtcatcttcatcaacatcttgtcaagcctcatcaacatagcctactctgctgccgttgatgggaaacttcgtcatcatagtcggctatctctgttgccgctaatcatcattaccgtcggatgcgtttgtcgccgccgattattttcttcatcttcatgattggtggatttcgccatcaccgttgatgcgcgtctacatcttcatcgtcggtttgcttttgtcaccaccgactgttctttcgttgttgttgggcgcctacatcttcactgctagctgacctgactgttgccgactggtttcttcgcctccatggttatgcaacttcattacatttgattggtggcatctttactaccactgacatcttccgttacttctgatgagcaatttcgtcttcatgttggtcatttcatctccatgccgactgcgtcagctattgccaatagacaattttgactatgacagaagaacaagctatatgctcaggggctcatcaactcaagcgtgaggattatatctccaatttggacttgttccggatacattccacatggattcatagtcatgagtctattttctatgctcaaagactggaccaattattattccccgtaagggctatcaaccgaatacttgcgccagtcgggattcaattattatatttattttggagtatcccataagggataatcattcagatcagaagctattcatatgagctacacttggtctatattacccggaagatttattactcgggagcatgttacatgcgtcatcctttaaagggtgtcgaaggcatattttttggcctaggcctaatatgtctgcagcccatattttcaggtgtggcctgtcacgttcttttagggacttaggcactttttgcttaggccaaagtgcgcgtgatcaagtgcccaataccttaaaatccttttataccgcagttactcaactttttaggagttggtacaatgcatcttaaaaggtgtcaaacagtaaagctttatatagctgtcccgctgactttttaatatagtcatggtgctgtttgggttttaaagcaattgattggttacaatatcgttgctttttgccacgtaagtgtgcatttttattgaccaatattatggcttaggctgattatatattgtggtcatttttcaggcggttggtaaatcctttatgagtttatttactcggattttataccacatatgccgtatatttccaggtgtggtggaaccatgtgtcttctagggacttaagcacatctgttaaagcagtgtgcgcatggcgtatgcccaatactttggaaatttctttattcacaacatacaagcttttttatagctgttttgctatgtgaattttcaataatgtagccaactttaggttacactcatcatattttacaaagcagtcggtatatcactcggatcatgttattcagggatttacaccgcatatgctacatattaatatcaagtcgcttggttaactataattatcgaagccactcggttggttggattatttattccttgactatatgcttggtttgttcacttaaccgcatagtcgagggctacacctattaggtgcatctagtcgatgcacctgactttatttttcagccctccacagtcttcagatttggtaaaagtactcgggagaccatggcaaagatgattgaagtactcggccttggagtaatctggttcgagagaagattatcttttcgactgtgaaggtctcaggggctactgtggagattatgggtaccccatacccacacggcatggttatccgactagttataggggataacttatatgtatggaatatgtaacagattatgacttgggtattacgtttccttgtatattacggaacggcctaaagtcctggtttgataagattgtaaagtagagttaggaaaccgataccgtattggataaggtttctatcttgtaatcctgccccccattctatataaggtgggcaggaggccctctagagggcatgagacaacctgatcgtcagatcaatacacactcggcggattcaaatccccaaacaggagtagggtattacctctcattgagagggcctgaacctgtctaaatcctttgtctccacatccatccacttttaggtctcgtgcgctaccccgttttattattgccgaattcatgtttcgacacacataaactccaattccgttccaaacagtgcgtgttcctaggttttagtactcaccacaaaggatttaaatgtcttgatgtgtcatcaggccatgtctacatcttaagagatgttatctttgatgaaaatatatttcccttttctactcttcactcaaatgcaggagcaagacttaggtctgaaattcttctattgccttcctccatgacaaattataatacgactagtccagggggcacacatgtagttacaccagtggctaatattccattacctagtaataatttaattgtgtctgatgctgatgatgttgtttctggagaaaatggtacaacacatgagcaggaaatggagaataccatgcatggggacgtgcatggcaacatcgtgcatggggaggcggcactggaatcgacgctacaggacagcagcactgtgcctgaccaggacgctgacagcagtggcgcagcctctgctgcagcctctggcgctggaggggacagtgtcagtctgggagatgccgaagcaaatggcgcagcagcaagtggcgaagctagcagtgcagattcccagccggtgcagcctgatgtgacagctacagcagcccgtgcaccgagaccacacactcgcctgctgagtggtattagaaaagaaaagatatatattgatcgaactgttaaatatggttgttttaattctacttgtcgaaactagatttcggcaataataaaagggggtggctatcaagctggagaagtgaatgggtttggagacaaaggatttatacaggttcaggccttcttattcaagaagtaataccctactcctgtccggggatgaatccgccgagtatcttattgattgtatgatttggagaaaatcaacacatgcccctagaggcacccggaccccccttatatatgggaaggagtccgtgttacaaaagataatctatatccctaacggaatatgcagatacagataaaatacagtcgtaaccgactaagtctcaaggtatttccttgatgtacaagttgagaaacaaacccgagatacaaataagatattctatctatattcggtatcctatattcagtccaaatatcatcgccgtgtagatatgggatatccataatctccacagtagcccccgagacctttgcagtcaaccatcatagccttctcaaagataataatccgagtgcttcaaacttttcatgccaaggcctgccgagtagcgaagacgaagactgtaaagggcgaaaagataaagaatatggtgcatcgaatagatgcacctaattaggtgtagcccccaactatgtgattagttaacaaactaaacatatagttgagaacaaaataatagcacaatcgtgcatcatatgacaaaagcatacacggcgcctaaagaagcattcttagccgactgctttttagccataattaaaaggaatccgagtggttaacactctaaaaggttcacgaatgaacacacttgacaggcatccgaatagaaaactctaaagattacccaccaaatattataaaaattatggtaatgaataagtctaatagcctaggctatgactatttaccataatgaaaacaggcatataacataccaaggaaatgactatggtaaaaacaagtcattccaagttaacccagacagcttttgtagcctaaaaaagcttacaaaaacagcataacacctttctgtcgggcaccttttaatttgcattgcaataattccaaagaattatatgaccgcgtaaaaaggattttatcagcattgggcaacactattgtgcgcataaattgccaaagcaaaaaatgcctaagtccctaaggagcacaatgggccacgctgttaaaagtactgggctgaggtactgttcaggcctaagcccattcgcacctccgatacccttaacaagaaatcccgagatccaagcgacacttcatcttccccgccggaactctcgccattttccccactccctgctacagtacagagctacgccggcaaactagggttcaccattccactcgaatccaccttcgaaaagttcatcaaaatccttcccgtgatccaccgcctcaatccctcacctctccctagccatccctcgaatcaaatcagcgcattcggaaaaaatcaatggcggaagagaaggaaagctttgaaggccaatgggcgccatccgacgtgacggaggagaacctgaaggagatggtggcgcacggcgttctccctgccaaggaaatcatcgggtggcggccagcgtgcggtgaggcttttccgacccccgatatacacgaggctgtggtcttctcccatttcttctatggcggcttcgctcttccgacctcaaaatttttccgcgggatattaagcttctatggaatcagcttgcatcacctaaacccaaattccatagttcacatcgccaatttcgtccatgtttgtgaagccttcttgggaattaagccccacttcgctctgtttcgccgaatcttctttctcaagccccaaccaaacaagagtaagccatgtgtagtcggaggggccggatttcagctgagggggactctgagccagaagtacttctctatgcccttcaagacctcaaacaaagggtggcatgcaaactggttttatattcagaatcctgagcctgctcttcccgagtactcttgtcttcctccggtgtaccaagatgcctggaactctcttccgattggggatgaagcagcccaagccttggagctgatggatcgcatgctaaaactcaaagaacaaggcttacaaggagagcagattactcgacacttcatcaaatgccgattggcaccaattaaagaaagatcccgtacggcattcgagtttgacggcaagcatgatcctaatcgtgaagaaccagattctctggattttaaaatcatgaaggagagaatgtgtaaaatcttctcaaatgctattgtcgtcagctactcacatcagctgccagttgtgccatataacgcattcaatccgcctccgcaggtacgtatccgaaatcttcaacccatgaccaaaacataatcttgtcttcatgttgagttaactaaccgtggaggcatctcattcaggaatatgtattgatgaagtctgaccccccaatcactcagcgccggtctcctcgccagcacaccgttcagggaggtggagggccgacaatcagatcagatccgcaacctcaaacctccaatccgactgggcagacaggttctcgcaagagaaagctggtgcttaatgacgacaaaggcgacgacggcaacaaatctggggacaaaggctcgcccaataaactcccaaagcataccactcccaggaaaaaactggctagtcgtccaaggccaaagattagaacatcttccaggtataaaccttttggtaccatttcacttcgacatgcttctctcatggaaataatactgaatattgaaagaacactttgcaggaaaccatccgacatagatccaactggaaaagatcctgatccgactgtgacagaaccaagttcatccaaggattctgagccgactgccgaaagccagccgactggcgcccatacttcaggtgataaggccaatccgagtgaccagcctccgactggaaaccagtcggcagcaactgaaactacaacaacccaagagcccccgactggaaaccagtcggatgtaggtccagatcaagaaactcccgaagttgaagcgcagacaacaacttctcaaggaccagaggctggtaacgactcgatgattgggtctccagataaagaacaaggatcaccccacgctcagctaggaacatcctcaagtaactcatcttctcaagtgatgccgatttaaataacttcagcttattcgtctaatatcttggaaatacatcaggaccaccaggcgatgacgaagaagaaattcctcgcataaaggcagctgatgactctcgtcctcctatcttgctcaaatggtgggacgagaactcacaagctgccggcatcgtcataaatcgtcaaaaagaagatgaggaagtgtgccagttgaagaaggcacttggagaagccactcgcattgtgaatgtaaatcttccgggtgactgcctttgatgactttgttttctcttcagcaaaactaaaccatgaaccatcatgcagagaatccatcttcgcaatgaggccaagaccgcaactttagaaaagctggttcctcatttgggaactcttgaagcagttagggaccagctacacgaggccaaggagctcgccaaaaagacagagaaggaattaagggaccgaattgctcagctccaggattcaaacttcgagctgagtggttcatcaaaaggtaatctctagatctgtcccattaatttacgctgtcgtaactgtatcctcaaccatttggatttcaaacagcgcaagccgccaggatggctcaaatggagaaacaaattgaagccctggaaagagacaaggtagaactggctgcgcaaagggactcggccttgaaggaggttgaaggtactgccagctgacaatctgaacttctctctttttaatgcagtagatttttatcataaatgtgttttgtagaccgcaaaatcaaatctcaagctcaatttgacgtcctggttggtaagatcaagaggcttgaaggagcaagagatgaagtcgctaatgtcgctacaccactcgtccaagctatgttcctcaataacagtggtccgagtgcactcgacgcaaccgaaatcttcgacaagctgagagttgctccggatgtatatttcaagaatatcaagaaagctggaagtatgggagctagcacggcattggcgatgaccaaatccttgtacccgaggattgaaattgacgccattgatggctttgcagacgggacaagcgtagaggctgctcttgatcttatcagcaatgctcaaaatgcggctgacaagattgcaagtgacgtcgtagatcaattccgcaacaccgaccttcagccgagtagtaataactctgatgatgaaaggactgattctgactgagcataaatgtagcaaatggaggcataacttgtacaatactggtgtatttatgctgtgcttgataattctagccaagtctttgatttcttaaaagcttttatcaagctttgttgagcctaaaacccaaagaagctattaaaaactttcagtcctcgcagactaagtagaaaaatcaaacaaggcaatgatagaccaaggaagcaaattgaattgataaaaaatcacactccgttattatgatgatagcccccgactgacaacttcaagaagaaaacttgatgttgacagtcaagatagggaagtacagtgataagcttaagcgtagaaacgacgaagatgttcgatgttccaagagttgtcgacgagtgtaccgtcttcgcgcttgagtcgataggaacctggccgggtgactgcagagatgataaatggcccttcccatagaggagataacttgtgccgatctcgtgtagtttgaattttcctcaaaacgaggtcgccgactagaaaggcacgggatcgaacattgcgattataataacgtcgcaacccttgtaagtatcgagccgactgaatcaaagctgcttcgcggacttcttccagtcggtgcaagtcatccactcggtcctcctcgtagcgttcttcgcggaaattacgaaagcgcaaagactcgaattcaacttcactcggcaacattgcttctgccccatagacaaggaaaaaaggtgactggcctgtggtccgactgggtgtagtacgcaaagaccaaagtactgatggtagctgttccacccatttgccggcatagggttttagccggtcaaaaactcgcgctttaatcccttgaagtatcatgccattggctcactccacctgtccattgctcatgggatgtgccactgaggcatagcaaatcttaattccaaagtcttcacaaaagtctttaaaaactccgccagtgaattatctgtcattatcagtgatgatccgattgggcactccaaatctatgcacaatgttgatgaagaagtctcgagcgttatctgctgtgattgtgacaaccggtttagcttcaatccacttggagaatttgtcaatggccacaaagaggtgcgtgtaaccgccgactgcctttttaaacgggccaaccatgtcgagcccccaaaccgcaaacggccaagacagtgggatggtctgcaactcttgagctggtagatgaatttgtctggcaaaaaactggcaaccttcgcacgtgcgcacaattttgtcggcgtcggacactgcagtaggccaaaaaaaaccctgccggtaagctttgccgacaatggtgcgtgcggcagcatggtttccgcatatcccagaatgtatgtctttcagcaattgtctcccttcctctaaagatacgcagcgttgcagaatccctgaagggcttttcttgtacaactcagcttcatgcataacataaagtttgcttcgtcttgaaatccgctcggcttcatctttgtcttgggggagttcttgagaagtcaagaatcgtatgaggggctctcgccagtcggctgaaaccatagctacgtcatgagtgcccgcaacttgagtagtatctttgtgaggtactgtcggcgtataaaggtgttcgacgaaaacatcggagggcgccacctcgcgcttggatccaaagttggcaagtctgtcggcggcttcattattgtgtcgaagaacgtgactgagctcgagtccatcgaacttgtcttccaatttgcgtacctcttgtcgatatgccatcatgttgtcgtcaaggcaggaccactctttcataacttggttgacgaccagctgtgaatcgcctcgaactattagacgctttatccctagggagatcgcaattcgcagtccatgaaggagcgcctcatactcggcgacgttgtgggacgccgaaaaatgtatccaaagcacatagcttaatctttctccagttggggaaattagaaccactcctgctccagtgcccgaaagtctttttgatccgtcaaaatgcatggtccagtgctccatcttctccgcgggggtatcctcctggcactcggtctattcggtgacaaaatcagctaacgcttgggacttgattgaaattcggggcttgaatgatatgtccaaagacatcaactccaaagcccacttagcaatccgtccgtttgctccgcggttatgcagtatatcaccgagtggaaatgatgtgaccaccgttaccgagtgaccttgaaagtagtgagatagcttcctggtagtaattagaataccatataacagcttctgaacctgagggtacctcgttttggagtcggctaggacctcgctgacaaagtaaatcggtcgctggactttctggacatggccttcttcctcacgctcaacgaccaagactgtgctcacaacctgggaggtggctgatacatacagcaacaacggctcctgcgggtgtggtgaggctaagaccggtggctcggtgaggagtttcttaaaatcttcgaaggccttctgtgcttcgggtccccattggaaatcatctgttttcttcagtagcttaaagaagggcatcccccgctcgccaagtctcgaaacaaatcggctgagcgccgccatgcatccagtcagcttctgaacatctttctgggtacttggcggtttcatgttgaggatagcagtaactttctccgggttggcttggatacccctgtgagacaccataaaaccaagcagcttccctgacggtactccgaaggtgcacttttcagggtttaatttcatcctgaaagcgcggatgctcgcgaaggtttcttctagatccgagattaaatcatccttttgtttggtcttgacgactacatcatccacataggcttcaacgttgcggccgatctgcgttgagaagcatctctggatcatacgttgataagttgctcctgcgttttttagtccgaacggcatggtgacatagcagtatgctccaaagggcgtgatgaatgaagtcttcaagcagtcggattccttcagtcggatctgatgataccccgagtagcaatccaaaaaactgagaagctcacagccggcggtcgagtcgactacctggtcaatgcgaggcaacccaaaaggatctttagggcaagacttgttgaggtcagtataatcaacacacatgcgccattgccccgttttcttccgaactagaaccgggtttgccagccagtcgggatgatggacttctttgatgaagcctgccgctaacagcttggttaattcctccttgatcgcgtccttcctgtcttgtgcgaatcggcggagtcgttgtttgataggcttggcatcttctttgacatgtaaggagtgctcaatcacctctctaggaataccgggcatatcagatggtttccacgcaaagatatctttattgttctgaagaaaggtgatgagcgcgctttcctatttacaatctaactcggcgcctattacagcagttttagtaggattagaaggatctaggggaatcttcttagtcttggcttcgctttctccactttttgaagtcttggtagcgggcacttctccttcgctcgccgtggctgcagccagtcggatatcctctcgggcagacgccatctcgcgggtttgggccatgtcgcaactctccttgtcgcatgtgacggcttgcttgatgtcgctccgtagggataggactcctcggggaccaggcatcttcatcatcatgtaagtgtagtgcgggacggccatgaacttggctaacgccgggcgtccgagtatggcatggtatgctgtctcaaaatcggtgacttcaaagctgatattctctgtgcggaagttttcccgagtgccaaaagtgaccgggagggtgatctggccgagtggagttgcggataatcctggaattactccgtgaaaaggcgcattgcttggttttagcttggagcgaggaatctgcatatcatccaaggtcttggcgaagaggatattgagtgcactgcctccgtcgatgagggttctgcgaagcttgacattacggaccactgggtctagtaccagggggtaccgccccgggtggaccactcggtcaggatgatccgagcggtcaaacttgattgcaatctctgaccatcgaagatattggggcgtgtcgggctgaacagcattgatctcccgttcggtcaacttttgcttccttttagactcataagccagggggccgccgaagatatggttgagctccttgcggtggtcttgaaatcctaccggggtgtcgccgtcgtccttcttcctcgacgtgctttgttcttcgtcggagttcttccgtgtagtcttggtgtattgctccgcgaattgcttgtagacgaaacaatctttggccacgtggttggagttaggatggtgcgggcattgggagttcatgatcttgtcgaacgtgttgacgcgcgaacgctgtcgagaagagtgaatggcggttgcaacaagttcctcaggcttacgcttgcggtccttatgattgttacttccacctcctcccgtagccggcgtatccttttttggcttccaactgggacccgactgctttgatgcggtgacggcgtcttcggctttggcgtactcgttgactttttcaaacataagtttgactgtcctgggaggtttacgcccgaacttgccgaccaattcttcgtggcgaatccctttggtgaatgcggcgatgataacgtcgtcggtgatgtcggagatcttgttacgttgttcagaaaatcgccggatgtaatctcgaagggattctccggacttctgaacaacgttgtagaggtcgaattgtgtgccgggacgctcgaaggtgccttggaagttggcgatgaagtggtcgcgtaattcggcccaagatccaatcgtaccacggggcaatccatggagccaagatcgggcggaatccgctaaagccactggtaaatagttcgccatggccttgctatctcctcctgctgcgcggatcgcgagaccgtagacggtaagccacgattctgggttggtggtaccgtcgtacttctctattccagtcggcttgaagccggctggccaatccactcgacgcaggtcgtcggtgaaggctgctactccatcaaggtcgtcgtcgtggcggtccggcgaatgatgatggcctcgagctgctcggcgctgtatgattgtgtcgcgaagatcgacggggcggcgacgaggtggtgagcgaggccgttccactcggcgctccctatgatggtcgggaggcgaatgaacggaccgctcgtcgtgacccctgctcctgcgattggatcctgcgccagtgatgctgaggcttggatgacggtagtcatgagatcggaagtgggggagtcggctgccagtcggcgtgcggacgctttcggagttaactgggaccgaagccgcaatcatggtctttgtctggttcaagatgttgacgacgtgatcagattgattgagctcgttttccttgaggagggtgtcgaggagggtgatcgcggcaaccgcattctgttgaggggtgcggaaaaccggtgtcccttcaacatcttgttggccgttgaaatcacgcgctcggcgccctgcttccaaggctcgctgccgtcggtcctcagcctccttcgcggttcgctcacgctcctgctgctcacgccgtagccgttcttgttcttgtgcttgacgctcctcctccagtcggcgacgctcagtctcgcgacgtgcttcggtttcccgggcttggcgttgctcctccgtctcgttatcggccatgaagacgccgaagtagagaggggtgtagttgtcatctaggcttccgtcgaagtcgtcgagatccgggtcgttgtagcgagagctaaactcgtcgtactctacgatgtcggtgggacgcgagtcgacggtgggagagctgtagtagccatccagctgatccgtcgaaaccgtgccgagtggttggaggatgacgccgacttccctgaagctaggcgaaatcggtgttgaagccgacttccgcctaggcctacgggatggagacgctgtcgtgatggagacggccgccaaatcgtcggggagcttcatcaggatcggtgggtaagcctcatcatcttgatctggtgacattggagaagatgcgatctcgcccgagtggtttgaagccaactcgattgagatggtcttgaagtaactttcagccgcgtttgggagtccaaacgggactgaaatccggttctctcccgactggtctgactccgagtcaaggagagagatcttgccgaagttgttggtgacgaagtcgaggctgccgaaccgaaacgtctgcccgggtgggaagacgaggtcgtcgatgccggagacggaacccattgcactgatcggcgaaaagcttgacgcccccctacctggcgcgccaactgtcgaaactagatttcggcaataataaaagggggtggctatcaagctggagaagtgaatgggtttggagacaaaggatttatacaggttcaggccttcttattcaagaagtaataccctactcctgtccggggatgaatccgccgagtatcttattgattgtatgatttggagaaaatcaacacatgcccctagaggcacccggaccccccttatatatgggaaggagtccgtgttacaaaagataatctatatccctaacggaatatgcagatacagataaaatacagtcgtaaccgactaagtctcaaggtatttccttgatgtacaagttgagaaacaaacccgagatacaaataagatattctatctatattcggtatcctatattcagtccaaatatcatcgccgtgtagatatgagatatccataatctccacactactcgtgaaccacaaaatgatagagaggccacaaaataatagagaggctctaggagataaaaactggatagctgcaatgcaagctgagtatgatgctttgataaaaaataatacatggcacctagttccgtatgagaaaggacaaaatattattgggtgtaaatgggtatataagattaaaagaaaggcagatggaacacttgacagatacaaagctagacttgtagcaaagggctttaaacaaagatatggtattgactatgaggatacctttagttctgttgttaaagctgctactattagaatcatcctgtctattgctatttctagaggttggagtcttagacagctagatgttcaaaatgtctttcttcatggattcttacaagaagaagtctatatgcaacaacctcctggttttgagtcatcctctaaacctaattatgtatgtaaattggataaagcattgtatggtttaaaacaagcaacaagggcatggtattccaggctgagtaagaaacttgttgaacttggttttgaagcttcaaaggccgatacttcattattctttcttaacaaaggagggataattatgtttgtattggtttatgttgatgatataattgtagctagttctacagagaaggcaactacagcacttctgaaggatttaaacaaggagtttgcacttaaggatttgggtgacctgcattacttccttggaattgaggtaactaaagtttccaatggtattattttgactcaagagaagtatgctaatgatttattaaaaagagttaatatgtcaaactgcaagccagttagtactcctctctctgtcagtgaaaaattaactttatatgaaggatcacccttgggacctaatgatgcaacacaatatagaagtatagttggtgctttacaatacttgaccttgactagacctgacatagcttattcagtaaataaagtttgtcagtttcttcatgctcctactacccgtcattggacaggagtaaaaagaattctcagatacttgaatcagtgcacaagtctaggacttaatatacataagagtgcgtctactcttgttcatggatattctaatgcagactgggcaggtagtatagatgacagaaaatcaacaggaggatttgctatatttgtggggtctaatcttgtgtcctggagtgctaggaaacaatccactgtgtcaaggtcgagcactgaggcagaatataaggctgtggcgaatactacagctgagttaatgtgggtacaaaccttgttaagagaattgggaattgagtctcctaaagctgtcaagatttggtgataacttaggagccaaatatttatcagctaatcctgtgtttcatgcaaggacaaagcatatagaggttgattatcattttgtaagagaacgagtgtcacataagcttttagagattgattttgttccttcaggagatcaagttgctaatgggtttacaaagtcactgtcagttccttcaggaggggctgtgaaacaacctaactctatcctgtgcgtggtgcatggcgcatgcatgcgataatggcgcactactggagatgggaaggctcccgtgtgcatgcgaatattaccgggtgtttctctgaacacacggtaacttaccgtgagtagaacaataaactcgggaaccatcaagcgcttaccgtgtgttagagatgactcacgggaacaccggaatccacctactttccgtctgtgcgcgtcaaactctgttggcgcgagtagtatttttctctttggcgcgaacggatttcttttggcgcgcgcctagctccgtttggcgcggcccaatttttcgctggcgcgaaacagaaggggtgttcccgtgtttttttttcattcagcgcacgggaagtgagtgatggcccacatgtcgattggataaaaaaaagaaaaaggaaaacaaatcctaaccctaaaaccccaccggctcccacagcccacgccgccacagtcccaaacacctcgccactgctgcccttctccttctctccctcctcgcggcacctgcgcgccgccccttcctcgccgcacctgcgccgcccccttccctcgccgcacctgcgccgcccccttccctcgccgcacctgcacgccgccctcttctctccgcacctgcacgcaatctgcccaacatcaaggtatgtgattgtcgaatgttggctagcttgtatagtctcttgatgtttgatgaagaaataagaaaggagaaattaatccctttgttctctggatttatcaaataagaaatatagtctcttgattattgcttcagtaatctcatgttttgctttagatcgtagactaaaatgcttgtgtcctctagcagtctttttagctttaggattttaatgtgatggcatgctgttatttctgaagtaattctgacctaccaatacttgtgaagttgaagaagtattgcagttgtatactgttcctatttagccttgcaattctagattgttttggtgcctatggatgtcctgcctgatgttctattaaaggatgtgtttttggtgcctttcttcttgtaacaagagatgattgttatatcctgtcgggatggttatgtgcttgggtttcagttagatgtctacttttgggagtttggtggagggaaacatctgtagtcctgctgttagaaagcttgcaatccgagcatctgtttgttctatttgtttgaccttttcgtgtaaagggtctatgtttgggcttttcctaaagccgtgcaatcaaaaattgtttgttctctaaatatgctgaaatgttttgcaggaggatgcgacgattaagctcgggctctagaggggcctccagttctgcagatggttcagctagtgctgccatctcatctaggaataggacaaggtcatcttcctctcagcaacctactgatcctgttcaagaagaggagcaggaagatgatgagttctggttttgtggccctacaagggtgccaccacgacctacacgagaggaggataaacctgtgcttaggccaataggggatatgtaagtgtgttgcttgtgctatatattgctgttatttcaagtatgaagctaatatctagcttttggttgggatttgtgcaggcaatgggaggtacaagattatggtcagagtactagagtccccaatggtatcctgactacattgataaaagaaaatttccctggtgtggtgaaattcaagggtagagatgagcctgcatggtctccggaacattacttgcttaaacctgataatgcaaaagctaatcaagcacgcttgccaagcctcctccatcgcgttgaggaagaattctgggtatttctttaccaacttagtttctttcaagttacatagatcatgtattgtttggttaacttttggtagttgcaggggttctataggtgggcagaggggacagaagtggaggctagaagagttgtgcacaactgcgtcaagaaactctttgttgatatattctatgaggctcgtatcctagctgtgattacttatcacaagaagattctgaaaacagatatagatcggccaactgcttgcaggacttatctcacaaaggcggagtatatgaaagtaagctcgcttgaacaagaaaatgttattagatgcttagcttttgaacatattagtgactaagcgcaagtttgtttgttataggctaagccatggtggttcctaaatgctggtcgtgcgtgggcattattgtcagatttgaggtggtgcaatccagaatggcaggcttactcccgtgcttgtagcgaacgcagggcaaagatgaaaacgccagcccatcgccaaggcagtgctaaccttcatcgttaccacaagaatttggttcgttagtttttcttagacataataccaagacctgcatagctttagactttaattgtacggtgttcattgaattgcagcagcacattattaatagtgttaaactatttattttgaatgtaggagaagaaaatgggcacaccagtgcatgtattgaaggcttatgctcatgccaatagggtagacccagacgagggctactgtgatgaagattcatctcagaatatgttgctcgtaagtgccttacacattgaaatttgtgttgtactactctattgtctacattccatttggttaactgccattttcatttgaatctgtaataggaggcctatgctcgcgcttttactgagaggcacggagaagacagtaattggcggactgaacccattgatggtgtggctgtgcacatggctggtggtggcaagaaacatggacgcttcttcctgcttaatggactccttaagacaccagatgttcttgctgatgttgggagaagcaggtgctcacttgatgatccacggcctagcagacggctgaggccaaaccctgatgatagtgcccggattgaggagcttgagcgtcaacttcagtgtgagcgtgaggagagggagcaggagagggagcgggcacgcgaggagagggagcaggagagggagcgggcacgtgaggagagggagcgggcacttgaggaaatggagcggacacgcaaggagatggagcaggagagagagcaggcacgtgtggagcgggtacgtgagcacgagttgttccaggagaaaacaagc

SEQ ID NO: 8638 - DNA, 10312 bp, Oryza sativa
atactgcctctctccccctaggtacttcaccaagtcattgatcagggatggtccaacataggatgcacttgcacttaagactgcaaatcctgcattcattatagcttttcttctaataaataggaacattgctgtgtaaattgatttagtatttagaccatgcctgttctcaacatcatctatgatttttttgaatgaatcagaaaggaactcagcggagtccttcccatagacatctggcacatcattcttatctagaggtttcttgtatccaatagcaaacacagggttcatccaggagaatgtgacaagttgtagaagatttgcttttccatatgggcatggccttttgatttctgtctgctgtcctgtagatggactcaatagtggctctgttatgctgttatctacaagggtgattcctgtttttcccctggcggaaattacaaatagaagagtgcagataacaagcatgaacaggttaatccatttttcaggtcctaaatattcatgatcgagtaaaatagacctgagatcaaataccacactggtaattgattgcagaaagctaaatatccaccatgctcgaattataaacggaagctttgcggatttcgtcttctgaaaactgaacactactagtgataatattatccaggatagcacctgcacactttcacctagaacaaatgctggatatttgcagtcacttatgcttccttgtaacaacaaaactactatcttcagagtatgacttgctaagttaagcaggcaacaaactttgcttgcttgatatgttatacccagctttttgtctgtgttcttctgttcctgatatgaatgcttgctttcagcagttgatgtcttaaatctctgcctgcaccaccttattctcttatacagaaactgaaccaagatactcatgatgaatatcaggtgtatcagtgcaaaagcgtccatccagaagcaaggtgagtacatttcttgccattcttgcaaatgttgcaatttagtggaatctgtaatgttgcaatgtaaatttatgtgttaagaactaacaggagaatagatttgttcaagagtcatttttcatatacccttttatcaaaagcttttactacaatgaaccaacacaaagtattatcgttggcttccagctaaagatacaacttctcctaggaatccagtgtactgaaaagaatattccatttccctaatgacaccataatatttcttttaatccattcaaatgttttgcaaccataaatccatgatatctagtaatgttatgtaagagactgtaatatctaataatgttctggatcgtttcctgtagttatatggatttttcttttaccaaagtagttatatggatatgagaacagaaagttaatcactgattgccatgctgagttttccttaaggaacatgtgtatggccacaagcaaatgtatacagctgttctcatagtaaacatgtaacttctgcgtgttatcccacctatcaacatgaatacgtttaacagaaccacgactgttatgaactgcaaccacgtattggtccttgctgtttcctgtctgctaatggttacagatgcttggattgttcatttgttcacattcttcttatccatgtgaagaatgtatgaactcacccaacatgagaaccccaaacttatcatgaacctttcgttttttccagttcccctaatttcttttgcaaacattttgcagaggcaggaaaaaagaacaagaagggaaaaaggagaaacaaagataatagcaaagaaaacccatgcagtgcaatcaaactcatggatgtctcggcggggaggaatcagacgtatgcatgaaccaatctctgcatgcagatgcagggtatgattaaaccttacttgaagaatcacggagcaatccccagcggagaaacgcctgctgcgccgtctcgggaatcctcgcgagaacatgcaagtgcaggctcgctccttccatggcgcaatgcgaatgagacaggggaggaggagagagggagggagagatgggcagtggccgtgaactggtgacggtgatatagaaggtggggaggcctgagtccgcgctagatggttacgggttttggcgtatcacggtacacggtgacagagatccaaaaatacggttttcaccccggtaaggcctggttcagttaatccctacgagatagggattggaggggatttattccacacctattgtgatgtggaattattctctctcaatcccctctaatcctctttaatccccacaccaccgtagaataggggctcgttcgatgggaaattgaagtgatatgcatcatatagtgcatatttgggtctacattaactatttttctacgattataatgtaactatgaaagtgcatatgcacacattactgatcgatcagtcacctttctttatgcggttacaagaaaaacgtgcacgctcaaaaaaccaaccatgcacaccatttatccacatctgtgattataagtgcaccaatacattggttgtgtacattggctttggatctaatggtcgggttttaatccattttctgaaaaaatcattggtatgtgctgaacagtcagatagacctgataaattaaataatccgtaaattttttaagtgcttactcgcatgtggtataattatagacatcatgcatcctcaacttcaccattgcatcttaggaaaggaagtatataatgggaatcaatgcgcttagttcagaattgcacctccattactaatggacgtggactagtggagtattatatcggaagaagtatcaaatcaggtgtattgccctctgctgaactcaagggcaaacttataagttataattctcctttaactcaaagagacacagctttgtggtcagagtattggaaatggtttgaaaagtttttttttcgcgaacgcaaaaaaaattgtacgtcaatatattaaaggaatagagttttttttacacaacgcaaaaaaatgttttaaaagtggcacgtgtaatcatctgccacgggtgcagaacgactttaagcatgcagacaagagcaaaaaaaagcatgcagacaataccaaagacagcatgaacgaaaccagcttcaattgaacacccaaacatactatagtttccacaatatattctccatcaatccatcatcatttcaccggtattttttatccgtcatcgatcgatcggtcgattgcatcaacacgcacaaaaggcaacacagcagctcgagaatccgggcacgtaagctaattattaacacaacataaagggctccacacgtgttgccaaagttgccacgaaatgatgctcagtttttttttaaaaaaaataaccatgtccgttggtgcgatgcgtacggctgaaaaggtttgcagcagaataaatataccgatcgaccaaatacaatctaagcacatgatattcacccaacacgaacagattaaaaattgacagcacataatttctcagcaactgcccgtcagctcagataacctttagtttactgccggatcagatagccgtgaggacagtgtcagaatccattacgaggcaccatttgatttagattagaaaaacagacttaccaaatactacgttcgtcctaaaaaaaataagggaaaattgtaacatgccattataattttgtaaaatttgagatatgccatcttgacccacatgtcattgactcatgtgggtcctatatgtgattgagataccgatggcatatctcaaactttgaaaaattataatggcatagttctaaattacccaaaaaataaatctaatattggatgtgtaataatttggaaaacgtaacagctccacgccctccgccccccccccccccaacacacacacacggggggcgaaaccctagcagcgccgccgcctttcctctccccctcccccacctcgccgccgccggagctcaccgccggaaagccggcgggcgagccatgatggcggcggcggggcctccttcatggcggtgacccctctcagcgcgggagaggcggcgaccgatcccggcgaggagacggcggatccagcgtcaccttcgccggatttggccatcccctggccagatccggccggagtgggtgctggtggcggaggaggccgcggagcggcgacaccggcgcgacgaggcggcggcgacggcgacggctacggcgcggcgacgcgacgacgacgacttgcacggcagccagcggcggccgccgcgacggtgagatgcgcgcgggcggcggtgctcgcaccgccgggggcgagcgacggctgcagcgccgccagccctggtggcagcaggccgagcgactgcggcgcgaggctcgcggacggcggtgactggcagcgcggctggtgatgggcaacggtggcggtgccagtggcagccgcggctgcggcctgaggcagcagcggcaacgcctgtcggtgcagaggcagaggcctcagagctcgtcgcatcggcggcgtcagcggctgctgtggcacggtggtgcgttcggcagcagcggctgcggtggcggtgaccacggtcgcaggaggcatgacggcctcggacgactagctgaggacatggcagacggctacatcggaccggcgtggcatcgtttggaggaggggtcggagaccggcttggcatagagtggcgcagccgatgacagcggaggccggctcggcgcgagaggcgcggccgatgaagggaggccagattggcgcgagaggcgcgtccggtggaggaggctggcttggcgcgaaaggcgcggccggcggtggaggaggcgacctcggtgcgaggaggagctaccggtggatgtggcgcggtctccggcgcatgaagactggccggcgggggacaccggtgcaggggtcccgcatgtcggcatagctggagaggtggtggagcatcggtgcgtcagccaaggattcgcaggtggtgatcggcaggtgaaaatctagtccggccttggccgggccgacaacgatggttcattccccctcctgagggcgttgtcgtgatgtctcacccttcaagggcggttgccggacgaaagcctagtctcggcttctttgaaccccgacggacggcggcggcggttttttccgtcgcttctcttcttgaagacgtcgtttttggcatcccttagagggcgatcttgtctgtgttcctttgttagtctagcagcggtcggtcacgcttagcggtggccggtccggtgctagccttctcccgggttgtgtgttggcgctgtcggtgtgcgggtggtggtatatttttttcctttttcctggttacaaccctatagagttgtaatcttgtaattttttcatgatctatcaatagaacttcgcaccgttaaaaaaaatttggaaaaccgtatttctccagcgtaaagtaataattatattaacaatcatttgaataatgaaaaaaggaacaggccactgatgcgagatggcgatgccgcagcctaaagtcgtcgtgccgattgctgtagctggccggaatggtccgcgtgaacagcagcgcgaggagatggctcagctgcctcagaggctgggagccggagctgcatagtgctacagcgaaaggcagcaggggaggcacgacgaaatgggtatgagaaaagcaccgtgacagcgtccctttctccggcgcggatacctacgtgagcgaaagtgcacatagggttggggtcggattgaagcacgcgggagcgggacagcggcaagcctgcaactgcaactgcaactgtatcagaaattcgtcgtatcagtccatcagaatcagaccgatctcctcgtgagctgagctgctgccacgcgccatttttactgccatctcgttcatcatcgatcctgtcaaaattacggctcaaatctccgttgatacaacatggtttggagtttggactgtaaattcgtgccgattcggaagcaatcagagagagatagagaggggatgggtggtgaggtgatgtcactgcttagttcctgcttcttgtccgtacccatccgccgctctgggaggccgcgagaattcattcgctcaccgcctcacgatacggacccccgatcgcgacgcatattccaatttatctcaaaatacacatattcccatttctctcatacattcgttcgcgcgagtgtgggctccgcaccggtccaccaacaacgtgctactcctacctgcaaccattgcactacaagtctaccacctcccttttaaaataattatcgctattaattaagtgatgtagtatattttaggatgtaacgagtacaatactactagtagtaacatcctaacagggcaacacaatgattaattaactcatcacctgcagttaattaattagtgagccgctagccctgactcacttttcggcttgtatcaacgctggcgatggccgcgatattctcgacgccgaccgctcggaccatcacatatacggcctggccatgatctctgcagcgcgacacgcaagcagtctcagtgcacacatgcaaccctatcatgcatccggtgcacagtgcaagccgttggatgtctgtcgattcagttcgtacgtacaccggcccgtgcgctacataatgcatgcatatgcacgtagtgtgatgtatgcaagctgtaggtgggtacatgtgtcgtggtttctttcgtaccgacccatggccgagtctgtacggccattaattgcacttggaattttctagtaaaacgggtcaatcttgattaattagccatgtgcttaccttctactccctccgtcctagaaaaaaagaatctagtactgaatgtgacatattctaaaacaatgaatctggacagatgtatatccaattcgtagtatgtatcacatccagtactatattgattttttatgggacggggggagtactcaattctaaaacaagttaatcattgatatatcctaataatataaatctggataaaagaaaatatcattatacatacatgatatgatttcattccaaaataatttaacttatatatagatcacattatattttaggttaagttattttagtacgaaggaagtagatctagaattggtggctaaaacacatcagctccatgcatggccagttggccacagaaaacatggtaataagtgcagggtgtgcagtacacgaaatgaaaccggagcaaatagcaaaatcgatcgtccacacctctttaatcactttagctgctttaatttggttatagtggatgaatatgcatgcatgcgggcgtgtgcagcagcagcagtagtaggtgcttgattgacagtttgagaatgagatccacactctaattaactctgaagctgacagcggaccccatgcttcctgctttccctgacagccgtcttctgcaattatcggagtcgaggtactccctccgtcaaaaaaatagacaaaatctgattttcgtgtccaacgtttgaccgttcgtcttatttaaaaaaattataaaaaaaattaaaaagataagtcacgtataaaatattaatcatgttttatcatctaacaacaatgaaaatactaattataaacaaatttcatatgagacggacagtcaaacgttggcacagaaacccacggtttgtctttttttttggacggagggattagctacctatatagtcatgctgatgcgtgtcatcgatcagagtttagtggccacataaggtgtgcactctgggaagccaaagagaagagagcagtacatgcatcgccatctcttatactccttccttccgtcccataatataagagattttgagtttttatttgtactctttgatcactcgtcttattcaaaaaaaaattagaattattattttttttgactttctttattatccaaagtattttaagcacaacttttcgttttttatatttgcacaaattttttgaataagacgagtggtcaaacattgcaagcaaaaactcaaaatcccttatattatatgacggagggaatactaatttctaaccctgatttgggtgttactttccacttggcaattcagccaactggcgtacattatactgtgtcttgtcatctgtcactctcctatctcaaaccagaaatcactttgccgtgcatgcaaaggcagagcaactccatgtgtagattcagtaaatcggtagtaacattagtcatcatgtatgatttagcttttcgaacatattgatctgatgtgcatgtcatgtaaatacagtcatcaagacaaatacgacgtcctcgtcttttaataaaggaaataaacctcatgtaagagagtcaagttagtcatcttcttcatttaaaccatcaaagaaacatcagagcaacttccgcacatttcttagataatgaaaaacaaataaacttcgctctctcgctcatacaagtacagccacccttgtattagccatgtcttggcagctactcaatcgactacaatctgcaggttgctagtacacaagaagaaggacaagaattacaaaattaagacaaatggatgggtcaagacaaaattaagacggccaagtacgtcatgtaaaagcgtcaagtcaatagtcctttttttccctaacatattgtcaaaacaccaaaggaattgaagttccacacgaacactagcccatccatgtagattccttggcagccacgctcaacaaatttatactatgcaaagaaagggagggaaaaaaattaattaagacaaatggatgtgtcaaaagttagctgaattcgtgcggcgcaagagagcagatgaccaaacaatgctagtcaactcaagtcatgcagctcccttgttataattaattaatcatcgtattcgtatatatattgatatactgaactaatctgtcgttgttgttgtgtggttgtcatgcatatactgtcatgcagcccaacgtttagtgcgatccgacgcaggcaagcacgttggctactttacaccataaaaaggcagttttttttaaagaggacaataaaaggcagttaagcactgagccagtcattacacacaacgctaatcttcgtcctttctcttgtcctgatctgcaaggaagagtatatacagttctgtgctagctaccactcatcagcctaagtgatcgagagatgtggatcgatttgatccaacattagtgctgtgtttaggccttaggtgcagaatcataatgacggattgcgaaagttagcaccgagtaagcagcagagtcgtttttagctggtggtggctggcgccgccgccgcgcgcgccggtacggtcttcttctccggcaccggtgcggtgatgggttggtgccttggcggaatccaactctgcactgcagtctgctctgcactctggtcgacgcgtgtagaggacaggacggaaggcccaacaagtgagcaggtaggtctcgacaatgtgtttgggcctttagaagtcatgggcccaagcgatcaagttgcgggaagggaaagaagtccatttccagtccctctatagttcaaaatgacaaaactgcaactttaatgagaaaactatcagtttgctgcaacattagcggcatgtttcagtttgctgcaataatagcgtgaaaaattatcacaaaactgtaacttttatgttatatgctgctacagtacatatgtcgtggagggccgccctgcatgccggtgtgcttaggaaaacggagaaaagaaaaaggaagggcgaagaagaagaaaaggcactgacatgtggaccccaccacgccgcatcagcgaaaatcgcctttaataatactgtctgggagtcattttgtacctgttttaattgttgaaaatgctgttcgtcggtcgaccgacgggggagcaaaaaatcgggcgctccccccgcggtccgtctctcacgcacatgcatgtatattctgggtcccaccatgatctttattcccacctaccatgtgtctccatcacatactccattgcaacaaatcgctcacatattttgaaaaccctttattaagggaattcgtttcattttttgttccaccaaaaatatttcaactaatgtattcacaatgtttcactatgtatagatataatgttgcagtgaaccaaaacattctttcacaactaatcacctacatattttggaaaaccctctatcaggcccggcctgagggcgtcgagcagccatgggcccccacctacccccgaccctcaccccccccccccccccctccccctgcggccggtagagcagcacgagcgcgatggccgacggggggatccact

SEQ ID NO: 8639 - DNA, 11872 bp, Oryza sativa
ggattcttgtaaaaggaatattgcaaagcattattatggctgttgttgctattccagctaaagaacccagaccaagatttttccaaagaatataagttgctagtgtaatctgtataggcatcatgaagaccatgttcacataccatgcaacattaacaatcctctcgatgtcaacactcacatagttaattatctcccctgaggtatgtttctgccttgactggcttgataaataaaggaccttttggtatacctgagatatcagagatgttcttaggcgcaaataaacctgtagacttccaaagaaccattgtctgtaagcaagagtttcaatagccttcgcacctacaaatacaagaacaagagagtagcctctttcaaatccattatctccacttagatagcccacgaagtccttgattaagtatgcccccacaaaggaggcgactacacttaggactccaaaggttgcattgagtgccgccttcttccaaatgagaaggaaggctgctttacaaatcgatgaaactgtcagaggaaaattccctttcacaatgatattactgaatattctggagatgtgttgggcactttcctcctcaccaacatctggtatgtcatcctcattcaaaggcttattggcacctttagcaagaagaccattcatccaagagaaagtgaaatgttgtgaaatagttgcctctccataagaagatttcctcctgtttttcacattttcttcttttgaagcatctggaaatggttcttgtgtgccgcaggtgaattggatccctgttttgcaatgaacaaacgtgtatttgtacaaaaggagaattaaaaaaatctgatatttcttctggttcaaatgataattgacacaagtgtgccattttgcaaaaaccatacctttaatttcattttatggtacgtatgccaagtaaaacttgtgaactacactatttagttgcttagtcataaagaactcaagtattctttttttgaggaaaagccttagaagaggacagggagagcctgttttcattaaagaagaagagacttggcccagtttttgaggggaaaccaggcccaaaaacctcagaactcaagtattctattatatgaaacttaataaactgcgtcaaagctgtggtcttcttttctgttgttgcacatcgcaagtttaagcctgaaatatgttatttttccatgttgcccatttctcaataatggaagctttattaaaactcagtcaaatacaacaagatgatacattctaattgagcccactcccgacctctgcaagaaatgcacacagccacaaaacatgacctatctagacccccattgccttcttcatgctcttaatttctgtaacatactgttcacctgtctggctatctgggatttttcaaggtgtacacctacggtcattttgatggaaggtgaaggggaattacctcaactgaacagaggatgctggttatacagaactactaacatcgtaagaacattctatgattctgatgcagacatacagtacagttttaatctaatcaaggaggacgccatatgtgggacaccgcagcgaagtgtaaggagtcctagaacatctaccttaggagttaagagaatctatgagattgtatgtataaacatcaggtttctgcaaatactcttatctaaattcctaatgcctgtattgcaaatacatactttcagttcgcattaaagtgtgatagtatgtatgcacctttgttctcaggtagcttggcaaaatggcaggtcagacggatcaagctgctcccaggtattgtgttctatatatcattttcttcttgtgataatgttgtattgaaatgctccatcaaggagcgcctttataattcctacgtgtaggttaatcttatgcagtattattgattctattgtgtcccaaaaaatactatctattcaacttgctggttctaccgtatctttgtggggacatagtgaaatggttgtgatctgctccggaaggtaggaattccttccaaagtatttataaatgactaggaataattatttgaaaaacttctatttcagtagaaagcacacgataaagcaagattccattcacatgagcatgacaaaaattagcatgaatcttacctgattgatttgcagtttctttgtacaccatgttgaagccgttggcttcagctactgtttcgactagagattgtccttagctgctgaacagtaacattagtgtaaatcagcttacaacttagcacgggggactgccttgctagtagtttccattaggttatatacttagatgtcgtacttggattagtacagtcattaagtgcttaagtgcgtgtaaagtatgcgccctctaatgctcgattacttggctaacttttctggctcgacgcgtgtaaagacagtatcgtatgattcggatccaaccttgaggctcagatcaatgacagatcggcaccggtgtaccaatctgaatctgtgttgtggtggatgatcaaacgatcgagtataaatattccgttatctaatgtgatagctctgctttcattcgctacatgcaaccttttcttcataacaagtttttgtaaacttataaagctataacatatgtctacataaactagttcatggttaaaaaaatctacgctacagtggtatttacaactctgtttacatggtcactcacttcaggtcgacatgaaaaagatcgatttatcaagccggttaaaataattgcctaccatagtacttaaataactcaaactatcaaagttcaaagataatggtgtcttagttcgctcgcacgataggtaggccccaagttgatttgtgagaattgatagacatgtgtgcgcacctagagtagtggaatggcatggaagaatccggacacatacttgtttggtgccggaacaagttttagtttaggcaatttgtaaaaggttagtaaaaaaaaagttcatcgatccagtctacgaacgtggttgcatacaagtgtgataagcactggtggagaaaggggctttactcccggttttcaaaccgggactaccaatccgggactaaagatcactatctttagttccgggtgaaaaaaccgggagtaaaaatacatctgttaccaaccgggactaaagatagagctagcctagctagctagatccggttgctctattatttttttttcttcattatgtttttaatatattgattttactatatccccatcccaaaatcccaaataaattatccccaatcctcaaattccaaatcggccatattcaaatagatcacaaaatcttaaaacaaaattacatcacaacttctacaaaattcatcataaatacatcacatattcacggacatcatacacaaatcaaatacacagatccgaatcacaaattcttaaaaaattattgaattaaaacacaggctgtcgactgctgccgcgccggccgccggcgcgccacccgccacaaggccccgcggtccaccgccgcgccgctgcgccgccccctgctgcgaggcctccgccccgccgcgccgcccaaggctgcccgggcctccgccgccctccgcgaggccgccggcccccgatggatactgggaggtaaccagagcagttacaggccgcgttagagcggacgacgaacaatggcttattggggagggaaggagaggagttagaggagaggaggaggaggaagaggaagagatgggatgaagagataaggtcagtggaggaagaggtgaagagataaggctgcccgtctcctcctcctcgatctctcagatggcagatgcctcgtactctccgccacaatcttttgttccggttggtattaccaaccgtgactaaaaatagatctttagtctcggttagtaacaccaaccggaactaaagatagtaggcatcttttttcccggttagtgttaccaatcgggactaaaaatagatctttagtcccgattggtgttagattaaaaagcagctctaaacttttgaactgggactaaagataatatttaatcccggtttttattgcaaccgggactattgtggattttggctaaccgagcaaagatcgtttctccaccagtgaaagttactctcaaaactaattcaataacatgtggtgagcaatgtttgttatcataaagtgataaaccattgccgtgacaatgaccacactcgtgacggtaagcagggaaattctgtatggtggcttcccaaaataaatcaaacaattattccctctatactaaaacataaggatttctagaacagtgtttgtattgtttgtgatatttaaacacacattgtattgtttgcactcacaaatacactgtaaagtataaatttactagcttaaaaggtaataggattagtttcgtatggaacgcaccgtttgaaaaaagtgctaaagaaaccgaggtaaactctataccttaatgagagaagaacagtgcctaccatttgtaatttttatccatagttcttcgtatattttatattatgagacgttttgaattttttttaaaattaatcttctctgagttttattaaatttgtaaaaaaaaagcaacatctataatactaattggcttcattaaattcaatgttggatactttgtctgtttcatacgtaagtcattctaacatttcccacattcatatatatgtatatatatctagatttattaacatatatataaatatggaaaatgctaaaaagtcttacattatgaaatggagggagtatattttaataatatatttgttttatctttaaaatgttacttttttatataaatttagttaaaacgtcttaaaaaagagagggtagcaaactatacctggttaccatgcgggagtcatacggcctcatcttttcgtttatgcttatacttattagctaaattttgaattttcaacattaaatttggagttgaatttagggttttttcagcctttgcttttagatcactaagaatacgtatataaagtctttattcacatattattttccgtttgtaaatatgcagtttcgtttattccgcgaataagcgaaacgatggggccagtatactcgtatcattcgttgttaagggaactagctgttgttgcaccgtaacgccgtagcggccggctgctgcagaaaaccaagccccaactttttctgaatggcaaccacatctagcattactaccgagcgaagctgaatcaacaacaacaaaaaaacacacacacacacacagacaccactaccacatatacgcgcgtatcgtccttgtagaaatcagaatcggccgacatgatcgcgactttttcctgcgctgtatggtgtgtgagtgtgagccacattggctaataaaaaaaacgagatttgaaatgagaaatgtccctccaacattttttaaaaagaaattacgatttgaaggaagatgtttccctccaagtattttttaagagaaagttgtgaatgtgttaagaattgaacatgaaatcttgaagttaaaactacaccccttgcaactgcattattaacaatgtgagctacattgctaataagaaactgttatactgctaaaacactgttgtggcaataagctaagccaaccacacacaatgaaccataccacagttaccacagttaagttaacgtgacaaaggccatgttcggaactataaattctcacttttactcgcatgtttcgctatgcacatgtttttcgaaccgtaaacgatatgttttataataaaataaaagttattttaaaaaatcatattaatattttctctaaaagaaaaactaaaactttattaattatattatgagttaatggactacctcgtttttcgtgcgagcataagcttctttcgcaaacacagccacgaagttatacaaattttgacaatttgaccctttgcaaaaattaattatacaaatgaaccgtggccaaaacttattttaaaaatgacccttttgttcagtgcgaaatcccatggcgctgaaattagacacctcagcgccaaatagcacggcgctgaatacacattggcgcgccgactcagactcccatccacggtggcacgacattcaattccagttgacgtggcgctgaggtgtctaagttcagcgccataggatttggcgatgaacaaaagggttattttttaaataagttttggccatggttcatttgtataattagtttttgtaagagcaagtttaatagtatagccaactactaattccaaattatctatagccaatgtaatagccaattcatacaatacttgcttactatatatactattaatacctgatcccacctgtcatacacacgttacgtcttggagtccgtgctatggttacagatctgtagtccgttactcttctctctcttcctttatctctttaaaatattactcttctctctcttcctttatctctttaaaatatgtttatagttggcttatagcctgctattgtacctactctaaagggtcaaattgccaaaatttgtgcacaaagttaagcactgaaccaaccactggctcacttggcacgccagttttttttaagagagaaaattgtcagataggcaatgtggtgcaagcggttagatcaacgatggacgatcccgattagcccgcctcgcggttcatccggagaatcccaatattctgaccgccaccgtgtccctctacccgccgtcacccctgggcttcgccgccggcgagcgaaccccgccgctccccttccgaatcccgggccgacattgcaagccggtgggcatcgccagttcgccaccgccatctggcttctgccctgaccctcccgctcggatcagcgcgtgttaccgcggcgccggatgaaccgcgaacgccgcctgcctgctcgacggaatgcctgagtggagtgaggcacgctggcgcgtaagtcccctcgctgaaaatctcgctccgttgtattacctttatttgtttttcaagcaattacattcggactatgagtagcttcgctgcattgcatgagttgggggaaagtttcccccacttcagcttgagctcatacttacagtactctacataaattgtgtttcttttctttacttggggatcatcctgaacctaagagctagccaacatcaacggtaggccccttagttggtgtatatttctgtgggttttgtgcgttctttgtcatttgggatcgtgtggagtgcggcccctttctacccaagtgtgttgttgtagtgcgcttggttggcttcatgctgttctcctcgcttttcaaattgtagtgtgccgcactgctaaaagccctttgatctccgtgaatactcctttatgagcctagagaattcagagttctcgttctccagtaatttcaatggtgtgtcgtactctatgattcttcctgctcgtcagataagagcgcacaatttagtggcatgtaaaaaactggcatgtgtttgtcaagggtgtggcttaccttcactgaagacaagaatgagatcactgtcaataactgtgtgaattctatgtgctattgtcagcacggtgcaatccctgaattcatcgcggattgtttcttggataattgcatctgtagaggagtccactgaagcagttgcctcatcaaggatgagaacattacttcgttttagcagaaccctcccaaggcaaaacaactgtctctgcccaacgctccaattttccccattttcgacaactgcagaccaaatcttatttgatcatttcataacttgtggtaggatttctaatctgatccctacttttctcaaattttaccactgaacccaaaaaggatacattacctgttgaatccagcttcttcgggctctgtcgaactatatcaccaagctggcatttatccaatatctggccagaaggagattaaacaagatagctaatcaaataatagaataattgtattctgataaaaaaattaatagaagaattaagtttcgttttctatttgacacagttactactcactatacatcacattcttacagtcttactatatccatattgatttcatagcaggtacccattatccatacatagcaaggtgttatttaacatggattatgatttataagcaataatagctatgatatggctaatgatatgtagagtaaagctctctacttcatatgatgaaaaacattttatttatcatgaaagtgtgcatagttggttaattacctcccatatacgttgatcagagtattcattcactggatccagattccctctcactgtgccttcaaacattgtaggatcctgtggaatgatgctaagtctgcctcgtaaatcatgtaaccctattctgcaaatgtcaatattgtctatctcaattgttccctcccttggttcaacaatccgaaaaagtgcttgaatcaaagttgactttccgcttccagtccgtcctacaatccccacctttttccttcctggaattgtacatgatatgtttctcagaacagatgggagatgctctgcatatcgaacctgtaaaatagtaaaagtgaagacggcatttggatggcttcatttgagcaaagactactaatttaagaaaatttataaataaactttccttttattgtaatattgatttctttcattatacagaaatagaaataaattgtcacttttatcatttctgtttccgattcaagacactctttttctcttatgcaaacatataaaagtgaaaccatgacaagcctacttcagagatttttgtatgcgttcttgttctcctcttcaatagaatattatcaggaaataaagcaccttcctaagatatgttttccttttgaaaatttttcccgagtagtaattttcatttaggcatttattgttctttttcaaacttatattgttttctggtgaactcatcctgatgataaaatttattttatttctgctaaataaaattatatttgcattataaactttcttgtctagattcacagctcatagcaccattgcacttacctccaagcatcttatattgatatttccatcaagtggccagttgtttggggggcggcgataatcaactactagaggagcctcactagggatccttgagtactgcaaaattctttcaactgatatcattttgttctctgtgttgcagatgttccaaataatagatgccaactgtgagttgaggttcaatgcataggtcaccgcaagtccagcaatgcctgcatgtacaatatataagtttgaaaacagccaacatagagtgacttaatgcttccataatcaccaagagcctaagttcttcttagagcttacttggatttataaaaccttcaggaaggctcactagcagggtcaaagagaaagcaaagacaaagttggataacatgtttagcctgaaagaaagccattccattgaagaaatgttatggaaccatggccgggagtgattgtcgacaagtccaaggtttgattttctgaaacgatctttttgtccatatgctcttatacttgatgctcctgtaagcgattctgcaaaatggtgtaggatgggagccctttggatttgtgataaacgagccaattctcttgctgttggtatgtagtatcgctgcacattacacagagtatatggtttcagtattttgtgaatgaacgctataatttatggagaaaaggtgtacctatagcttcttggaactcatcgtggtgcacagagtgacttttgcacatggtgctatggtagtacaaaaggctagtaataaagtttttttttcttgttgggagttcatacctgacacatgaaacagaccaccgttactggaacgaagatggcaaaaactggccaggcaacctgggacataacaccaatggtccccagaatttgtatgactgaaaatacgcaccaaccaagcttgtttgctatttccagatctagaacactttggtcattggaggcctgttaaagcataaatacacacctattagtttaggggtggagagagtacgtgatgcagtataaaatggtttacaaactaagtcagtcttaaccctgttcagaattcttccagtaggcgtggagtcaaagaaggacattggggctcgcatgatgcagtggagcatgttcttgaagaacttttctgatgttagtagcccaattagtgaaacaagcatggaccgagcaaagacacacaaggcacttccaattgacaatgctatgtatacggcaaacatgagccctaatccgacagttggcctggttgctgatgttggaggagatgcccatgccatccaatagttgcttgctacctgaaatatttggaagaaggactgtgctgcgattgtgactggcactaaggcacctccataaactgccctcaggtatgcccagtaaaccttcttgccaatacctcccttttctcgctcttcatcttgtgttaacctccctttctcattgatgtcctgtgatacatcatgtgcagactcttgctttgttataccctgaatttgatcatctgtttcattttctgcttcaaactcatcatcagtatctgctggtttactgttctcagtggatgtcactctgctagaactttcggcatttatgacagactcaagagcctggctgtgggctcccactatggcttcaaatcctatgttctgttgaagaagctcatcaaatttccctttctgaacaatgttcccatcctgcatcacctattttttgcatcgacgtgttattatttaacaacactaaccttttgacatgattatctaccaaaaagtattttagatacataccagtataaggtcagcggtaggaagaaattcaacttggtgggtcacatacagtattgttttgtctttaagaattcccatcaggcaatcctgccaaggcaatttgtttcatttgcttagagtctaacgattattggtctaaaagtaacgaaataggttttgcccttttttttattaacgttatgccacgaagaatggagttaatgccacgaagaatggagttaagacataaccttcatacttgagcatttattgaaagttttaaacaaacagaacaaaccttgaaaagttggcttccagtatgagcatccactgcactgaaaggatcatcaaaaaggtatatgtctgcatcttcatatactgaccttgctatctgaattcgttgtttctgtccaccactcatgttaattcctctttcaccaatctccgtcaaatcaccatttgcaaacaactcaagatctttagtcagcgcacaagcttgtattatcttgtcatacttttctttgtcatatggatttccaaacagaatgttgtccctgatgttcccagacaggatccaggcgctttgaggaacatatgctttgctcccactgaccctcacagtcccagctagctttggcatctccccaagtatggatgataatagacttgattttccagatccgaccattccacagattgctactttcatccctctttttacttttagttctacgtctttcagagttggagatgttgtctcgagttcccagctgaatattccatgatcaatctcaatatcatattctgtgtcattcctgggtatttcaataactgcatcatatttcaattcttcttcctggaggtatttggccaccctatcacctgaaacttttccttgagcaaacactgaaagcaagtcgggaagagtgaagattggatcttgtagcatccggaatgtagcaagagcaggccaaacagtaccagcagtcaaaggaattcccatcaatatgcatgcgcccaatggtaaggaggata

SEQ ID NO: 8640 - DNA, 29856 bp, Oryza sativa
gacgtcacggctgatgagacgagaaacaccgcctgcgcggcacaattgactgcgagtctgccactctgcaacctgcacgcggccgatgtaaattcccctggaaaagacaatgtgaaaagcgtcaaactcgcacagactccgtggccactcctccctgttcatttcaccggcgtgttcagtatctgcaccctgcagcaagcagtcaccgccactggatgcgtcgcgatggagcgagcgaacaataatctaaaagccggttttctgctggtgccgtgcgagcgttgaaaggtggggggcgggtggcacacggtgtggcggcgacccggaggaggagcggatcggataagaacgagtaggggctgctacgagacgagacgagcaatatagtctccccgcaaagcatccgggcccctgttggtttaccaccaccacccggtgcggttcggtgatagttgcaaacctttctccggtctacaaagacctcagctttcctacctccacttcttctttcttccacaaagcccattccttttcctcccgttcttctcccctcccttctttttccacccactcgaatcctcccttcacattctagttctagctccgcacctttgctgcgcgcgcggatttggttcagggtttggaaatggcaatagacgatgaatcgccgctcagaatcaataccaccagaggcggcgccatggtaacgtgatttctctttttcttgctggtgttggctcgatcggtttgttcgttgttgcttttttctttcttggctgattgattgatcctaatggcggcgttggatcgaatgcggcagggaggaggaggggagtgcgacggggcggagaaccagcggtggccgccatggctgaagccgctgctggcgacgagcttcttcggccaatgcaagctgcacgcggactcgcacaagagcgagtgcaacatgtactgcctcgactgcatgaacggcgcgctctgctcgcagtgcctctcctaccaccgcgaccaccacgccatccaggtgagcaagcaagcaagcctcggcatttcttccttctcggcattggattagctggagcagctgattgcaccctttctttggaagaaacggcagctgagctgctgctcctctgttcggttcccattggaacactcaaagagctaagcgaagcttaactcgaacgagaaaaaggtctcttgagacttgcagttgcagttgtgtccagttcaaccaacggcctctctttccccacacgcattaggaacagtccaaggatcggaataaccaactttcttgaattggcagcgaatgcctctgttctgttccatctccagcagcttatctctgacgaagacgatgctttctctttttggtgttgtgcgcagatacggaggtcctcctaccacgacgtgatccgggtgtcggagatacagaaagtgctggacatcaccggcgtgcagacgtacatcatcaacagcgcgcgcgtcgtgttcctcaacgagcgcccccagccgaggcccggcaagggcgtcaccaacacctgcgaggtctgcgagcgcagcctgctcgacaccttccgcttctgctccctcggctgcaaggtacgttacgtccccccgttggccgccgccgcacgaacacctggtgttgcatcgcattgtgctgacagatgccttcttggacgcgcagatcgtcggcacctccggcgactaccgcggccggaagaggcacgccggcggcggcatcaagaagacgaagaagctgcacaagggcgcggcggcggtgccgtcggactcggacgactcctccacgaccacaagcggcgggagcgacaagagcagcgtggtgcagagcttcaccccgtccacgcctccggcgaccgccaacagctaccgcaccggcaagcgtcgcaagggcgtcccgcaccggtcgccgttcggcagcctcatggtggagttctaaagcagggcagaagcaatgccgccatgccggcctcgcccccgaaacagtggtacactgtagcatacacatatccatatctatctctatagttatagcatacatagccagtgaaaaggaggagcttagtaataacaggatcccccattgcacccctgtgcttctggatgaggaggccggtgcaaatgcaatgtgggacagttacttcatagttacagttactgtgctagtaacaacggtttgggtttgggttctctcttgtggaagaggagaggaggtagtagttactccctgtcataactactaagttttgctgaaaccttataggtctttattactcttttagttactctgtgtttgatatggtagatgtacatatatgtatatcacagatggtggggggaatggtagtaggagatggtgctcccggtgttcatattcgtgcttgcctgtaataaagatgagaatgctgctcctgatggccttcaatgtcagtcagtaatttccttctctgttttgcattgcttggtttctgcttcttcaccccttcttcccttgtactgtagtacagcaattgggagtggctccggtgaacgagatcgtgcaatgcacggagaattgttgagaactagggtaatgcgacttgagattcagagctctgtagtactgtatgtttgcaggtgaaggaatggctgctgtggctataggacggggtcgatcaagttgcgcccgccgtgcggcccccgcctaactccattgacccgccgtttggcctgtggaaagcggccgcccggtgatgccgacgttgtcatcatcatcatcgtccatgttggttgcttcctcccatacgggagaggagccatccgtccaaccgccgtccgggcatttaacgcggcagtggtgggcacactctccctctctctctctctctctctctctctctctctctctctctctcaataaagagggatcgatctagaggcgagatccgtcgtacaatgcccaattatacgtgtatatactggcatgccacgtgcgtgtttgtatatatatatgtagactcgagattgagattcccaatcgagggaaaggtgaggtgcacgcgccggacggcccctgccgtaggaggatgccggggcgaatgcgtgcatgtgtccgtccgtccgtcccgttgtgcggcgcacacgcgcgcaccgtcggcgttcggcagcgcggcgcaaaatggtgacaggcgggtggtgtgggaggtgggctccgtggatctgagttcccccatgctcccgtgtcgcgcccgtcgggattggatcgatccgccgctggcgaattcaccgcggcgcgcgcgggcttgagccgagcccatcacgcacgacacggccgttctgcccctgcagccgcgcgcgtggcgtgttgccaccccccgcactcaacggcccccgtatcgcacgcacaaacacacacgcgacgactttttccctcccacgccgccgcggtgatgtcacgggctcacggcccccgcttcctcctgggcgacctaacccctcacgtctcgccgtgtcgcggccggtcgcgggcgccgtccgtgacgcggccgtgtggatcactacgggtgggggggggggagggacgcagattgcggtggggttaggttttttccgctgatgcgtgatgggccacacgcgggcgctcggccggtccggtggtggatggatcggcgagcccgagcgcgaggaggatttggacgcggacgtggatcggggtagatcgcgcgtaagctttgggatatttccgagtttctattggctttccacaatgaaagcaacgcgggggccgggccaccgtacttgcttcgtttattctatggcaagtgttaggcggcacgggctgccttccacggaatctttgccaacagcggctgacaggtgggcccatcagtgacgctaggcacagtgacaaaatgtggccattcattcaaagttcagttgattataactgtcactgtgaaactgtggtggcttaatgggggttcagctaactgctaaccacgccattgagagggatccgattcaggtgcagtagctagtgtgactgcaagataagcagtcacattagcatcacatgattcaaaatggacgttccagatatatctgagcactgtagcaaaacactgtagcgatttactgtagaaaaggaactgttctgattttactgtgctgaatccttttaggccgttagattttgacatggagggcttggattgtgtgcagtagttaccatgcagtcctagtagctactgcatttgatctcaatcccattgagagcatatttctctccttgcctttttctgctatgcatttgtgagtggtcactggtcagtgggtggatggactgttggagttcatggcttcatggccaccattttgtcatcatatctccacacaaaggaattccccccaagcaaatgtgatagataatcgagagctgtagtggtgtggtgacagtcagtagtatcccactccttcgtgggagcacctcttttcgatcagataagttcagaggtagaacaagaaggttcataaataagagaaaacaaatgaaaagttgtggaggcaatagatcctgagcaatctttgtgacagggagagaggcataggatattagcatgaggaaaaaagtgtatgcacatacaaaatcagtagccttttaatatctcatgagccccctaaactcttactgcgctctatagttctttgtatagtccatcagatcgctttcctcgctgcagaattcacaaggcacgggcagccagtgttttgtttttcctccctcgctttgaagtccaacgaagaaaagttcagagatgtgtgactttggtgaggccaagtggtgtcggtattttcctcacaatatgcatactagttcaaaagggggacgttgaaaggttctgcaccaaaactaggtcccaggaatcaggcgttgtcaggaagctccttccttaagaaaccagcaaagctaaaaataatgcccgggtcctactgaaattaggcctgaatcaaatgacagtcatgataagctcctagcaggtgatcttagaatagaaacgacactagctacgtacattgtttctatgccaccaatggcacaagtcctcctggaccggtttgttatggcaaggctgtgtgtagttgcctccagttcctgaagttactttggtcttattatggagatggacactggatcttgacgtctgctctgtcggtctagcccaatcgtagcggaatgaggagacattgatactctgacagaggatacgatgcagaatgcagtgataagggcagtaccctcgatctactccagtaaaacaaaggcagtagtaggcccgtagtaaaaaaacagtatcgaatactcacccatatttagtggttaatagtaactggatatgcatatgcaccttcggatttggacgaaccaaatgcatttatagcacccagaaatatggttacttgttattcgtcaggcaacaggagcaatcttttttttttttgagaactgcaacaggagcaatcttgttattccttcagtgtaactgtttgtttgacaaggtacacttttgaagatgcgctgaatctggatgttctggtactttatatcctagcatgactgtgagtttggagtatcagtggatggccatgacatgtgtgaaaatatttcaagacattttgtgccatatgatgtttgcaattacagccttgcaggactgcaggttagcctctcactgtctcacaccactaccatagagaagaaagaataatcttcatcaaacagtcgaacccgtgaacaatcgatgatcttgacaggatcaacaagatggacaactaattttttggtccttggtctacgaattcatctattcatgagacatgataggattcaattcttgcacatccctatatggtctacgacgaacacgcagctaaccattattttcctcacttggattgggccccaaacatagggctatccactgggccgacgcaacgggccgaattacgatggcacacggccgtggcgaatcgaaactgggtataagcgtcgccgcgaccaccacatcgccgcctcacgttatccgcgagcgaaccaatggcggcgctctccctcgcgcgaagccccccccaccaccaccacgccgcggcggcgctcgcgctcccggccccgcgcattccccggctcgcgccgctcctccgcacccctcgccgcccccacccgctcatcgacatccgccgcctcccggccgccgcggtcgcggcctcctcgcctcccgaggcgcaggcggtcgaggatggtgaggaggaggaggaggaggggggagagaagcggcggaagctgtacgtggccaacatcccctggtccttccccgcgccggagatcgagaagctcttcgcgcagtgcggcgccgtcaaggacgtcgaggtgagtaaccggtacggcccagttgccatgcttatggaggcgtagctttgagttctgggctatggtgttctgagacacgcgtggcttttttttttttttgggtgaaggtgatcaaggggaaggatgggaagaagaaggggttcgcgttcgtcacgatggcaacggcggaggaggccgccgctgctgtggagaagctcaactccctcgtgagtttgtttactgttttgatttagcgtatgaaaacttcgcgctagtctatcgattagaatatgataatacacatgcactggatatcggattgatagagcacaaatgcggctaacgccctgtttagattcaaactttttttttaaacttacaacttttccgtcacatctaacttccctacacacacaaatttccaacttctccgtcacatcatttcaatttcttcaaactttcaattttagtgtggaactaaacacaacctaaatgctatttttcgcacgcaaagtggaaaatggttgcaaattgcgatgcatgtttagatgtgtctgttcatcttactttccttcaatccccacaggatgaggactaaacatggagacattgctatttcatgaatacatctggatgaggtctagggttatacttcgatccccacatccccatagacaaagctgaaaaaaaataatgaaaacacacttttatatatgcaaaaatcatattggctacttgtttctattagtggagggatggatgcctataaatggtggaaattcaataatttgattatatagtacaagcttatattatggtagactcaaaatttctcacaatagtatcagtcaggtacagttgaagtattgttcagtgatcttatcatcaacatgctagcagcttgaagtcagatactggcggtcctgacaagaatgatatagacttatatgtatctaagctcctgacaagaatgatatagacttatatgtatctaagctttcgtggtactcagcgatggagatcttattactagtttctgcatcactgatcttttgcaggatgtcatgggaaggaccatcagggtggagttttcaaagagtttcagaaaacctgctcctcctcctcctccgggcacaattttggagaggcacaaactttatgtgtccaatctcccatggaaagcaagggctcccaatatgaaggagtttttctcaaaatttaatccactttctgctaaggtggtctttgatagcccatcaggaaaatcagctggttatggttttgtttcttttgggacaaaagaggaagccgaagctgctctcactgaactcgatgggaaggtgataactacatggactttgccttccaattttacattttataccaagaatgataactgatcatttataaattaacttctgcaatgttgtttaaattatcgattgttgttaaagatttcccattaggcatattaagtaatgtactaacctttagtagtttctgccaccttccccccaattttttgacttcctatgaaataagatgctatatatgtaagattgcaagcacattggacaccatggtattaaagtttacatttctttgtcatgcaggagcttatgggaagacctgttcgtttgagatggcgacaaagtgtagatgattcggatgacagtgtaaaggctgatggtgaaattgaagatgcaaatgttgatggcgaggctgaaggtgtcactgataatggtactaaggatcatggtgaagataaacaggaatagtttaacaatactgtgtttggactcggagaaagttaccagcagcctcattaatagtacatatgtggagcctcattgtacagctacaagttttttacatttcctggtgcgtgactaatataatctaacttagcacctcatggttgatgcttcatagtcacactagatgattgaacttgttttatggtggaaagttccatttcttaacacgccaaaaaaaatcagtaatcttgtttcacctgctttatttagctcaactgcacattttcgcctgcatatatttataaaaaacccaaaacttcatgtttttatcatttgtaccaatcaatctttaatgcactgccacatggacacctaatatgcaatttggcgagcatctctatgtttttatctgccagaattggcagtatattatcatttaccattaaatgtctcttgttcgttaccatgattccataataatgtgagattgaaaaaaaatgcggtgctcaggcgaataatttgttgtttgagataaactgtgtcatgtagacacgccataatgttatgacaccatgttactttacatgcaacaatttaccatacctttggcattgaacagaaattcagatatggctcttttatttgtagattttaaacagaggagatattgtaatcaaatactgcaatatatgtctgtggttgacggcttgacgctgataaggagatgaggaacaaaagggtgccacctctgacctaaggtgaaaaattgttgttgaatggattaatattttaaattttagtgttcattttcagtaatgtatttactctaattatctgtaatttattgtgatcatcaatcttctcctgctgagacaattgttgtctcagcaacttttaggtattccctatagtagtccttaatttgcccaatgaggtactattaaaatacaagttactcttttgtcgtggacatcacctgtggaaaggataaaaagggaaatcatcatgccgtttactgtccccttgagttttatttccaaatagccttcaagatttaactttgactattggtttcacataaaatatattattaacagccgtgaaaccaatgttgtgtgaaaacactttaagtatggatctattggtgttattattacacactcaataaagttgtagtttaattataattgttggtcaaagcctacaaagtttgactcgtaaaattaaatagttcttatcaaaatcaactgagggattgagggagtatgttcctggaacgtttctctcctattgctgcatatgattctctttaaccctggagaaccataacactatttttcatctctcatttttgtagtgattcttgtaatacaaatctgaaaatactaaaagacgggctgaagactcctagaggtctttacagaatattgcttagctttactagtgttttgatcatgcacagtatgcagtacctgaatcatatatgtttttgccaacagatatgcatgtgctagtcactgatggtatgctagtcataatagttgttgatgagaatcaggatacccgttgcatttaagaatagaagcatctagtacccagacactctcattgcttgctaatgatgcatctgcctattgaaatgctttcaaaacttaacgattcatggtaagcccaagaaaggtttccttcctattgcaagatgcctaggctaagaaaaaaatagttgaaattttcttgcaccttaactttagaccttccactaatcaaacactatggagtgtgttgaaaactttaagcacttaagtacttgcaacttattaggttttgatatactactagagcatgtactcgatggttgcatgcatatgttgaggtcttggaagtgtcatccctcgatagcctatggtacacaggatagtgtaactgaagtatttctctgatgaactgaaccaaatagagttgtcttgacaacattcttaatccacaagagtcaacaataggctgtttcgtgaaactgcttgaaacagttcttaaagagttatgatccagtttagtcccctggataagaagttgtaatatgatgatggtctgatgactacaaaagcaagccatgcgcctgactttatgtggcacctctccaaggaggaatcgagtggcaaataggagcatattttacttgttaaactttaaagcagtcgctcctgcaaattttaaggaactaatgtgggcctgattgatccaaactgagatctgattttcgcaaatatgtccaggagatttctttaagtttcttcataggagtgttgagtcaaaaagtcatccctatcagtgagattatacttttggaaaagaaaaggatactcctattcctctattacctggtccaccactttatctgactgcaacaaaacttcaattgatctatttgcatgttctggtaagcatgttcaattcgagggagatgtagaatttaaaaatacccaaaagggttaaaaatatggcttttgtagtgtgaagcaaatgttctttttgagaaatagttaatcatcttagagaaatctaaacataattttctttctcaaggtcatccctcataaggagtgagaatgaacttgatttgatagtcctctgtaaataacccaggaaaatagaccttagtattagaatgaaaccgcacagtttcctttatctacatatgcacttctctttcctatgtgtatcacgcagtgttattcctgctgtagcgtcatacggaagtgatgatttgatcactgaaagaagataattagacatatcaaatctgtctgttcttcacaatggggactatcgtattaaaagttgcttgttccgttcaaaaaaaaagttgcttctaaactatttctgcatatccatttccttttgtccgatttcttctgtataaaaccatgtttgttgttctggcttaattatctggaataaaattacattcatgtgattcatgaatgcattttgtcttgaatcttgatttgttcccttttctttagtgtaatgtggatacacggtgaggctaaactgcatttctgtgcatatattctgcttgtcgatccaaattgccgtctgaatctccctaacgctaccctttgacttgaaatagaagtatatggtctctttttaattttacaagttactaatgcaagctatcaaacgctttagtgggcacagcaatagtattagtgctggaaatggataagtatgacgaaagctgtcaaatagtgctagtaatcattgtctccatttacttgaacaaatcagattgtttcgggagatttcaagttgtactgttctacttagtcccaactctgtcattcttacaggataatgatgttttagctgctgggctttgatgaaagttacttctttggcacttaagaaaagctttcaagtatctctttcacaaaagcctacgtcatctttaaattaggaaccagataatgaaattcaggatcatctttaaattttgaactagagtaaactttagctttcagtcaccaaactaatgaaattctgtcacgctagttaaagatgagaatgcacatgaccttatcacgctgggactggtagaatctgatactgatagttgtcatttatcccgtacagtggaaccttgtttggctgcgctgcactgatgcagcaacgccaccttcctcgtgattcgtgaactattctgcccatgttttctattcgtactatagtgtgttttaatcataccaactggacatcctctcttcatcttctgatctgtgttggtgttgcaaaagagacggtggagtttaaagaggaaaggaacagcaacggggcaaaggaaaagagaagaaagaagacctgcagcacccaaaaacaaaagcagaggtcccccaacacaaggcaacaaccgctcaatcctccacccaaattaaaaggagaaaaatctttgctttgcaacaagcaaactcctctcgtcctctcagccagaggcatcatcttgatatctctccccatcctctcacgactcccgacaccaagaaagcaagtataccatggattgaacatatacacggccgtcacacatctgtctccttccctcgtctcctcaccaatgattcggtccagaaacttgcagagatcctctgctagtacttgcacagagcctcagaccgagcactgaggaagcttaacatctgcctatcttctttctagttcttccctttctctctgttgttgcagtcttgcagctgcccgatttcgtgttctacgaggcaatggcatcctctgctcctgcttgggtcccctacgagccaacgagagattgctctcaagggctgtgcagcatgtactgcccccagtggtgctacttcatcttccctccgccgccgcccttcgacgtcgccggcaccagcgccgacgactcctccggccctgtcttctcccctctcgtcattgcaatcatcggcgttctggccagcgccttcctcctcgtcagctattacaccttcatctccaagtactgtggcaccgttagctccctcagggggagggtcttcggctcgagctccggtggcgctgcttatggcggcggtgccggtagcggcggccgccacggccacgggcagtcgaggagccacgagtcatggaacgtctcgccgccgagcgggctggacgagaccctgatcaacaagatcacggtgtgcaagtaccggcgcggtgatgggttcgtccacaccaccgactgctcggtctgcctcggcgagttcagtgacggggagagcctccggctgctacccaggtgcagccatgccttccaccagcaatgcatcgacacttggctcaagtcacactccaattgccccctctgccgcgccaacatcaccttcgtcaccgtcgggttggcgtcgccggagccggagggctgtgctccaggcgagactggaggtgacaatacacacgaggtggttgtggtgatggatggcttggaaaatctttgtgaagagcagcaggaggcagtgagcagggccagcactgccgatgatgatcacgatgcgaaggacgtcgcagaggggatggaggaggccaatggcgcagccgagatcagagaagaaggctcgccgccaaagaggggcgcgtcgtcgtttgatcttcaccgtgacaaccgcatgtgcatcgccgacgttctgcaggaatccatggaagacgagctgacggcagccagggagagtggcctcctcgcaggcggcgctggcacgtcaagacggtgccatggcgagaacagcaagggaaggggaggccgcagccgacgtgcattgcagctgcaggacgccatggaggctctgccggggaagagattgccctccggtgggagatcctgcttcagcagcaagagcggcaggggaaaagattcagatcatccaatgtgaggcggtcagttctcattttcttactctaggatactggacaagcaacctttgtttgcatgatgagatgcgaatgggaaaaaattgcaaggacaatcatcataatctggagatgtcgtcttgtgataatgttgatctgctgcctcactccatgtgatgccactgccaaatcgatcctctgcagtgcttggttggtaatgtctcttttgttcatagttgagaaggacctgagagctgatctctctctctctctcttttgctctgccattttatacattacattgacttcccaccgttcaatttttctgtggagtttgttcttctgtgagttcactagttcagtaccaaggctaaaacttttctccaccttgcgttttctttggtttctacgcattggcatttaggtggtgcggaaaagtgaaggatcaaatggaatggtggtgtgaactaggcctatgagtttgacataaaaaagtagcttttgttttcttgcatacaagaatcatttttttcaggtaaaacccaggagaatcagtgtttagaacatcatcatagtactgatggacctattacttattatgggcatggaatttgcaggaacgggttggagtttgctgtgaaccacgaattagtagcttagtactgacaaagttgcaaactgacaccaaattagccacgagttactgcgtgtttctagtcaggtttcagtctggatcaaattggaatttgttttttctctcatctgctttgcccaaatctgttcgttttaggagaccagcggttgcttctctacctagttgcatatgtatagacaaagtagttcggttgaagtttctgtgacagcgatgaagctggcatcttctgactaggtcctattagccctgcataacatgcgtttccgatattccaaatctgtggtcggggattaggttgatgaaatataagtgaattatctttgcacacgttacaaactcactaatcacccctagtctttttatttgaagtgttggcttcccaaaatgaaactggtttgcttgcaactgctgtagctttgaccttcccattagtattccacgaaaatgagcttgaactccctctaggtagacgtctttatcacactcgcaagtgatctgcattattgaggttgatttgtggccattatttttcccactaaggcggcatcatctttgtgcatgcaagcactaaagaaatgttcctaatttatcagcaactaaggcaatggagaaagcatgggcatcctattcctgccttcctgctgcttttgtactttagacgagagcttgatttcgtcggtgactcggtgttgtgttttgccctgaaatgaaatagtttctagtcggcgaaagcactactaaagatgcgtcaagatggtgttttaattccggtgagttttgaacacaatgcaggtggtggacgattgagtgttggtacttttgctctctttgcgcctttgttccgaattcacgtgaggaattcaggattcggcggaagagactagagagcatgaaaaacaaagtcaaaaggggaaaagaggccggtggtggggtttggatggaaaaggagtgtaaattagtgagagcaagaataagaatgtgcacattgtgaacacgtgtgataattattcgaacacattaattcccatgatctaaaaggacatgactatctgtatgcattggagaattagcgaggacatgactagctgtcagtttgttatgactcttcaccatgattctctgatcccacatggacgatgtggattaggcgcgagcatcagccaaatcacggaacaggtgaataagggtgtgtttgtcagtgctccaatttctaattttaacttcataagttgtttctgaagtgaagttgtgaagcagcataaatcctgttccagctctttagtttatttttcttttaaggtaatgctgaaaccgtttacttgaacttaagtctgtcaaacctgccctaagattatgactccaactactcaaagaaaatcctgtgttcaattgggccggaccatgtgctaatctcaagcccataggctgtgtacctagtcggcccaacatggagggacaagcaaggataaaaaaaccctctcttcaccgtctcactcccccggattccacgtcgacttccgccgagaaaaccgcaaaacgcacacactcgacggcaaaaaaaaaaaaaaaccggctaggattacaacgggccgcatgttattgcacttacacgggcttttgccctacgccaccgacccccaaatcacccgactcgcctacgggaggggagagatcgatcgagatccgctacactttacagatttgttacaccggccgccgccgcgcgcctatcttgctaggtggccacgctaaccggaggcctccccggcgagcagcatctgcgacgccgcctcggcgtcgatgatgcagagcacgtggtgcaccgccgctgcgatgtcgtccaccgtcgccatgccgcacccttcctccacctgcaaatgcaaaatccacacacaaaaatcaaaggattgcttgatgccacaaatcacattcacatccggccaacgcaacacaaagtacacaaattaatgcccgcaaggcaaagtgggcgattcgagggaaatcaaacggcgattgataagcaaaggtattacacgggacagacagagaggctaccacgagtcgatcgcctagtcacacagacacagaggctccacaagcacaaagccgaggaggaaaaaagcgaggcacaggcgacgcttttcaatagagcgatcgtttcgtaaaggcagattctctgctgtaaataaaacagcgcaagaaaaggcggcagcagcacacaatgacacacaaaactctgtagccctttttttcttttctgctgagatttcgccttggcaatctactccccagcagaaagattctccgtgacagtgctgtccatcgtcctctctctccctccctctctctctaaacctatctaggagtataaaacatatatatataaaattctgcatctccctttgtgagtatgaagtgccatggcttgatatagtgcagcaccagtcgactggggcacatcaagttcagagctacgtactcttaccactgtagtactgtaccacagatacagagcacagagaaagaacacacccaaggggccaagggaagcaatggcctttccgccatggaatctctggtcaaaagcaatcggccatggcagatatggagcagcatcaacagcagcagcagcgagacgcaattctgatcagtgatcacccatgcaatagcctctactagtatagtaaaatacccccggggatgttggtctacgtacgatgggtaacagaggagaatttatgacacgtttattgttctcgtgtactacactatataggcagcaacagatgcatggagatgattttgcttccctgtgtggctggcgagtatggcctctcatgattgtcaagacgtgtgcagcgccagctgagccgcgtacacgcaagcacggtgtatgaggctcatggcctcacgcatcatcgatctgtacacatgtggagtcgtgttggccatatgctaagggggtgtttgggaactagggactaaatttagtccctctcacaaaaatataagtccctaccatagagacttatacttttgtgagagggactaaagtttagccccactttagtccctccaaccaaacaccacctaagacaatccgtttggtagtttgtatttgggtgtagtagtttgtatatctgagctgatcagaagtatggctgtctctcttgcaaacttggttggtcagtttgtcacatcaggtgctgcacatatgtactacctccgttcaaaaaaaaaaaagtcaaacctaagtttttgtgttcaactttgactgtccgtcttatatgaaatttttttataattcatatttttattgttgttagatgataatacatgattaatattttatgcatgacttgtctttttaatttttttcatatttttttaaataagacggacggttaaacgttggacataaaaactagggtttatctttttttgggacggaggaagtactctactactagtactagcaagtagattatagattattcgtgttattaatctaactcgcggacatctcatgcgtatcttatgtggagtatgtatcttggatgacgaaacttctcagccttttttttctgacggtttatgcttaaaaaggaaacgcaaaagcaacaatgggccatatttcagcaagaaaacggaggaatttttttggcagcagactcctgtgtatacgtaccttgacgctgatggagtagagggcaagcgagccgagggccgtgacgttgaggtggaggacggtgagccggagcgcctgcaggccggcgaccatcttgagcagctgccccggccgccgcgccgccatcacccggatgctggcgtgcgtctccacaaggctcacctcgatgtccgccactccggcgcggttctccgccgccgcgcccccgcccccgccgccgtcctgcgccgggttgtggcaccacacgtactgcgggtacgtgaagaaccgcgcgaacggcggtccatcagccgccgccgccgccgccgccgccgccggagtctcctgatcggccgcgctcgtggagtccgcggcatcacacttgggctcccgctgctgctgcggtggcggcggcggctgcatcagcagcgtgcgcttctgcgcctcgagggattgcagcagctgctcgagctccttcacgaaatcaatggcgccgccgacaatggacgcctggtcgccctacacgccgaccaattaaaagcaagcaagtgagcgacagtgaagtgcagagacgacagatcaaatcaacctagcatacctagcatcatcgcgattctagagcgaagcagttgtgtcagcgagagtaaactagaacagtaataatgttactatgattcaagcaatgataatgacatggagggggcatgcacattaatggcacaaagtggccgaggaacgtatgccccatggaggaattaatgattcattattgggatagcatgaaagagacctggaaattcctcaatattcagttgacgagaaagagcaaaaaaaaaagtgcttaaacatcacaaaagttgaacgaatctttcttaaaaaaaaagttggatgggtacataatggtacgatttttatactagagaaaaatcacagtgcttctcgccgaaacattctcttgccaactccagttcagcacaacccaaaatccaatgtccaaatgagaatcaagctagggagatgaaccctaaggatcagttctcacctcagatcagagttccaagttcagcgtacaggaaatgtagaatgttagtaagtgctagtgtacgtacccggtggacgtaggactccggcatgagcgaccggagcacggcgaggtactcgttcatctggcggcggcggttgcgctcgacggcaatgtgggtcatccgctggctctcggcgtcctcccggctcttgcagctcctcgcccgccgccgccgcttcctcctccccggctgctgagcctgcttcagcagctggtccacctccggcaccgccccggccgccacctgcaccctcgtctccgtccccgccgcgccgccggcattattattcccgaagaggaagctcgccggcggcacaaccgccgccgccgccgcggcggaggcgttgaacgtgtcgtagatgaggacgtcgccgccggcgctgcacagggtgtcaagcgccatgcccgattgaacgaacccgcgcgtggcctctcgtccgtgtcacgacgtgcaaatgcaacctctcctcctcctcccttcttgctgcctgccttggtagctaagctaagcttgttgccttcctcttcctcgaaagaatagataggatgcagcaagctagctagtgagagagcgcgagaccacaagcagctggcggcctggcgctcgcgttggtgctacgcgtgcgtctctagcgcaacatgggagggaggagaggaagctagctagcgcaagattgggcaataatatccatgcgagagcgagagagcagtggacgtcgcaggagctaagctctagctgccgcctgccgctgtgcctccctccctcctctctagcgtgcgtcgcagttgcaggcaggatttgggggggggggggggggggggcagatagaccgtggatatatcgatccctcctgctgcgcagtgcgcaccacgcaatgctccaagagattggcaccaaaagctcgctttctttgggcgtcgtcgcggtgaaatcttcgcgcgcggggagctagctagcagcgaccagcgaagctctctctccacgtgaggagagatgggtggtggatcgacaatgcttctgcttctgctgctgctgcttcggctgaaaaagtgagggagagactgggggtgggaagccgcggaaaggagagtggaggagacgaaagaggtgtggtctcactcactcacttatctttcatcagcgacacatctctctctggcctctgctgtgattttttttcttttttcttagctttgtttgagatatgagtttgtggggaaactattctaatccctcgaggggatgttccctcgtttgctcaaaaaccatctaaatggttatgaaaaattctggaaaaatttgacaacattcatacagcacatatatacaacttcacaaaatcttaagttcaaactcaactcacacgtcgagatataaaaaagacaaattcagcgtatgaatagtagcgtactgtttatatctaaatttgtcttttttgtttctcgatgtgtagatcgaatttgaacatgaattttggtggactggtaggtatcattatactctacattgtcaattttttttagattttttcacaactatttacatcgaatttaaaagaaaaatgtatacgaggggatattcactcgagagataagaatccactcccgagtttgtgtggtgatgtccggttcttggtatggtatgccaagcgaaagtcaccgcggcaggggggggggggggggggatgctgatgctgcggccgagctgaggcaggagagaggggggccccacacggcagcatcttgtgatgaggggtcgtctctgattgggaatgaccgaacatggcggtcgggtcgggtcgggtcgccgagtttctttcacagccatggctcctctatctctctctcctgataattcacctggcttctccatggctccatctagcagtaggctccatgcttcagtttatcatccgattattgtgatgaattatttacatcacgttttcaaaaatatcattttaaaataaaacctcttctatcttatcgctgagctggttacttgtttcaaactatttcttagctttataacacatcatattaattttttaatcaaatatataaactatcggtttttatctgcaaatgatctactctctccagattaaaaataattattgttttggataagatctatgtcaaactttaaaaaattgactatagataagttctaaagtatttacattaattggaaacatgaaagacaatttatatagattaatcttaaaatgtactttaataaaattgtgcatttattaatatttatatatactataatagaaaatagtggtcaaagttaatttaaccatgcaattgtctgagatgacaattactttactagagggagtattcataatgctacgactaattcagcagcgccgtttgctggaagtgatatattttcagtggctgtcaagtgttaagatagtactgagctctgtggcagttgcttatgtgatggtgccacacaatcacatgcgtacgtgaagaagaattgatgtagggtgcacgtacctagccacatggattaacagtgggcacagaatgaggatggtaaggagagtaggagacaagggccacacaccagctatgcgtaccacggtaccagtgtactttcgggtttgagggacgctgtccggtggaccccagccccgcgcataagctctggagcaattttaatctggcaagctctttctatagtgcaatgttaaaaaggaaaatgattatatcgaagccttttggacggatgtagtagaagccggatatttaattaatgtttcttaggctgagcttatagcggctggcggttcggaaaaaggacgaataattcgtgcataattaatttatatctgtatctatatttatatttaatagaaaatagtataaggcttttcatttatcgtagtccattcatttttttcatcgcctttttttttatcaataatcctttacacacatggaagggttcttaatttttggtgcgcacacggtaaggcattcggtttttgattgtctggtcttttttctgttgccgtttttttatctcgtccgatcctatatccacggcacttgcgtgcagcgcacctccagccatcgccgggccgagccctagtatatcgttgttgcttcaatctatctctcgtgtgtttcatcctccaattaattaaaaaatcgaattcccgctccttatcatttttctcatgatgtcctctattaattcggccccaaatttaatctccatttaaccttcgccaatgatggctggccggggagcttccccaaccattgttgtcttgagttttgcagattcgcttcaattttgaaaaaaaaaagaaaagaggatatcgtgtgatcaaaatccctcaactaattttgggagatcgagaaagattcaaccgaatttgatgtgggatcagctcgggtttcatacgggcacgggtctatcttccatgggttgaatacggtagttggttgtgcgagctgggaatgcggttccactcgtgtgctggcccgaagatatgcagaccgagtggagggaggtagtggactgggttggggctgaaaaggaaagaatgaatgggttttcgctcaaaaccaaggaagaatatttagtaactttttcaattataatgtatatcgatactatatttcaatttgcccaactcctaatagctgctgtatcactgaaaaaacatctttacctattgcaacgcacgtgcattttttctagtcaagtataatagctataaatttaaaaatatatttagttgattatttaacaaaaatacttctatatactatagtagatatatactatatatatggacatagaatccgagcattaattgaaaagagatagttatttgaaagagaaatacatgagtgacattaaattatttagatcattcttaaatattgtatattacgagagcaaaggtctaagtagtagtgtaaatatcgataagattagggatggcaatttcccctgcggggccgggtcccctgcggtggcgggggcaggggcgatttcagaccccgcgggtgagtcagggttggggccccgcatttgagcgaggaggggacgggggagatgtttcacccgcgggtgacccgcggagccccgaggatgtatattagacttaatcatagtatgttgtaagcccaaaaggcccatctagtctatcatatatatacatccaaaccctaatttccccacccctccccaccctattctcaatctctccccacccacccaggcagccaccatctccacgactccaccagtgggcaacagcgtcggtggcggcggccaaggcgcgcggcggcagtggcggcggcgacggcagccaaggcgcgcgcggcgtctgcgacgtcgatggccaggcacggggggcggcatcaggcagggcacgtgcggcggcattgacagccatccgcgggcggcggccacggcgcggggcacggcggctcgcctctttgccttccagcttgccgccctcgtcgccatcgtccagctcaccgccctcgtcgccgtcgttagctcgccgtccaccggcccagtcgggtattgcgggggcccgctcacccgtcgggtcccctgcggggacgggggtgggtgacgttttccacccaaccacctctgcggggccgggggcggggggagaagtcggggatcgagcgggggcgggggcattctagcccaatccgccccattgccaaccctagtggagattatatatggacaccacccggtgtcttacatacattagaaactgctcctacagcagcatatttgaatagtgaccacttaccataccgaattggaatctcatgcagtttctatcgagattacaagtttcgagccatctattttattaatgaattagctataatactatatgtaaaagtaataaacaattttagtgccgtgagctacagtatccggacacgtttaaccattacgaagtagatccgaatctaatagtcggtactggactgcataagttacagttacactaccgactacagcggatccaaatcctaccataccaaggctgtgttcgggcactagggatgggaacgtgcacagtatttacggaaaatggagtaatctattagcatgtgattaattaaatattagctatttttttcaaaaattaatcaatatgaatttttaaataactttcgtatagaaacttcttttagaaatacaccgtttaccagtttaaaaaacgtgcgtgtgaaaaacgagatggaagtgttgggaacttgctcttgcaaacacagccccaagtgtgcttacaaaacaagcacagtttgcaagaatccaactgcatcatgcagaaatcatgttcacgcacaaatcgaaacgtgggggtgtggcaactccaaggacaccctctgcgtcgcgtagccttgaatattcttgtggtcgtagacaggcagctacagtcgtcgtcgtaattcagttcttttttttttttactatactcaccatgtgaatgctctctgctagacacccttctctatagaacaaagcacattgtaagctgatggccgccatattttgctgatattctttgtgcctgtagtaccaactatactaccaagtaacttgtgccgagaaagataccccttaagaatgtcttttgggatgcaaccagatgataaacagatcgaggaggcagctagatgacagtactagttcagaacactaagaaaccggatcagattaggatacaacttcgaaagaatctaaccagcttttagggcatatgatatgcatatactcaaggaaaaattggaatcatgccattataattttacaaaatttaagatatgacatcctgactcatatgtcattgatttatgtgggtcctacatatcattgagataccgatggcacatttcaaactttataaaattataatggcatggttcaccgtgagtacttcaattcgaaagagtacttcttatatcacagcacgcaaataaccgtgcaagaccagacctctgatctcttctgcagtggtttcgttctccgttactgccggcagaagcatctcggatcagcatagcaattgatgtatatgctattttagtagctaggcatctcccgaggtagcctatggcacaacagtatcccgttccccatacaaaaatgttgtatatatgatcgctttggcgtcttggttaacataatactccagtagttacatagttaacggaagttgattccacaaaattcacataagacagtagtcaaagttgattcttatggagcttgatggcttaattagctggatctgcatgcccttgagtatgagattgaaggattaattatagcccaaggcatgattatatttttaaagggaaaaacatcgctaatgttatagaagaacgatcttgatcaatatattcctgggagaatcaggaaactctcgtgcgatccactgagacccctcatgctaagggaaaaacatcacccatgttaacacgcgatgttagcacttaatagtacagtgttaaaggtatatgatttcaactccgatgtccgatatttaatttttaacatgttaataatttctttttaagatatgtttggaggaaggtctctcccaccaaatctcgttttttgctatccattgttaacaaaggggaagcttgagctgatcattctcaactctcaaattaaacgagttctgcgccgcgcgtcgtcgtgcgtacgtgtatgtaggcgctcaaaggaaaaaggcaatcctagaaaaggttggtatcactgctgcacggcgcactttccactcgcgagttttgttcgcgtctgtgtttggggagacagatttgcagctatttcactgttcatggcgcggtttccaaggagcaaaggtttcgctgatcacatggatcccgctgacagtttggaccatgcatatgctggtggtcgactaaccagtactagtacagtagtacttggctagctagaaacctatacgtacgcacgtattttctacaggagacaggagctgattaaatcagtttgtgtacccgaactctgtttcgtacgcatcgtaaaggacgtatgcggtatggtacgctacacccgaaactactactaccgaacagtgtttccgccttgtcgtatgcctcgtttgcattagtggtactgtatactcctcaaccctgtacacctgcatgcatgtagctgagggcgatcgatcagtactaccacactatcaccaggctatagctgcattattattcagcacgtacatgcttgctcgacggtaaccctataagccgttatactgaattactgcacgtagttattcctagaagccgttaattagcatgtgagcgaaagtacgtactatcgtgtaccgctagtgagagcatatggatggatgcaggagaaatcgatcacatttaatatgttattgcaatatctcactggagttgtctttctgtcgagctcactcatcaggggccaataaaattaaaccatgggctgatgacagatgacactatgacagatcggacgctagctagcggcctagcgctattaattaacgatttgcagagagagcaggccggccgttttggagtcatatacatgtacagcgtgtgcatgcatgcaacgagggctcgccggccggctggcggccgtccttgatcagagatgtgtgcagtgtgtgtgcgcgcgcgcgcgcgctgccatggtcgatccgggatggatatctggctggctgttacgtgccaaagcgaaatcaattgtgtttttttggtggcacgcgcgcgcgcgggggaggagggtggagcacggggcacgggccgtgtcgatcgatcggatcgctgcccagatcttcccggtgcagtgggggcataccgcgtacgtaagtactgattttgagttcttgcttgtaacgtttgaccactcgtcttattcaaaaaattttgaaattattatttattttatttgtgacttactttattatctacagtactttaagcacaactttttgttttttatatttgcaaaaaaaaatttaataagacgagtggtcaaatgttgcatgcaaaaactcaaaattcattatattgtgtgatggagagagtaggaaagagctcagaggagccgtagtcaatggcagatgcaggggtctgaccgggttttacagccttactgcaggaaaaacccctgcgccagaatattttattttaagatgatagaatgaaatatttcgatctttgctcacgagctacaaccaattattacaaggtttacataaaagcaaactcacacagtgtacatgcgcaggaaaataccctgtgccagatgtacggtcactgagttggtccaaaaggcataataccatttctccaatatatcaaaccactgtatttattgttcactatagtaattataagggtgtgtttaagggaagaagaaaggagaagattgagaaatacataatatgatatgatccattaccatatgattaattaagtactacatctgtttcaggttataagactttctagcattgcccgcattcatataaatgctaatgaatctagacacacacatatgtctagattcatatatgtgtgtgtgtgtttttgtgtgtgtgatgctagaaagtcttataatatggaacggatcggaagtattacttattttaaacttaaaaaatgtagtgatatgattttttttaaaacattttcttttgcaaaagacattgttttggcagttcgatatatatgtaaatgtaattcagtaattgtaaattaatcgttttggcatgattaattgtgcacgtaattcgcacaatactcttctcaatcgaataggcagagctccggccgttttatatttttgttttctaaaaagaagtactctcttcagtgtattcttattgagatttctacgacacttgagatgtacttgcgagtgtacgtagttgccggatatccctatatatagtcctgtgtttgattacaccccacttttgttcgtaattatcatacgcgatatttcttcagtgttacccaactttaggtatattttttctggtagtgctagtgcttgcaagctgtaacatcacccaggaaattaatgttttacgtaggtgctggacagatgaaaacaatattaggttcacgagagtactcgctgtcggatgcatgcacaccacagatcatgtggtctgccactcttccctgcagtgatcgagggatgaagcttgccgtagttggagatgagacatgatagaggagagacgatatccaaatcctcgcaaaagcacatcgtttggtgctatatttggattcaatgcagctatggaagtataactcgagttcaaatcttaatgtccataattacgtctgttttttatgttcgtaaaaactacaattttatcggggagagcggttctaacagttacaacttctttcatcttcaactcctctcaaacaagatatatttttacaccaattctaagatgatgtaagtacaaaatacagtaaataaaatagaagataaaaattgaaaaatccagcttttccggggattatcagaaactagctccctgtacgaggttcgttggatttgtctataacctctatatattaaaggtactcgatcgagtggtacgtggcttgcgcagttgcgtttgctcgttgttaaagctttgtatgcatgtgatcgaaaaataatcacgtacgtccgctaattaattacctccagtacgatacatgcagcttgccatgcacatgtacgtacgcatgaacccatcaacccacccccacttatatatgcaccgtgtcgcacaccgattctttcaggagaaggggagcaaaaccggccaaccggccggacacggtccaaccggggcacggtacgtacgcgcgggtggccgggtgtacgcgtgcgccgacgcctgcagaaggcgccgctcaactggaagcgaatcgtgatgacacggtcggcgacggtgtcagtcgacgcgcgtacggcatctcgatcgatctatcggtccccgcggccgcgcgcgcgcgtggacggcatctcagcgtcaccagttcaccacactgtgcgagtgtgcgactgtgcgagcgtgtatgtgcggtaccggtcgagcagctagtggcagcatgccatgcatgcgtggatgtcgccgttggccccggcctagcacgcgcgcgtacgctccaggtctccagcggtagctgcgtgcgccacgtgcagcgcaggctggtagtaccctcttggccccggtcgatcgagcgccgagagctgcaggctgcacggcccgatcacgaattcacgatacgctgcaaatgcacccgtttggaacaagggatatttgcatttttctgcgaggccagttgaactgagagtagggcgtgggctgtgattttaacgtgaccctgttgtgttttgggcctcaaatgagggaacacgtaggagagctttcatggattgcgtttgggcctttcaggccttctttttaattgttctcgtgatctttttttttaaaaataagtccactttgcctcccttaaaaagtgacccgaatctaatccataaccctaaacgcaaatccagatatctcgatcccccgaactattgaaatcggtgcaatttgacttccttagcggttttggagggcggtttcgctgacgtggcggtgttgacatgtctgtgggttgacatgacgcttagatgtcatttgaattaaaaacgtatatgtgggatccgtttgtcattcacacacataaaaaaggtggggcccactgacatgtgggcccaacatatcatcctctctcttcttcttcctcccctcttcctcccttctctgggtaccgagctcgaattcgccc

SEQ ID NO: 8641 - DNA, 24524 bp, Oryza sativa
cccccccccccccccctccccctgcggccggtagagcagcacgagcgcgatggccggcgcatgacgagcgcaattggcggcgtttgcgattcctagaacatgaaaatcggacgaggccgctgaatccttcgagacggtgccggaatacaacgagtagcagcaacgcacctcgccgatgtcagcagctaccagcaggttctcgtgcgattgctcaacggcgcgaggcagcaacctccgcggcgccgcaggcccaggacctgcaggccctctctccgcctcaccaagtcactgcctccgtctccgatgcatatcacatccgtacgtacagaaattttcaggttcgcaacatttttttagcataccatgaattcatgatacgaatgcaatactatctcatctttaggattgtgagggtattatgccattatactctcacgcaggaactctcctccgtttctgtctatttgattcctctatggccgcattcagttgattgactgataccgccatccgccgctgctcgggtgctctgatcatgtgtactgcactactcctgtctgtctcatatggcaaatgtacattgatgttagcactggccactaatcggtaagatctagattcgtttcaattaatatgttgcttttctagctttgtaatttatatgagtttagccattagtatattaattttctcaatcatcaatttgttcttttatcacaccttctagaaagtttaaatggtttgccattttatacattgagtaaatgatttagatgagattgacattcataccatctttagtaactatgcatttcaaacaaattttaagctgatatatatgaagttttcaatatggatattgattttggaatgaagtatttatatatttggtacatatatattgactattatttagatgtttatatcaggggcccctgtttttaattttgtcccgggccaccaaaacctcaggaccggccctgccctctattaagggaattcgtttcattttttgttccactaaaaatgtttcatcgagtgtacttataatgtttcactatgtatggatcaaatgttgcagtgaactgaaacattatttcgctatttgctgaaacattgtttttatataaggtgaaacaacgtctgatttaaacgattgaaacatttccgatttacttagtgaaacaattccgatatatctggtggaacatcgtgcaacatttaaaaataattcaataataagcttaaaaaaattcgttggaatatatccatgtgtggttctgttttgaagatttaattgcaacgaatttaatggtgcaatcggatcatgatttagataaataatttaagagaaaaaatagtttaaagtgtttttgtacacatgtgtggcgctaacgtttttcccccacccacgatcgggcgcccgatttgtagggggatccttttattgttggagttggagggtggttatacttggtttgaaggttacgaattagactttttccttgccggaagcaaagtgcgggccaacactgagaagaattcgaaatgtgagaggcccaaaaactatggatatgggccttgagaagaattcgacatgtcagatatttgggcctttagccaagatgggctttagctttccaatttcggctcggagcttgggattgaagatgaacagagatgggattaggtaagcatgaaaaaaaaatatttattaatgtactgaagatacaagttggatgattcattctgatatatcaatatatcatgcattacagtggtgagatatcagaaccgacaacacaagtttgatgcttcacttttctgcactctgtacacacttaatacagtgaatatattaattacaggaagctgtcccagctagaagaccttttcttgatcaattacaaagcgagtgctaagctaggactcgtcagactgatggcttgcgactcagtcagacgatgctttctggattctgatcttgaagcaccaatgccgctgctgagaagagcatttactggaatcggagcagctctacgtcttcttctcaaacgacgatccgatcctgcccggcgcagccgccggcctcttggcgtccctgctgctcgagctcgaagcggagtgatcggaagcagcaggggaagaagacggatcatcgtcggcgcgcttcctcttgagctgatcatggcggccaggcgagcgaagcagctgccgcagcacgtaggacggcaggtccttccggcggacgtgcgccaccgcgacctccatgccgggcctccagtagtcgtacatgtacacctcctccttgaacccctctgtcgtcgcgcggaggtcgaacagctgatgctgctgctgctgcggctgcgccggtggcttggacaagcccacgaagaaggacgacgtgcgccgccgccgccgcggctcgttgtggggctcggcggcgtacggctgcgggtgcaggtggcagagcagcatcccggacgtgtccgcctccaccctggccgacagcagcctcagccgcgactccacccagcccttccactcgcggaggtcgtcctcctccccgccggtcaccgtcacgtccacctggaggtagctcttgtacgcgccgaagaagttgaacggctggaacagcttgtcccacccgccgccgccgctgccggccttgacgatctcctggcagacggcgtcgccgacggcgagctgctcggtgatgacgcgcagggtggcgtgcgagacgttgtagccggagttcatgcacgggtacgccggcgtcacgatgggcatgaggtgtatcttgtcccgcggattccggcgggggtcccagaccgggaggctgaggccgagctcgccgtcgtcgtgctcgatggcgcgcagcatcaccgggctgggccacttccaccgcgcgaagacgcggaagaagcgcgggagcagcatgctgggggaggcgttggggtagagcaagcacacgcacgccacgaggatggcccagccgacgccgccgaggaagcccgcgacgttggagtagacgccccgcgccttggcccagtgcttcacgcaccgcagcgtggtgcggaacgcggcggcgtccgggaccagccgcaggatctcgtcggccacgcggacgccgttgaggctgcgcgcggtggcgaggtcgaggccgcggagcaccgaccggccgctgaggtccaggtcgccgggcaccacggggaggcacacgccggcgtacacgaggtccacctgcacgccgtggaacctcatcttgatcacgggaacgtgcgcgccgggcacgggctggagctcggcgacggccgccgtctccgccagcgcggcggcgagcgcgccgaagaagtcgcggtcgcagtcgacgtaggacgggccgacgacgagcgcgtcgatgtcggagccgcggccgtggacgccgaggcggtaggagccgaaggggagcaccagggcggtggcccggtcggccatgccgtcggggtacccgcgctgccgcgtgaggcgcttcacccagcggtcgacgacgccgcggaggccgcggagcacctcctcccgggccgccgtctcctcggcgctctcgtacaggccctcctcgcggaggagcctctccagccgcgccgtgctctccaggtcggccggcgtcgggccgacgagcgagatgggctccgcgacgccccgcgactgtggcgactgggaagccattctctcgtgctcagatcggcggcgcgccggcgcggtggcgaatcgggtggcgtggtgcaaaaagcgagggatcaggagagggatgcgagaaatggaccaaatgggagcttgacttgaagcctgcctccctatatactaagcggaaggcaatagctcgaatcctagtcggattcgggaagtcaacagcggaaaatgacaggtcgaatcctagtcggattcgcatggaaaaaaagctcgtacggaaacgcgaaaagctcgcatattttgccattgtggtaatgtggtcatttggattagaggtaaacaaactgaagcaaaagtacaaattagttcatcactaaacaagaaaaagaaatgactaagacatcagcatctcgtgactttgcagcaattatgcattcaatttgtaggtttgacacacaatcatccaaatcacatataaatatctatttttaatattacaccgttaactttttaaaatacgtttgatcattcttcttattaaattttttttataattattatttattttagtgtgacttgatttatcattatatattctataaacatgacttactttttatatgtttatacaaaaaattttaaataagacaaatgatcaaatgtttgtcaaaagattaatagccgtatattagaaaacaaagatactataagatgtccacggatataagatggtcttaagtctctcatcagggcaactgcaatgatcatattattacctttttgtttttacataactagtggcatactgccatccggaccgaggtcttcagtccttgcaattgtaattagagatattgtttccaaaatttacatgcttggccaacatatgtcaataatttacacgtaccaagtgaacaccctaatgccttcactaatttactacgcaggctgacagtaaccatcgcctgtgctgttaacactaccaagtaacacgatcaaacttggctatggtcaattggccactacactccaaagcaaaagcaaaatatacaacatatatacggctttagcctaaaaacttgcaaaactttatctatgacacgacctattgtacattcaatcgagagcttgttagctctcgaattgactgtacatccttatttgtcagatctaactgaccgccacgctcagctaccttctcaatcataagtctcaacaatgggatcgttgaaagagttgcagcggatcccaccatgatgagcttcttctgcaaaaataatcactaaaacttaagttgaaataaaaaaagggtagaaatgggagcctattaacgcagagtaatattttgcgttatcaaggcagttgtcattgacagagtttgcacatttgtgtttcaaatgaaaatgacaagcatctaagttagatcaaacatggcatgagtacatcagcatgtcttctttttgcaactattcaacaaaattatgtgttgataatcatgaaagaccaaaacaatttaattataaaagaacgtggttttgagaaatggttgaaatgggaaaaattcattcgatgtactttacctttgcacgtgtcaagacaacgttgatcctgtgccaatcaccaagcaaagaagaaccactagcccttgtattcccgttggaccgtacaaaagatactataatgcattctttatccctcccctgaaaagagtttctgttagagctgcaagttacagagaaaccacaaaactaaggaaccacaagaagcaaaacatggttgctcccaaagcctggacagtttttcactagtgatgagggtaacagaataaccataatgaattactaagaaacagtgcaaattcaaaggcactgattcttctatctttttaaataatttaaataactttttacttatgatctgaatggctgctttaaagatgcatgcatggagccatagatgatttgagatgtaaatgttcactagaaccatgtatcaaagaccaaaatcactcaaatcattgaaacaatcttgaagtgttcagatcattgaaacaggtgataatgataatgaagactgagaaaaaacaaatgctcttcatttatctaataaaaagatgaagggaacttttatcacctggtacttgtcaattgtatgaacctcaactgaagcgtctacatgttgctgaatgagatttgcttgggcattatatggagttattataccaaccccatcttgagctacacctctctttagcaattcattggtgatctacaaaaaggatgtgatcaaattttgaggatgaaagggaagtgatgatatttcgatttttatataattaggctcaatatatgtaggtaaaaaaaggatgcacaacactaagcctcagcacaagtttgtggaccagagcagtttaaatcaagcgatattttcctagcttaaaagatataagataattagatattgctaattatttagcatggcacaacaaaagggcagaagcagtcagcaagacagcagcactatgaagcagatgaactttttaagtacaggattttaactagtagctaaagtttactgcttgcttgctatattgtccacaccagacatagatcagggcatacccatgaaacaattaatgcttctgtaggattgttcacagttctatgttccttggcctcaaaagctggtacttcatctgcatgatttgcccacatgattagcattgaaaggcaaatcaaaaggacagactaatcaaactaatcaataacctgtgttcgcaaagacgacagccctatcagggttcaagatctgcaatttgaagtcaatgaaaaattaaaactgctcctggaagataaagcgcatggcagtagaaaaacacctgacataacaaaaaaatgtatctagtaacagagtacttatacattaagaaataggccgcagcgctacctctttcagcttcaagcgaacaggacctctgccagaaagcttgagtttggcatttgcaatttccaacgaaccacaggataacctattgccgtaaatcaatgaatttgagagctccataatgccagatgacattcggtactacaaattggcagttgcacattgtgagttttagtgaaacaaggggtcttcaactcaacagaaaataagtggaagtggaaatactagataagtaagcataagtgtgatattcaaatagagatacctggcatcgcaatgctgaaattgcttgagggtgtgcttctgacaacctccaaaataaactgacacccataccattctctcgagcttcagaactctgtgatttgtttgaaagaagtaataaaaaaaagggaaaggttggtataaaaagcattaagataatgagtgtacaagcaaagcagtgaaaacctgaacaagtggaggaagctgataatgatctcctactagaacaaactttgttgcaagcatcaaaggtcccagagatacctagtgagtaaaatattacaatgtgagaaattataaatggtataggatgcaagactctttagaaaacaattttacagatcattctggtttagcagctttgaccaactaatgtagtcttgaagttaaatgaggaccatcgtgtggatttttgtggtttccttcaagacttgtaccaagcattcctagtttggagcctaccggtaatgtgatctggcctgcctcatccatgatacatgtgtcaaacttcttatgtgctagtaaagggtgataaattcccaaacaagtgactccaacaacttgcacttgctccattctagctttgacggcatctactgattgtatatctgttgctgttcaaaaaaataaataatcaaacacacattcttcattttaaaagcacaagtagaataatgagaaattctaacttgacaagcagtggcctttgacatcaggatgtacagcttcatgccttccaattcgaagaaaatctacaccctatataaatggcattagagcatgttcatattttgatgatttgatttgttgcgctacaatgctcaagccaaacgttgctcattggaacaatgcgataggggaaaagagtttgttcatttgaatagtacagtgagacagggagttatgactgaatttatgaaaggaagtattgcgaacacaaacctcagccttcaacttcataagcaaattatctatagctgaattggtatatgaggttagcaaaatagattcccctctcatcaataatgacttcacggcatgcaccatcgtatatgttttgcctgttccaggcattcctaggataagcgcataatcttttgctgctagaatctgaaagcaacatagtgtacgctttacatagtgacattgaattttcagaagaaaaaaaataatgaactaaagaccaaagatttactttatgcagcgatctctgttggtcattgttcaaatttggcaatgattgtatatatgatagtgccggatcttgacttaggagtcctccactatcaaatctgggagcctatcaacatccaaataaggaaattacagacaacaaaaacagtatggagaaacatagcacgaataggctagtggacgaacagacctcgaggtcaacaatcaacttccttaggtgagagttttgtggattctcagcaaatagttggacaaggttgagtctggcaacagttcaaatacaaactttatttaggaagaaggaacttttctaaattactaattcagaaccttcaacaaaaaaaataaaacaagggccaacctcatggtagcaaatgaagaaacagactcatccttatctatacgccaaacttcacattggagatctccttgctctaacaaggaattacttcctggaagtctcagacgtcgtggcaatgaaacctacaaaaattccagttgaaatattaataatcaacctaataaattgaaatggatgcctaagcaggttcgcaaggtcaggtaataccgttatatgggcacggctgaggtcccttatgtatccatttgcaacagctattcgcccagattttgtgctaagcacctaatgaaaagtagaagaaaacatgacacacttcattatggagaaaaataaaccagcatgcatcactataatagctaagtatccatgaagcaaaggggtgtgagctactatatgtgtaataacgcataaaaaaatgacccctttgtggccataggcctacagcactaaagtaaacatcacaaaacaggaggataaaaacaaagtaatataacgctacaatactccaaagtgttagctggctgttgctgattgatcggttagcagtagctgcagaagttttcaactggtattatatttgccatttaacctccttatatgcactgagcatattctatgaacctatagttctacttccttaccaacattaagcacataacagttcaaacggaaagaaccctacactccaaacaaaatgagatggagccatacattacaaatttgcaatatggtgtgccaaatatatgcaataaaaatatcaatgttgctgggaacttgaaatagctaacatagtaatgttgctgaatattgaatacagaaagtgtacaaggtttaccacagaatcaccgcatttgaggctaaaatctacactttcaacatgttctcctggctgatcagctgtctcaggctgcaacttctggcgcagaaaagtatatatgtatcttttgctttttccagatgaatctattgaatgtccatttgtaacatcaaggacaaaataagatggggaagaatgcctgctcccagtatttgaatgatgtggctggaaaatttccttcttcttgacctgaattttgcatgagatgagatcaagagagtacaaatcaaatacacggcacgtgagaaaagctaaagatacctgagaaactctagcttcaagatcgatcaatctgtcccagtgtttaagaaaggtatgatgtgcaactgtcaagtgattcacgagattatcaaataaatcaccaagcccactagttgcagcattgcctccatgcgcctgttgcatcagaatataagtatggcttttcacatgtatatattatgtaattgaacaaatttgtaccaacaggactgtatcaaaaaacacatttatattaaaaagaatagagttattgaaccttgtggtatatggtgcatgaaaccaggtgtcgacatccattacatgtagatggactctgaaagaaagattttgtttgagttctaacaaatgaattacttatgtacaagtttttagttccacctgtatcatcgggggaaaactctgtgaaatcgatgccttcaggatctcagtggcaagctcattccgacgcattattaatccaattaaatcagacctcttgactttgatgcccttcagaaattaacaagaaatggataaggatgggtacagaatttatgttgagtgtcgttttagaagattaccaatgtttggtctgtgtgaagataatacagaagacccaagtcaatatccttgttcaagtatctgaagacatggaaaagcatggtaaggaatatatatatatggaaagcctgcagtggaagaaatagatagatcatacctctccgtcatcaatagcgtgtacaatatcacttgggcagtgtgttccacagctgtctggaaatatataaaccattgtgaagagcaatagagaagtaactggatctattctgaaggactaaattgttgttttttcagacatggttaggtaaataggagacactagagtgctacacagtatgtgaaacaccacaaaaataacacaatattcttttcagaaatggacataaagtaaagataacactaatagtcacaatcacatttcaaaaaaggtatcaaaatatatatttggatgccgctacatgtgacatgtattaattatcaaaactactgaaggatgttgaccttgtgaaagtagaatggaactgaggctccggattattgattaattattattttgtaatgaactatgattgggtttttttaaggtacgattagttgttgtaggacattattattgattggttgttgccacagaatggacatgactaggtggttgacaggtttctagtcaattgtaactaaagcttaaagttttggataaaatagagcagggaatctaattcaagtaagcaaccagtaattacattatggaaaacagacagaaaacaacagttctggcctgtgcaatataaacctcaatgaactcgtcaggttttgattaaaaaattgagagcatgactacttgtaagaattaatatggattatggaatcagcacaatctttcaagaagcctggttgttgcaatacttcactaatttattgcataaatagtttccagaaccccggtgacaaaaatatctcatgccagaaaaagatataatatatcttcaagtggatccactatccaggagcatatgcttacctgaccactagttcctttaccagttttgaactccagaggcattactctgtcgtatgaactaccattgcatgaaacccttgatctaatagaagcatcaataatccctttcaaaccatatcttggagcccaggccatctcctcaatatccattacctaaggtgaaattcatttcaataaagccattaagaatgaggtgtgcaagtcaacactcaagtactgaaggacatggggagagtgaaagttctgtgttggcctaattttgatggctgagaatcacaaggactacaggagtttaccatcatgaaacgaacttgctagatattacatataagttacataatatgaaaaggtcatattccaaagttttgcaagctcaagatgttgcctacctccacaactccaacagtcttttgtccttcaatttgaccaaaatttacattgttacattttgatacctggatgtgccgacgatgattagcgcagaacatgtaacagtatcttctttaaacaagtaaaggacaagacatgcaatatatccaccggtgaactttgcaggcaagttagtccaggattgataaaggaaagactagatcaaaactttctcttaaaaaattatactccgtaatagaaatggcatatattagcaattaaaaacaaaatggctcaatcgagtgattaatcattgcctagaacctctgaaaagaaatagaagagtgccatatgggtataacaacaggttccaattcaacaaaaataagtggagtattcatgaccatggtgcaactctatggacttcgaaaattcttgtggtcatttaaggagccccaacagtgaatataaaaaactgctgtgcaagtcatctactccaccttcataaagcacttgtaccaattcaatattttggggactgcttcaatcagcgttttaagcgtgttgctttcactggctgcatagaaaaatgtcaaaaccagtaagatatgcacatggctggggatataagatagtttgtgtaatgttataaatatcaataaagaagctgagctacagtacagtactgtaatcaaacatgacatataccaatatgacttgagtaaatgaggatgtatgagaacaaccacaatgtatgttgatatttcagaacaaacacaacagatttgcagaacttttggaatgacattccatgttccttgtgtaaacatataaaaataataggaaggatatagcacagaaaattggatcaaattagtcaaagcaacattcaaaaattaaatataaagtttcacaaaaaatttagtagcacatgataatttactgataactatagccttactgaatcggtgctctaagaatagagtaagaaaaacattattggtcagggcactcagtataacataataagtcatgaacagtccatgtcatagtgtcatacttttgtgtagtgtgttttttatggattaaaaatgttgtcacgaatcttacctccacatgcatataaactctcaatatttttcaaaagaacttctttggcttgctgctctaagaattgcgttgaaggaacatcttcaagtagccctgcctgaggcacaagaggaaagaaacaaagtgaggcacacacaactgttacatgaagataaagtgcatgatgtattaaccagagctgccaatttttcttgcaccaacgaacctggaatacttgatgcagcagagtaccaatcaaagcacttgttgaatattcattgctttttagtctgtcatcgagaacagaccttcttggacaatgaaaactagaagcaacctaaaataagctatatatcaaaatatgatgacaagataagatgaatgtatttttacaaacagttcttataaaataatatttgaggatatcatagcagcttgttcatattgatctgggatattgactacaaaggttataataaagagatggggggaggctaatactaacccgtgttccagatatgagtaattctggatgcactataacaagatttttgtcatgatcaataatacatattccatggtcagtgaattctccaatgacacttactgtgtcgcctgggctaataaggctatggaacctgtagtggtttgaaatatataggcaatagattgatgaaggttcatatgtatatagaaaataaaaatggaatcatgtcaatagttgcatataggaactcaccactcatcacacaaatggactgcatgctctttcccaccgtgctcattcagcaaacgtaaaacctgtcaaaacagttagcaactttgcaaaataacaaaaatttaattgcaaactagctcatccagataggtaaagaggatatataccttaacaggatagcgatcacatggtaagttatcgcctttgtgcttttctgacacctgaaaagtaattaaacacataaatctctattgtactagaagtctagagcagctccaacttcgatagaaaccaacccatggaggtaaagaaagcaaacctccaacaccaaaaagctatcgaagggcggggcatcaagggacttctgggagggtacattttgatcgctgtcagcaataggagaacaactaatgtttttcggatcaccatttatgagctgctctcctttattctcaccatcagcaggtaattcttcttccatgattgcatcttccacttgatctaaaagatcaagtagtgcctggtaaaaagaaatggcatagttttgtcgatcaattctttggcaacttagttcttacatgtaataatatcatgaaaccaatggcacccaggacatttagtgttatcttagttcacctttttgtgctcccctgcccccaactgctcaggtcctccatcagaaaccacacccccattaagctgctgcttcatgcacaaaaccattactccatcaacacgatttggaactacattagctagcattcacacaacaattcatcgtataactgtatgtacctcactgcacctataggacagtgatggaggagtccgaaatgggctttgggtgtcctccacaccgtcacagccacctggaccagttccacacatatccaaattgcgtgctgaagcagtacatcttgacatgcccagcagtgatgaatgccatttctttgtagactcgaccgaggaatgcttctagaatacaattacatatcgaatagcaaaccagaaagccacaaaaaacgattaatttcatcacacaagaaagtgttgtgtctccaccggctccaatgcacatacatacgtgcattgcacgccggtatatacctcgcaagaacataaagaaactccagtatatacctcattgtttaggccgggatgaaggcccataccagtctttgccctgaaagtgaccatgggcaggcgtcatcaccggcgagatcttcaagtcacaacctccccacccccatcgtcctggctctgcttaatcagctggaccgcaccaaacaagaaaccaccaaacctaagagtcgatccaaacgccaactaatgcattccaaatcggaccaagcgcaagaccaatacttaccatcccaggagaaaacctgacccgcttcggcgccagagtcttggtgacctccggcgacacctccgatggctcctcctcgatgagcggcggtggcggcggaggcggcggcggcgcgggaggctgcgaggggccgtcggccttctggcgcttggcgttctgggaggaggcctgggactggcgctcgaagaagtggagaatgccgaacttggccggctgcgacggctgcgaggccggcggcttcttcgaagctgccccccccgccgcccccgtccgcttccgtggagccatggctgtgttgaggactagggttttcttctttccggtcgctaggcggttcgatacggcggaggcggcggacggcggcggaatgggggatcgggttgggaagggaaggtggtgggaaggcgaggaggagaggagaggagccgagaaggggaaggggaatggccgaaagggaggggaattgggcggggttggaaattggagttcccgcgcggtagagatttcggcggggtagactgcgacgtgggcccgtgacggcccggtgaaaactaggcctgaaaggagaaagcattggtccagaagtgagatttggcccataaaatattgggccccccttacacggttctaaaagcccatgtacgacggcaaagtttctttcgttccctcatggaacttgtgcaaatctcatgaccattttttgcgttcctctgatcaagtggtgtacaagaaagtctcctgcgtacggcgcactcctcctgtgattcttcttcaactcatcaaccatcatccaggttctgattcgataatttgtcacctatttagattagagatctgatgatgattgactaccacgcgcatttgttcccatgtatcacctgatctaaaaattggtggtaaaaatcatcaaatttgccggcccgcccaagtacaaaaatggccaatcgttcaccggcgcacgaggattgacagccacgccaaaaagcgcggcgcgcgaggagtgacagcacgcggacccgacagccctgtcggggcgagagcctcccaactcgcgccacgacgagtcgtcgtcagtcagtcctcccccttcgacttcgaccaccagacgatggatcaacgctcgccaccttctccgagacaccgcgcgtccgtactcccatgtcgattccaggcgaaacaccaaagacgatcgtgtcgctcgtcgatcgccattgcccaagaacacacgcctcatcacctcatcgcctcgtcgtcgggtcctgcgcgagttttctctgccggtggttggggcgatcgatggaagagtaataaagaggatacatccaatcggtatggttcgtcttggtgaaagatggttcaggcaacccagcacgggaaaaaacgccgtaatttacttctcttctcgatcactccgtcacggccgccaccgcgaccactttttcccgtcgagaaaatgttgccaccttttgttggttcgccgtggtggctgacagggatccgggtgaagccgctgctgcacacgccgccgcgagcggaaaaggctccgggagaaccaaccccgagtggcacgtggggaggctgcctgccgcgcggtgaagcttcggtcacggactcgcggctcgttttcgcgctcgcgcgcctggtcaatgggttggcaagtggcaattgcgacgcacgcaggtttggatcttggctctggcctctggctgctgcgatcccagtccaagcgatgtctcgtgacggtcacgatggaggcgcacacacgcggccacgcgggcatctaaagtgctaaacccaccttatacaaagctgcattcgaacaatgttgaacaaattcaattcaaaatgtggcgctaaaattggaacgatgtgacggaaaaattgaaagtttgtgtgtagaaaagttttgatgtagactgtgtttagttgacgtcaaaattagaagtttagttaaaattgaaacgataagatggaaaaattgaaagtttatgtgagtaggaaagtttgatgcgatgaaaaaagttgaaagtttgaagaaaaaaattatgatctaaacacaatggtagtggaaaagttagaagtttgaagaaaaaattttgtaactaaactcggcctatttttcaatatttcttatcggaagtttttgtcctactagtgtgcaaccgtgcatctattcctagagtagggtagaggaacacacttccataaaaagccacgcaagcgagggaacagagagatgcgaaccgatcgaacaaacgaaaactacgaaaaggtgaaaagcggcgcctctatatacagaggagagaccgcgtcgtcctcctcttccttccttccttcctccctcccctctgctgctgtgcttgataatggagaaggcaaagagaagagggcaatgaagtgcagcaggcacccgtacgagggcggggttggcgtgtgcgcgccgtgcctccgcgaccgcctgctcgcgctcgccgccgcgcagaacgaggcctcctcattgccgccgccgccggagccggtgccggttttcccgaggtcggtgtcgccgtacgtgtgccgccggaagtccgacgcctccggggcgaggaggcgcacgccgagcctcctctttttccggacgccgcaggtggggccggcctacggcggcggcggcggcggcggaggcggcgcaggtggattcgaggaaggggacatagaattcgagatccggcgccgcagcagcaagttctccgtgctcgccgcgctcttcggagcccatcggcaacacgggtcggaggaaaagcgcagtagcaaggagcggaagcaccgttcttggctcgcggcgatcatggcaccctggggcccccggaagaaggatccggccgtcgcgtcgccgccgcggcactcttgccacgtgatcagcaaccgcgggctctcgccggcgatgaggtacgccgacgaaggcggcgaggaggggagctcgccggcggagtcgccatggcgaccttcgccgatgcggaaaaccccctgccggcgcagaccgggaggcgcgactggggccggcggcgtctcgggcttcgccgtctgcatcagcccgctcgttcgtcccagcccggcgcggcaccaccgcgggggaggccacccgccggacgccgccgccttctccggcgagctggggccgtcaccgctccaccgcctctcctccggctcctcgctcccccactgccggtcatggaagctcgccgacggcggccgcttccggtgatcctatcctttattaatttttttcccgcgctccgacattatttatcccttttgggaggcttttcttttttcctttttacctttacgtgtaaactggaaaagaagaattcatcctggccaaccacgagctggcaagctgtcccactgacatgtaggcaccgacgtttgtcaaaggttactgtttgtcagttgaacatgttgcaagccactgtaaaaaaaaaagcttcttgcattatctatgtacaggattactcctagcttttaaattattttcaagatattatttctttcttgtgtttgagattcccaagccaatagatttagttgtgtgtctggcatggagggaatgaagccatgtgagcggaattgaatgtgagcgttatgaattgaagatctgaactctgagaactaagtactcctacttactccctccgtcccaaaaaaaaaaaacaaaccttgggttttcatatccaattttgactgttcgtcttatatgaaatttttttataattcgtatttttattgttgttagatgataaaatatgattaatattttatgcgtgacttatctttttaatttttttcataatttttttaaataagacggacggtcaaatgttgggtacggaaaccagagtttgtctttttttggacgaagggagtacttcagtagtgctgaactgctaatgtcaacttggagtaactctgtactcatgcatccatgaagtcatgaaccctccacgatctgatgtctgatgagtgggcactgtggatggatcgtggctgatggttgtagaatcgtaatcaactttatgataaggtcataaggataatttatccattttaccatctagtcagagaccttgtccccttttttctctttttctgaaggcagaggttgacatgatcaagaaattcaagatctcttcctgttgtttcttcattgcttttgccggtacactgcgcaccaagcgattgtttccattttcgtccgggaaactataattgtggtatggctcttccagtcgagcactgtttcaaccacacgacgacagttgccggattcagtacacagtccgttggcaacatttactagttcgttgacgttatcgcgttgcatgtaatgtacaggatgaggtactcgaacaggtatgaagttttggtcaacaaatccagcaaatcttcagactggtcctccaacagacgtaggttggctctcccgttctcccagctgcaggttttcgtaacttctgaaactgcatatcctccactgccaccttgatctgaaattctgaatctacatcggtgacagttcttttgatctcgtttgatggctgttgccatcacctctcagtctcaggctctcaccggcgcgccactaaggtcaaccggcttcatcattctcatcgatgcatttaaaaagtcaaactcgatacattaacggctgcagatttggcgaataaacttgctgatgaaaagctcgcaatcatggggcatgcttagctagaaaccaccatcgacatgggcagttgagttgggaggtgattgcctcgacagagattggccggggtttgttgcgtgcgagctcgctttctcatcatctcggatggactcccatcatggcaggtgctctcgctctggtcgagaaaggtcgctacctttccggttaatcagaggttagctccgctagtgcggtggtggtggccgtggccgtcgtcgttgtcgtcctgccaaaagcttgcgatttcaccgaatcgcggtgagctgtgatgcgcgcgcgcgggcgtgtgatgggtggatgcacgaacctctgctcgccttgtgatcgatcgtgcgctctgcctgccggttgctgcatctcttgagaaaaaagaagcagcatgatatcactatggaaaaggcgtattttttgttcgattttcgcagtaatcccagagcttttctacactccgctgggtattactatatgtttattaaggacaggagtatatgaaaagtggattttgattttttttagataatggaataaataaatatcccggcctttactcaaaagagctacagccaattattatatagaagccaattatatgaaaagtggattttgatgaggaacataaagctttaatgctgactgtctgacggccgttggtttgctagtacacattgcttcgctgtatgaactccgaagccacatgccattgtcaaccgggtcaagtacgcgtattattggctttgggggagtgaacactaggttagtccagtacccgagttcttgttacagtattgatgaggccaacagaaaactcctactcgttgacggtatcgaatgaactaatgcccatccgagggagacgattgccagtgcagtactgatttgtttcggttagctgcaataactcttttcagtgaaagcttgacaagaaactgcataagttctgaatccttatattagattatgacaacaatttgcaagcagggacaagtgacaacagtggcttggttgctgcttcaattcagcacagcaagcaacaggatcaaccttcccaatcttgttctttttccgcgtcagaactcaaaagtctcagaataagcaacgaccagccgaagattttctaaaccacgccattttcagcacagcaagtggtattgggccaattaattaggcattctgaatccatctgcagtccatataagattatgcatgtgaccaaggagttgcgtgtcagcttcagttgaggcctttgtggatcaaaatcatcttgctctatagtctagaccaaacatttttcccttttcttcttggtaatttggaaccatgacattataattttgtaacgtttgagatatgtcatcggtatctcaatgacacgtagaacccacatgagtcaatggcatgtgggtcaggatggtatagctcaaatttttcaaaattataatggcatggttcaaattttcccttttcttttatgcctgtcacacacgtacaacagaggcctggctgagtggtaggtcgaattataccgttgaggtccttaatttctgactatacatttctcagttgaggccattaatttctgaccatacattcctgtcggattactttagttttgttgcatgaatttgacaaaacttcaacttacacgggaaaacttggagcgatcaataattggaaaattcctcgcgaaaaaagagagagaagagaaggtgtagcaatgatacgcttctttgctaggtcaaactgagcaaacaaatacttcatccgtcccgaaatataagaatctaaaaccgatgggacatagtattagaaaatatcctatccgattttaaattattatattttggtttatatcctatccagttttaagttattataatttaagacggagggagtataaagcaaaattgcaaacggagttgtcaatggcgtgacaagtggttggaccttctgtgaaacaacccagaatcagcccattacataattgggccgtggtgagacacacacaaacaggaccagtaaagtgtttgggccctagctgcacctttaccatggttggataaaggaaaaagtacaccgaaggtccctcaacttgtcaacgggatacaaaaccgtcctcgaaccgcaaaaccagatatataggatcccttaactatataaaactggtcacaataggtcccttggcggtttcgatcccggttttatcctacgtgtctaatgagtcagcgtgggacccacgtgcgccccacatgtcagcttgtccagtcagcctctatttctttcctctcttctctcccttccccttctctctctcgctcttctctctggtgactctgggtagcccggcgccgccggccgacaggtggggaggagatcgacggtgcgaggtgggagaggaggtccggcggccggcgacgtggcggcggagacgacgcgggagcaggggagcaaggcggcagcggcggcgagatgtccacggtgaggtactggaggcggagctccgtcggggcggggagcgggtccacggcggcggacggcaggcacgggattgcgtcgcggccccacgctggcgccagcaccggcgtcgcccgcctacgcgcgatctcctccaccgccgtcatgaactgcaacgcgccgagggccgagggccgatgcgccggcggcgacgccaccgatggctgtcgtcgggcggtccgggagaggcgacagaggaaggagagatcgaggatgacggcgccatttcggcgggcgtggcgcagcagtcggtgtgctaccacggcgacaagcagtggacagtgtcggtgtcgtgggggttcgcatggtgcatggcgcatgcatgcgataatggcgcagctgctcacacccgtaatagctcatccagtgataaggttgttaggattagtttcttatctccaaatttgttctatctccttatcacttgtaactgaacattgtaagccacggtagaggctgtttctaccactatttaacagagatgcggcccgaggcaaagggttcaacgcttcacattttatcacatggtatcagagccttttccacctcggtagattgcatctatcttccaccactcatgccgtcgtcgtcttcctcaggcgcggcagctgtaaacctcgctcagggccattccgttacagagaaactcggaaaggcaatcatgcactgtggaaagcgcaagttagcgctgcagtgcgcggagcccgtctccagggctacctcaccggcgctgtgaaagctctagacgccgagatttcagtcaccgtcgatgggaagactgtgacaaagccgaacccggcattcgaagattaggaagccaatgatcaacttgttcttggctatctcctgtcatctctttcgagggatgttctgattcaagtcgccatgtgcaagacggcggctgaagcttggtgagccatcgaggaactctactccagccgcacccgtgcaagatcggtgaataccaggctcgccctcaccaacacgaagaagggaacaatgaaggtcgctgaatacgttgccaagatgcgagctcttggtgatgagatggctgccgccggtcgtcctcttgatgaagaggatatggtgcagtacatcatctcagggttagatgaagacttcagcccgatcgtctctgctctctgcaccaagtccgatcccatcacggttggggagctgtactctcaactcctcaactttgaaactctccttgatctctaccgcaacaccggtcagggaggggctgctttcgtcgctaatcgcggcggcgggcgcggcaacaaaaacggcgcccacaacaacttcaacggcggcagcggcaggggagcgctgcgcggacgcggtggtggccaagcacgcggtggccaggggcgcggcacagggccctggatttttcatattttggtccttttaaaaaacttatttcgcaaatagacccctaaaaaaacttattctagaaatggtcctttttggggcgccagagtggctggcgccgtcatccaacgggacgacgccagcctctctggcgccgtcctcctgccaccatggcgcacgcgaaccgacgtggtaggaggagggcgccagctatgctggcgccgccccaaggaggagggcgccagcatggctggcgccgccgcctccattcctgtttctctgtatggagttgcaacggtgtcatttttattttattttttcggatgttttttcacactcaggatcacgatacaaccaaccacaaaaaaaatttaaactcgaactaccacttagctaagtctgaaaatatctagcataccacttagtctactttgcaccttcactaaaattagaccataactcctttactaaaaccctttgatcagcatgttaaacataatgcactctaccactatatgaaattacttaatctaattcaaaatataaccacatgaaatgacatatataagttaaacagtacatagagatgcaatttttttatttttatttcatttttttgatatttttttcacacttaggagaacataggaaccaaccgtataaaaaataaactcaaacggacaaaatatgtgacatgtagaattttccaaaactctatcgaaacggacaaaatatgtcatctattaaaataggcgtaactttctcatacggacttgaaatcaggaaaataatatatgcacggacatctacagaaaaagttacatccaattctccctagctttgccgggttcggtgatattaaatcccccaaattccgcttgcaagattgtgttttcgaggagagaagtttttcggtggagctttggaaaattccacatgccacatatttcgtccgtttgagtttattttttacatggttggttcctgtgagttcctaagggtgaaaaaaatatcaaaaaataaaataaaaataaaaaagttgcacatctctctcctctgcactagttcggagagaagagaggagaggaaaaattctacatgtcacatattacgtctatttgagttcaatttttctatggttggttcttgtgtgtccctaagcgtgaaaaaatatcaaacaaataaaacaaaaataaaaaatttcggggggggggggg

SEQ ID NO: 8642 - DNA, 44720 bp, Oryza sativa
  unsure (1)..(44720): unsure at all n locations
gactcagaaccaaccctattattacaatcattcctctcccgacctcttccacttcctcttcctcgacctcctccaaaaccccaactgccttttctgaaatcttgggctatcagattatccgggtattgtatagcttcgggtgggtgaacaccatcaccatgctcctttgtgacatgcccaacaaaaccacaaacaccgcaaaaaatcggcattttctcatacataacgcggaacatccacttctttttatttagagtggtacttaccaccctcgtgagcggcttacgaacatccagcatcacgcgcactcgggccccctcactgcttccccgaaccgaggctgcatctaatttaacaatgctcctagctctacgcgcaagctgagttgcaatgctacccgtcctgatcttctccttcagatcatggatttggatccatgctgggtaggtatagagattaacagattcaatcttagaccagccatcatattctgcgaggagcaccggacatcctcgaaaggtccatggaccttcattcataactcgttcccaatcccccaaacaattgaattggatcgagaacagattgtcttttattgctctgaaatctacttctttcgcgtagttccatgctgagcgcatactcccaaagaaagccccatgactaaacgatcacttcgtatgaactgtggctagggctagccatcttgcatctgcttcaagctcctctagatcttcctccaattccacatcctcctcctcatctgcccttaggtcaagcccctccagcataacttcgatttcctccttttccttcccccgatccgccgcaggcaccttgctgcccgtcgcagcctgtttctccgacgttgaaccttcgctcgccatggctgttgtgttccccttccttatcctgtagtgctataagcaagcacgttgaattctactcgagatctgggaagaaaccgagtcgataacgtaaatcgccgagagactccttgtcgccgccgccaggaggatagaaaccctagttttcagggtatggagttaactattttcgtttagattaggtagctgataaaacaatcttgctaatctatagctgttacgtggggaaaacagttctcatttttcttcggcaagaatgatatcttccaattcaagtaagaaaaaggacgtgacaactactaatgttccactacgatttacgtccacagaagtattaggacttaaaataacgacagttttctttgatggtaaaatttgatcacgtaccttccttaggattaaaatggaggattacctccgccccaaaatataacaacttttagctctcagaatttgtcccaaaatataacaacttttccaccaacattctcttcccaaccaatcacaacccttcaccattcactttttccacctacctccattactcatccaatcacaaccctccgccactcacttcaacctacttttttaataatcgtgtccacctctaaaatttcttatattttggaacggagggagtaccttttttaccaatatttgagtgacatactaagcctcccatttataagccgttgttaagatttgaattttataatttgatttttttaaaaaaaagttgcttttagagatattttatcataatttactttgcagcattgacttatgacttagaacatagatataaaagtttttagtttcaagttatcttttggttcttactttatgccaaacgacaggagacttattccaacaatgcggctattcttgtcatgtttgatggttgttacccgttagcacaaaccccatgcaaccatattaaaataaccagtcacttattctcttattattgtgagaacatggttataagttagttatcataattgatataatcaaccttgttttgggaaaaaaattgcttaacaatgtcaagtagaaaaatttgccaaatattataacttctacgtgaaagagacaacatgtctctgagaaaaaaaatgtcaaaaaggacttgacccaagatttttcttgggaacagatcaaattttgcactgagctgacccaagattttacagactaagagggatttacttatttgtagccgagagattttgtacggtaggttctttgatccgagccgttagacacaaatcggacgacattgacatgctccttgtcaccatgttgttcgtatggtccgtgtcatatgtctttccagatgtcagctataaagttgtacgtgcaaaaggtgtaacccatttagtttcaaaaaaaaaaaggtgtaacccatcaggatctgccggacaccgccgagccaccgtgcgtttatacaggacgttaaaagcgcccccggggcccatcacatcgtgcacgagagtagtactgggagtacctggtggggcatgctcaaaggacgataaacaccacgggttcgcgggagggatgtggcccctcctccccaaacttatctgtccaaaacttgcatgcccgcggcccgcggctcggcaaatcgggcaattacgctggcaaatcaaccgggatccgcgatccagtcatccaaccaaccaacccaccccgccgctccctgtccgcgtccgtccagcaacagcgacagacgacgagacgaccacccaaccgcgcgcgctcgcgtgtagtacgggggtacgagggtgcacggtgcgcgcgggagcgaaaccgtgagttggttcacgggctcacgctgcgttggtcagcaggtcaggttagcagtagcacggttgcttcgtggggacggacggacggacggggacggggcgcgtcgccatgtgaccctgccgcgcgtatcatctcggtgttgagccatgcttctcaggagactttccgacagaagaccttgggctccgatcgggcaatgtgcgtgcaggccgaagcatgggagattctgaggcccatctgttatggggctatctaccgactgactgggccgtgtgggaaagttcggccggttgattgggctctacgtttacatctcggaataagttcatcagaggtccctcaacttaacagcaagattttttaacgtcccttaacaaaaaaaaaaccagaagtcttcacccctaaactatacaaaaccgtccaatttaggtcccatgacagtacagatgcctagtttcgctgacgtggcattcgagtcagcaaaattaatatatatatatatatagatcccacattaagtgaaatgagatagaaaatgtggggaccacttctcttcttctctcttttctctttttttcttctcttcagatcctctcccagggaggctgccaccgatggcaaatgggggcgaggcgagcctggccgagctccgccgccgtcgccgcactgacgcacacgcgctcgctcgctatcgcttcctctaccccctgcgtcgtcgcttcccctgtcccctttgcccccgctcccaacggcgaagaggcagtcctagggacattccttgaggaccagcagtgccgccgcctcgaccggatctgggagcaccccactaccacgacagcggaggtggctagaggaggagtggagtaggccggcagagtggtggcggcggctcgaccagccgaaagttgaggatgttgtggctggtgaggtcgagccggggcgaggggagggggaagtggagagggggttggaggagagaaggggaggcgctcaccctcaatctcgacggtgccgtcggcggtaagcacagagtccgcgcaggcagtgtagctcgccttggcctcgatgaaccacacccctccgccggtgctgtcgatctcaggcttcccgacgaccagattcgtgatgcggccggcgatagggtggtagtggacgaccgatgcggcctagtcctcgacggcttcggtggagacggaggggaatacctggatgaagtcgatggagatgcagacggtggtggcctttgtcgtcgttgtcgatggaggatagcgagagggagccgcccggggtgggccccgccgagggcaccagcgcgtccccccgacaaccggtgctaagtcgctgcctcctcctcgccatccctagtcggcgtcttgtcatcgccgccccaatctcgtcgttgcagcgggtcacacccccacgctacctcctcgccgtcatggttgcagtggtcgccgccaccaccacatagccggtgccacctcctctcctcccccctctctcgccggtgcggccggctgcctctctcgccggtcctcctcttccaccggcgtgttgccaacccccctcccgccggctgcctgggaagaagagagagatgttgatgggctgatacgtgggcttcacatatttttttatattttgtttactaggatgctatgttagcgaaaccagatatctatacttctatgagatataaattggacggttttgtatagtttagggtgaagatttctgtttttgcagttaagggacgtcaaaaaatctcgctcttaagttggaggacctccagtgaacttattcctgatttcacatttctctcttttggaagcagtaaaaaaaaggttgaccgggaaatcgccagctccttcgatctgaagacgacgagaaccacgacaacacgacgagaattcacattactctctgtttctacaagttgacccggtgttcgttggtcaataagaacaacacaaccacttcgggtgacatcggtatcgattggcttgggtttgacaggttaataagccacgtcagtttggattgacaaagtcacaaaactacagcgcaccagtgagctccccaaaccgaatacgttttctcactgttgtctcatccatcaagctagtgaaccacctccaacaaatctccaacaaatcccagatcctgatcgaaagcgtcccgctcaagccgtgcccacaagcaacgagcatatgcatatcacagctagccccagcacccaactccacagcagctgcagtgcagcaacagcacaaatgagggtaacgacgtagcaatgggagaaaccaaagccgaacagctggtgacggccgtgtacaaggtgcacgtccactgcaagcagtgcgcgaacaccatcgtgacacagttcacgcagttcccaggtgtgtgcctgcttcagtaccccgcaggccgctgcaaaaaaattttttttgccgtctgaatttggcgcctgcgcacgatttacattctgattaattgcgtagtaataacatgaacaggagtcagagaggtgaaattggatggaggaaaggtgacagtgaagggcatcggcttcgacgccgagaagctcaggaagaaggtcgagaagggatgccggaggagagttgagctggtgcctcctcccaaggacatagtcactgaggtcaagagcaagaaggaggtaattaatctatgtccttgattaagttatttttggagtttcacttgcctgaaaaattggattttggttttctggatatataatacaggaactgaagatcatcactgtaagggttcccttgcattgcgcagagtgcgcagccagggtcaaagaggttctacttgagcacaaaagtaattaatttctgtacctcggacagttttatctcaatccaacagaatgaaactgcagatactaatgtagtaaccatatgcatgcaaaatgaataaataattcaggcatttacgcggctaagattgaccttgggaagaacttgtgtgtcgtcgagggggtgattgaggagaagaaactctttgaatacatctaccatagaacgcgcaagtacggcttcatcgaaaaggttgagaagaaggagatcattgtggaagagaaggttgaggtgaagaagaaggaagctgagaagaagaaggaaggcgagaagaaggaggaggtcaaggtgaaggagaaggtcaaggaggtcgttgctccctacttcatcccctgcacgcaccctcacttcatcgattactcacaccctgaactccatggattcaaggacacggttttcttgcattgctcacactctaatcagttcctcagtaacgaaaacccggaagcctgctctgtgatgtagagtaatttcagatagatccaatatttatggaaaacgtgcgtcgaggtatagtatttaatactaacaaaacttcgcatacatccagaataaatttgcttcagttcagaaaagaaaggttgcgctgcatgtcctatatgtatctgtgggaattccgtatctgtgtatacaggcaagaatctgaagttctgaactaagttacagagaacagctctcatagtcatatatgaacagtatgtagcttgacattcccgggctgcatatcttgtttcaggaatcaggctagtttttcatgtgccttaatgctgagactacgagaaatgctatcaggcaaccaatgttactgaatataagcgatagttatcattttgtcaccataaaatcaaagtgtgtcattcgtgtgaagaacacaggacatttagttggaagcatatattagatcagcaaatacatgaacacacgaaattgaagatcgatctcttcacacgatctgacaatcaattaatcaatagatatacacacacttcatgttatttcttcagatcaagttaagatcttcaaatcatgaaaagctagttactactatcagtgtacgtacgtgagcgtagcgctgcaacttaacccagcttgcatgcatagtgatcttacaggatttcaatatattttggaagaaaacatttgtctccctctccaattcaggcacatgtgctaatactaaatgattcactcaattcaacattttgtaattacttaatatatatatgtaactaggaaacatttcgacatcaaagcatgatgtacctaggaatctatttgaggtataataatgaaaaagaggcaaacacaatataaagaaatacatgaacctgaactttgtcaaaacaagtactaagtggttagttctctataattttcatcctgttaaaaaagtatggttcatgcatgtaacatagagtagcaacaaacacatttttttagataacggaactacaatacaacaaacacatgccctttggatctaaaaaacttactgaaatggatactgtaggcaatcaaatatatacttaaatggatactgcagtatgcgcatgcgtgcggcatatagatactgaattgaatccattgacaactagtcagtgaagctaaaaatcatgctggtctctacgacctaacacacagactacttagttcggtttcatgtaacttgtagctgaacagggtaactgaaattagcaggctgcagtttttccttcttctatatatagttgctgaactttcttatttttcaggggcttatagtttgtaggttgaagcaaggaggtgattttttttttcatcctctgaagcccatgaaaattaatactaatacataacagcagatgatgtatttttaggccggggctccgttctgatgtattttcaggggctttacaggttttgatacaagaaagtatttaaagctcaattattgttacagatgaaaaaggttacaatttgcaagacctgaacattttgttgcaagaaattccaatgttttccaaagctgagcacattgaattaattgcgcgatcaagcggcgcggtgagttaagccataaacacagtattgataaaacatgaaagcagcgctgatgcaaagacagagcccatagaaatagaacacatgtcgtcaatagaaactttaggaatctcaattctttgaaggttcaagtcccaataacttaggaactagttctctgttcttccatttactcttacgagcatcttgcaatctatgcatataggacaagaaagaacatgaggggacacacactgtaagtagtggtaagatgataggcagacagttggtgaggattccccatgaacactagctagcctgttttgagaggatgcagttgctaattgcttttgatctttaaactaaggcaagtatgcacacgtgggagcaaggagttgtaactcgtgttgcattcccctagcttccacataaattttgaaccagaagaactgatgacatgcatataattatgtttccccagctgaactatctacaaatactataatatacatacatcactgattgttatatatcatcacacaaagacatctaacaccttcgtatcacacaaaaacaattagctaaaactccaaaagcacgcaccagcacatctatatgtgcatgataaagtaagaattgacagcttacgccacacgaacacataaaacctttttcttataattatcagtttgaggcgaatctctcatccacataccagtaacaaattgaacatcaacagcaaaacaaatagaacgcccatgcatcctcgaacaatttaaaggctacttaattattaaagccagattgacaattaagaaaggttacaccacaaattaaggttcaaaagaaacaataaaagaaaaaggggaaaaaaagaacaataacgaaaacacataatcagagatcgagcaaacactacgaaataattgtacatagagatagaaatagagcagtagatatagatcgatcggtggtaaccctgaatacgtggttcatgcgtgcgttcgctaaccttttgcaagctgcggccatgaacccttgcgatgtcctttcctttgcttcttgtgatctctcctctcatctcctctcctttcgccggagctacacccatgtatgcgcatgtcagaacggtggccgtgcgccggcccagccatggccgtcggcgccgggagggagctgtgagccgccgccaccgggcatgttgttgagcggcaggttgaagaacgggaggccggcggcagacgggtccggcgggaacgcgccacccatgccaccagcatcggcgccgccgccgggctgctgcatctgcaggccggcctgcggcggcggcgcctcctcctcctccagtgggaggcgctcgtaggcgacgttggcgaaggacgccgcgatgacgatgaccgggcccgcggcgtagagcgcgccgacgacgttgccgccgacgacctgtccctggcccccggcgaggaagatggtgaggctggtggcgccggggggagccggcggcgggaggaaggagcccgagagcgacaggatctcgaacctcccgtgcagcgacacgacggcgcccgcgggcgccgacggctgacgcagcgtcacgttggtgaccacgccgctgccgctcagcacgcacacgccgcgctgccgccggcgcgcgtacgtggagacgcactcgaacacgtcgcagccgctcccgacctccaggatgtgggcgcgcagcgtgttggcgctctcccgcgtgatgatcaccggcggcttcggcttgttcttggagccaggcgggcgcccccgcggccggcgcgccaccacgtcgccgggcccgccgaccgcgccgtcggtggcaggacctgacgacgaggacccgccgtcatggtccccgtacggcccgccgttgctgttgccgccgccgccgctgccgttggggtcgtcgtcggacggctcgtgctgcttggcgtagctgtgctgcagctggaggtcggggtggaggtggtggagctggtggacgtagcgcgtcgcggcggtgccgaggtcgagacctgccatgcttctccactagctcatgtactgatgtagcagcagcagagcgcctctctagctctagcaaaaaaaatttaaaatctaaaaaaaaagtggagaaaaaagagaggaaaaaaaccgaattggaacaggggtggtgttttgtttttagggttaaaaggcggtgttggaaaaggaagcaatgatttttaaagtgggggagttgtttatactcctccttgtttttaaaatttttggatgcacagagaagcaaacagagagagaaattaaaaaaagaagcacaagagagcttgcatggaggagagaacaccaagagagagctattgctgtttgatctgaattggagaagggagaggagaggagaagggagaaaggcaagctatgaagaagaagaagaagaagaagaagaagaagaagaagaagagagacatgcacaggggaaagaggagagaaaagggagggcttgagatgttcttccaaccagaggtaggaggtgcaacacataaaataaggggagaggtgccaagggagaacaaattctagtgtatgcttgcacagctaagcagaggagacctagatcacctcactgacatgtgggcccaacagaacacgcacacgagggagggcccacgcgtcagcctcacgggagctcaagcgtgctggtgacaagaggagacttcggagaggagacgaggagcgggatgaactatgatgcggaaatgtgatgcatgtcgatagtgatggctagcgtgtcatcgtgaccttttgctaattaaccatggttaagcggttaaacctgtggtttagggctactaatcaaggttagagggcgtccataatgcggcccctcgtgggggcccacaccagcgcatgccacgataggatcgtctgcggccatggttaggtctggctagctcttgagagatgcacaacgagaggtggattaattttgcactacttctacaataattggttctccgtagtctttgttaacaaattcaatggttaatttgctccaaacactgcggtcacaaagagttacatacgcccaacaggtagccagctgcctttggtatttgttactccgatttgaattttgataattatagttatagggcgtattttaattttaaaggtcttatcaaaatcttgccaaattaataattacacatggtgtataaaattctgccaatagattaattttgtaataaactgttttcatgacacaatataattagtagtgagggcttgcctttggtaaaatctatacataactttgtagcagtttcagttgacactttttacctaattaatttggtttacgaattatattgatcacgactataaatatattccaacattaatttagcttatctaggtagctatacccatatgtatatgctcatggagacaatacacgattcattcattaattcatctgtttgacatgtgtacatgtatacatgagagatgtgcaacaccctctaataattaacaaaaaaaaatgcccgcgaattgattgatgcatttctttaattggcctttgtcctttacaacatatttttagacaacaagatttataattgatcgtgcgtttatagtttactttcaatatattacaaatgtcaagtcaaatgaatgacccacatcatgctcgcgctcaaactgaattttatatgcaatatcttatgatcagttcttgtaagcgtaacctgcatgccgtactttcactacgtctgatcgatgaccacaaaactttggacactagactactttttaccatcttttcacgagagaccaattaacacatgagtaacctcgagcgcaactgtttccgaatattaatttacagctttttaaatgtgtttcgccttggaagaaacacgaccatgcatgcacatgaacacggtagatttcaattctgtacaccgagacgcatggaataatgcataactttttaaggaaccaaaataaaatatatctattttttgtaaaatcaaagtgtttttgattccttattttgtgatgaacaattggcatatgagattattggttttgatatttggaatttatttgtgaagtggttacggagatgattggaattttactggtggtctacaggaactgttgtgatgtggtccggtcagaccaggcatgtgctgccgatcagactggcggcaagcccgcggtctgaccggccgactctgtgtcggtttcggtttcgggttgtttgtttggatatctgtgattgtttcatatttatggcttctagatggatactatacgtatgtaatactgttgtttgctaataatgagtcaagttggagatagcttggtctcggaatatggtttttttgtttgcttcatgtgtaggtgacttgatgcctcaggagagtattgccggtgatagatcgggagtcgacttggggataaggcgatgtccttgacgatcagatatcatgcgggatacttaggctagagttcaatgcacgtggttggtgaagattccatatggcatacgatggaggtattgtgtgcgtatgggatgcggagtcgaatttggaaggagtccaaatttggtatgattggagtttgtaaagtttgtttcttgtgcgagaaggtttcctaggtggtttaggacttctaatatgagtttgattcgtggctttaggctgcctacctcatgtataaatagagagggagcatgaggctttccggtatcgcttttgagaacaactgagttgatagtttagttaggatttcgagtttagtcgagatttttgtaagaagtgttgttgttgcactttgtaaacacagagagaagtaataaagttggcatctactttgagagttcttcgatttgtgtttcatcgggttcagcggtctaaccggcgacacaccggcgatcagaccggtgtcatatctgcggtcagaccggcggtggctacaagaggaatctgctgatcttggtggttcgactggacattctacttcggaccgacgacttccaggcggtcagatcggcgcaacacctttggtcagaccgcgatccgtcgaatttaagggtaacttttaattccgcaaaaagtttgggtttttgggtataccaaccattcaccctcccctctggttggcttagttcttgtgtttcgatcctacattattttaacgcgtaaaagaattgcacatcaatatatatatatatatatatatatatatatatatatataggacactcatatggggcaccatggtgcccgggcaccatggtttcaaatgcacaaaatcactcaaatttttcaaaattttcaaattgtgagtatatacctagttataagaattcgattcatacctatacctatcaacaaaacaactcaaatttaactttatttcacaatccatgattacatacctaactaattatatgtatggatgctatatacctagaatcaaaatctaacaaaaacaagttcaaattcagttcaaacttgctttcaactagttagtaaagtagttaatattaatacctaaataattaaaaaagtttcatgctcatttgaattgggtatatactcaatttcaacaatggtgcccgggcaccatggagcaccaaacaaatttaatatatatatatatatatccagacaataacaaatcaaagagaaataagatatcccaaaaaaaacatatgccatatgtttttctctgaaggtgtacgtattagcaggtttcgttgttatgtaatttattatagtagaacataaccgtctataaatcatatgtcgttaacttttaagagaataaggacagacgtcgtggatccatgcctggtattattattattattattattattattattattattattattattattattattattattattattattattattattattattattattattattattattattattagagatgtgcttctacacttctttaaaaaaaagttgcacgaaaatcgaagcacatcaatggctgtgattaaaagtgggttaacagtttaatcctcattagtgaggggtattttcgtccatagaaatttcagcccacaacgatatcgttctctcctcgtcaggcagcgccactgcccgctggtttcctctgcaacgtaagcgccacccgcttcacctccctgccctgctagaccaccctaactagatcccatcgatggatcgatggatttgcggtgatttgagttggtagttcgctcgcaacacgatgagcgggagctccagtgaataatatgctgctccacaatgaagatcgtcgccgccatgctcaacatgatcagcctcgagcacgaggactatatatagcaacgtcgacgtcctcatcaagggccaccacctcgcgccgtcgccactgccacattgagcacgccgccgtgccggcagtagtcaggccaccccagcgacagctgcagcagcttcttcggtgccatgatctacacctcatttaaggccaagtcgcaattcgattgaaccaaagtttaaacagaagaaataacacaaaataagcttgtgcccttcgtgctttggcttgtttgatatttgtttgtctgcaatctgcaacggcaagttcgatgtgacttgtgatggtggtgagctgtaaatgaacggggtagacaatggtatgcagatacttgttttatgactactggctgtgagatggacaaaatggagcgtcgtgctgcaccgcgcgtcgagaggaagaagagggcggagcggcggcgctgtttgcaagaggaagccgggcaacgaggggaggaagagggaggggaggtggcgaggcaagggaagcgcgggcggtgcttgcgaggctgaggagcggcgctacccaaggagagagcatcccggactagcggtcgtagtcgtggaggaatcggcgtcgccattggtaatttggtatcgctgcagagttggaccggggctcaaaattccatggacaaaaatacccctcgctaatgaggattagagtgttaatctctcttttaatctcatccacttatgtgctttgattttcgtgcaacctttttttttaaagtatagaagcacatctcttattattattattattattattattattattattattattattattattattattattattattattattattattattattattattattattattgttgacatcacaaatctatgagcaaatataacctctgttcttaagaacgtgtggatatgatggagtatatatatacatgcacacaattatatatattcaatttaatataataaacacataattgtatcttgatactatatactatatggcaactggatcaaaagattaactatatgacgaaaagtaggtctcaagataacaaaacattacattagtgtaatgacaatacatataattaacaagctagctagtcttagttaaattaactgaaagtacaactacttaccacttttatatgcatcaaatccagctatatatatcctcaaacactcactcgtgccttctcctagtggtgcatgtatgcatgttcctcaatttttgtgtcaataaactccgaatgcaaaaccaattttttattgtgtgcaataagaatattccagcacgtacataagcttctctacaaatagatgttcttataagcagcctccttatatttctttgttgaaaatctctacacttacatgtagacacatcacacaaatgcacacactacaaagacagtccgagggctactagcaataaacaccccccccccccccccttaaaaaaaatcccaaaaaagtgagcatctgttgactgaaaatgtttagattctcgtagattggaaccaatgttgtagaaatgtttgtggtgtacatataatttgaatcatgtgaatgcttatatttgaaaatgaatgcggtcaatttaatttgctcttttcaattacatggagacatatacgcgcgcaccacactcatacaccagtgaatgtgttccataagacatgctcaaagagatgcatcgaaaggtcaacagtacataaattcctagcctcgctaaaatcatattgaaagtgcattagcgcgtgagtgcattagcctcactcaaattctattgaaagcaacattttcaacacaaaacaagcataattttaaaacatattcaatattttatttaacgaaactaaatcggtgttgtagatgttgctaaatttttctataaatttggtcaaatacaaaaaattttgactaggaaaaaagtcaaagcgacttgtaatatgaaacggagagagtatatagaataatgattcaaatgtaaaagtaaagtgatgtggctttatgagagaaaaaaatgagggagatagtttggatcatatattaatcatctaaggactaaaatcaattgatgtgatatggcttgatgagagaaaagagaaataatattaaccgagtatgaattatatggatatatgcgatattattaaaaaatgatgaaaagatatattgaaatattatgtgaattatgtaggatggtgatttagcatgcttgcattttaaaagctctaaaacttagtaaattataaaattgtagataacatagcatgtttgtatgatgtttaaatgtaataattgttagtggatgatgatgtaacatcttcgcatgttatgttttagaatttagtgggttataactagtaagatatgatttcctaacagttagaactacatttagtgaaagatatgtttatactccgtcctaaaattagtgtgcagttttattttaaaacggagggagtaattccttagcagaaatctcatgcacggcacattaacttgcagacccacatgccagaaggaaaacaatgagaagtaaatagtgataatttttggctaatgtatggtgaagcgctggctggtagtatttcagtacttgtatgctactagcaatacgtacctctcgatcccaaacttaaaaacggcaagttgtgcctggctaatcagttctcgacaagtatccccatccagggagccgatcgatcgagccgactgtgcagccgcgagccgacgctacggctcgcccccccacgtgcccggtcacgtgcggtcaagtgcgcggctgcccctaggcggtaactcggcgtggctgtcggccatggccgagcaacaccggagagagagaaaagagagagaagatgagagagacgagctcgctttcctcggaaaccacgctctgcctcgctacctccaaccccagcccatgcgtcccactgcacgtgggccccaccaccacagccccaaagcatggcgcaagaaccctaaccctaaggactccccaaaagttgttgcagtgagacaagagagaaggaaagacgaatactgcaggatatgctttgtagtatcagttcgttctgaatgaacagctgcaactattgtgctcgttttaattaatttcttctatatctgtttagttaattaattaccttctgcgctagctagaaagtttcagtgacaagataaagttaaactgctttccagaaaatagttaatttacttgcgcacacgagcaaacatatactagtactagtagctaacacacacgtcgatcaatctgaagtctgaagatagttaaggcagttaataatgctgccatggatcgatcataaattatgctgtccatggttgtacgtcgatctgttagtttatgaaaataacatatactcctagagctatgctacttgcattattatggtatcgtagattatttttgtctgggccgggggttagtggatataagctatctcttcgatcggaaagtagctagcaatatatattttggaggtggagagatctgtaaacagtgcctcgtacttctgctaactctctggtgataataaaaatatgatgatcgatttggtgtgtttttgtttattatcgacaagttaagacgttcgaggtcgatcggaaagacgtatatagattcatcgaaagggattcggataagtttaatttgtaagtacaattcacggtacgtgtcagcttaattctgccttccctcttctcactactttcaggtatcttattaattagtaggtcgcaactaccacttttctaagcctgtcataaaataatacagggtgttaatcatagcttggtccggtgagggattaaaaagatttaggtttcatgctgttcctggcaggtctcttactttgaaggtgcgtgcgcttgtaaattaataaatttgccatcttgttaatcattaatttaaccatgtcccatgtcccgccaaaatacaccaatctcgctcaactttggataccttatactattagttgagggtagttagtaacaataatgcagtctagttagttgctcctcatgtattttgaagcagaagtttatcgatttgtttaaatattactttctccgtttcaaaatgtttgacacagttaactttttagtacgtgtttgaccattagtcttattcaaaaaatttaagtaattatttattcttttcatattatttgattcattgttaaatatacttttatgtacacatatagttttacatatttcacaaattttttaataagacgaatggtcaaacatgtgctaaaaagtcaacggtgtcaaacattttgaaatggagggagtaatatatgtagctctgcgtgtacttcgcatatacattgccaaccattggtttgtccggccaagtgggtgcatcatgccatcatatgatacccctaccctatttagttcttggttaaagttcgcataatagatatatatgctgaagttctatgatttaacattgcgctgttttgttgacctgtatattgatgctaagtcttgtgatctgatagtttccctcaacgaatttttcagtcatctcgatcgatctgtctcaaaaacatttttatatttttttttgtgtgtgttatgtagattcagacgtttatttttcgataaagaaattaagctttattgatattagacaagtacgtcaatatgatataattactctaagtcttccttctagcctctgcatatatatagttaggatgcacacaacctataattactattgaaaaataagaaaagaagaagaagacgacgaccatggcttaaaatttctgttgcccgatagatctatataagcatgatagatatatcgatcaatctaaaacaacaatataattagaaaaacatcaacttagtaagaatatcgtacctaaccgacaaaatcctaactaggccaatacaactctaaacaacaatgcaattaaagatataacgaacatatcagataggcaacaccttgcatcgacctagatagaatatcggacttgaacgagaaagttttagccacgctgatacaagtgaagttgacggaatttacttcctcgccggagatcgaaaccgatgcacccaacttgaaactaaggacttgccaaaataaaaggtagcgatacgtcaaaagtaattgtattgatatatgaagatagtttacaaagactttatgtgtacatatttatataatcgggttgatacaagttttgatcggacacaagactcttaacaagaaatttaaggaaaataactaattatgccgatttaaaatatatatacttaaaaatatgaaactgcatggtcttcacgattcctctagataaacttgtatctaccaatcggcttatttctttaaccgaatccactacgcttttaccctgagcaaattctgaagtttctgtttgtcaaacttaattcttgatcccaacttggtctctgaagtgatgatgtgtctattatcttccgtacgtgttcttgcacacccccccccccctcaattgatcccttaaatttcatatcaaataaaaaaatatcgaccagtatttatttattttctgcatgaaatttccagtttatccaattccaacctagctacatcgttgattaataggatgggtgcacatgccggccagagcgcagcgtactgccggcggtgagccggagatctccggcttgccggccggcgacgagctagctgatcgatcaattatcgttatcttcgccatacgcatctagtagtacgtagctagctagctagccatggcttcatgcatcctttgaccggtcggtccgtcggcgccgtagccgggccgatcacgatggagaggtcgaggccctagatcttgggcagctgcgtgcgcgcgaccggtggtggttccaaggacggtgacccgtaccagccgcaatattctaaccctcggtggcaactttagctttaagaaagccaaggctaggcgggattaagttaatcgctaatcgaatacattattgtgcgtgtcatggtccctaatcccgacaagcacgttgcctttgggccaatggttggataagctcgagaccggcgctagctaatggctaatggagtgattaaacctagcctaatccccctcgtcgagtccgaaagtgagctaaagctatagcaaagcgaaggcgatcgatcgattgaggagctagctaagctagctaggagaggatcggaggaagaagaagagatcagggccaggcaatttgttcgtccgtaacagcagctgctagctaggtcatattattcgatcggtttcgctgccaatattatgtgcgcgtcgatctaaatatggtgatcattcgatcgatcgatcgatcagctagctggttggttggcctgtcgctgttcttggccacacaaaaaaaactgaaagcaacagcgggaaagtccaacttccgggatggcatgtagcccatggtcgttcgtgatttgggatatgtcaccgagaaatgctgtcggctagcagaatcgtagtaaccccgttatttgttttgttgcaaccctttgtcctcccgtctggtcctttcagtcctggctagggttgcacagtgttattcgcggctaatgggcatcatatgcacttttggcttactgtgcatgtacagttaagtcctcacatgcatgaatgcatagggtcatcgagatcagcttcaatttgttcatcagactttcagagagatgaattagtgctttccacctgatattttcctcgattccaacttggcgataagatacaagctagataaaagggatgagatgttccaacaaaaatccgaggaccaacacagtgaatttgaataatttagaataaagatcgagcaactgagcttgcatgagcgcccgtcccggagcataggatactactatatttgtttcatgtttcagtctatatgtatatatatgttccacacgcatgcatattaattatctattaattgtaggtcttcatcaaagtgcacctgagtgtttgatatacatgcattattattattgaatctctagggaaaaaaactggcgtgtcgatctgctgatggaaatgttttagtcaacctaatctaacatatatagatgcggtaagtatcatgggagcatgcacaattatataaatttggctgaaatatatgcgtgtgttgtcttgggctctcagccttcttaattttatgacgctcgatcgtcctttgcctggtgattatatattactcggtcagtatataaatgcatgtaaatcccggaagggttggaagattctgctgttcaatcactcaatgatgagacactagctactacttaatgcaagaaagttagaagttaattaacgcatgcttagataaatgtacactaactcacatgttggtactaaaagtaacttctaattctagtttattctcctgcaggttctttctacttgctttggttgcttttacaagtaattagttgccctaggaaagaagataaaaaaagaaactagcccaaacaattcgagcacggcctcatatattttatgtccattcctcgaattagcagctagagccatgtgttaatttataaactaacatcacgcaatatatatagctccaattcaagtcaaatattagattacttctgcaaagtttacaatgggataatgttaacatatgtgtgatggttacctcacaggagtaaactacatataattacagccatatgttttgctttgagggtcagtattataagtgtaatgagtacacgagcaccttggatttctttattgtgtatgcacaaaagtctaaataaattttcttcctagctatggaaacacggaaagttcgttatatttagtcacttgcaatggatagtactactgttgattacgtaattaaaatatcgatcgagaacacaaaaagttcattttgtaggttactactaatataagaatcgtaagtacttgatcgcaggacaacatcaacatcatttgttgcatcaaatcttttatagtcactgtactggccatttttttattaccacgccatggataaactgtgggcgagagcaacttggtttctaataagcgcgtacaaagcatgaattcatgatgaggacatcacttcgtcggatacgctcataacttcacacactccaatgataattccaaatccaagtccagttcggcctccggagacagcactgacttcaaacggacctagcgccttcatgccaactccgatttgggtgatcttggacttcgtggaaagattatctcgctacctttcaaacgcatctggtctcatgtccaaattcatctcgagtcaacgggaatcgccaaaacaagacagtgctgttgctgaaaccgaacttgggccttgggccttgtaatagactaggcccatctcggaagtgtcaccctccacctccacgaattagcactgaaccctagctttattttcctctataaatagctttatacatcctcaaaaacatttgggttttgtttagttgaattttgctaggtgccattcaccttgtctctagtcctcgctcgattagtcggcgactatagattcagagcccccaatagttggtgtgttgatttgccgggtcgattagatctaccacttcaatcgcaactattcctttgtgcttaattccctattcgcaatatttagattgcatcttatcttgttcttgcagtgttctctcgtttgcattgcagggatcatcaaccgcgcgtcacggttggtacgacatcgtttgtggtgtagcgattgcacggcgtcctggacttgttctggttggtagccacgtcgcaaacgtcgcactcgatcaaagcgagagttatccccctcaccagaagatcgggccacgagagagagcgtcatcacttcaagtcttcaacatctgaatgattttctatatatcatgcatgtgcacgagtaaaagctagcatttctgagtaattggtagccaaaaatatggcttggtgcatttctaccatgtactgataatattagctagtaatagtactagaagaatacaaaagctcatatcatgatttttgtaaaattattatgtaacttccgaaaataactagaaattcttttgacataaaattaaatacctagaattaatggcatatagatttattggaagaaactagaggtgtgatggtaaagtcgtagatgcatcattacccattagaattcaaatctatatacccagaataatcacatgtaggtgttaagatgtgattttaagaggttaggctgtgttcggtagtgtgagttcccaactcccacatttttcgttttttgtgcgcacgctcctcacgaactgttgaacgttatttttttgaagaaaaaatttctatacgaaagttgctttaaaaaatcatattaatctatttttcaaagaaatttagctaatacttaattaatcttgagctaatgagtcgttccatttcacctgcgctagggattagctatcatctcaagctgccgaacacagcctcagtgagactaacatacttatcgctagccttcgttggagctaattttcattgctatatatgaaaggtctttgtttatatagacatctttgttagttttgaataaggatcctgcatgcgcaggacatatatctatgtatattatgattcaaggacattcacatggatgccattttacatgaacacacacttcccatgcatgcatgcatgtaaacacacgatcgaatgtactccatatgtttcaggttataagacgttttgactttagttaaagtcaaactgtttcaaatttagctaagtttatagacaaatatagtaatatttataatactaaattagtttcatcaaatcaataattgaatatattttcacaataaatttgtcttggttgaaaatgttactatttttttataaacttgatcaaacttaaagaagtttgactttgactaaagtcaaaacatcttataacctgaaacagatggagtattaaatattcaatgtgaaaccgtggaacacaagttgagatgaatcacgcatgctacaaattaaatgttcatgaagtaaattggagatgaaactaagaagacgacgacaaaacgtctcaccaatcaaacctgcataagcatcctaaagtgacgagagatcttgagagagagagagagagagagagcagtatagtttattatggcgcgcggcaacgaaaagaaaaataaagattaattcggcatagactttgtttgctgggaggcgcctcacctaatcatgtcgccaagttgaagctagccagagacaccccctctctcacacccactattttcacgagccaatgagcgattagcttgctcaccctaatattttagggctcaacggcatcttgccagagtggaaacctttaacctaatggccatataaagataagcactacacctattaaggccaatattttatgctaagtagcatatgggcccctgataaaagtgacgacatcagacggcaaatggggcgcaaatgtgaggggacggaagcttgcaataaaggggtgttgacctaaaggaaaatgcgtgtgcataggagtatttttcaaggacgagagaaaaaatattaaccgaccaacaaagagtttgcttgtgcatatacacagcgccctgtgattgataatgattgatttgtcaccctttcaaccccttaatttagtgccttaattaaatggttattttgtcatgtcaaatctagctagctatatcctgctagatttatcctcgctatagtttatacatggccgcaaatgtggtgtttcgtgcatagtttatttactgattcattgaaaagtatggctttggtgtgtgtggatgcatgggtgcttgattctgtccatagacaataaggtcaattagtatatgtaaactctttcggagaataataattagtctagctatgctagcaatcatttgacattctatctagctctccatcgtctcaacgctctcaagtacacgcgcatatctttatttacttatttatttatttgcagtgttcgcttacttgattaattaattatgctgaaacatacgctgttaattaccaccgatttgactcttggcgggtgcagaactgcggatagctagctcgatctcggccggatctgaaggccacatgggggtcggtatatgcacgttttaatcggtcatagattagcctcagttaatcaaatcatcaaacggagctagcattagcaagcgttggtcgatgcgcgacatgaaattaaccctgcggccgtcagttgagcaaatgagctatgagcatgatgcatatacagtgctgggggtacggtgtgatgggtggtacacgtgatgcagctctaagctagctagctacccaccatgtatggcgttctcgtactcactccgtcccgtaaaaaaacgaatctaagactggacgtaacatattctagtacaacgaatctagacacagagttatattaagatttgtagtattaggatgtgtcatatccaacaccaggttagttttttattggatggatagagtatgtacatgcgttcacgtgagcgcgtcccatccggccgatcgagccggccggagcgagctagctagctaagcgcgcatggcggcgtacgtaagtacgtccatggctgccggctgcgtgcccgcgcgcccggccgctgctctcgagatattcgagagagattgagactgtgtgtagtgcagcgcgcgcggcggcgtacgtactccgcagtacgcgcgcgcgcacgcagatgcatccaccacggaagctagcaatatccaaaagagcacatccacgcgcgaggctagcgccatggagagcgagctaggagcgctgtcgcacgtgcggcaggcagcgggcgcgcccgccgaggcggccgcatgtgctcccacgcctgcgcgaccctctcgccgcattaattgcttcgcacacgcctccgatcgatcgatcgatcgcatgagcgccatatgcgtgtgtgcagcggatcgagagagtggggagagagatgcagctaactgaattccttcgggtactggcggcgattggcgaagaatttcacctctcgtacggcgtcgtgaatccctgccgatcgatcgaaaagcggtcgagcggccgccgctagtggcggagccggcacaatggccgtcaagccggtagtgtttttcggtgatagattaatttttgttagtattgacggatatggacagtgaagacggtaacgatagagtcggggcggtcgcccgacctgtccgggaggtggcaccgcggcgccgcgcacgcatgctgcacaaggccgggagaaacgcctctatggcgtttgtgttgatctgtgttgcggacttgcgggcgtgaaacggcgtagtgtggggcttgggctttgacccgccctgtatattctagcgttatatggatgggatggaattgaggcccatccgattagaagggctagaatgaggcccatcacaatgaggtcttaggccgcgttgcttttgctgtgatcggctcatgttttttcgggactaagttcactcgaggtccttcaacttgatgtcgagtttgttccatcctaaaccgcaaaactggatataacgtgtccctcattttattaaactggtgcaaatatagtctaagatagtactccctccgtttctaaatatttgacgccgttgacttttttagcacttgtttgaccgtttgtcttattaaaaaaattaaataataattattttttttcctatcatttgatttattgttaaatatacttttatgtatacatatagttttatatatttcacaaaagtttttgaataagacaaacagttaaacatgtactaaaagaacaatggtgtcaaatatttagaaacggaggaagtattaaatatgtttttggatgacatgtcacaaaaaaagaaaaaatatgaaaaataaaaaatcacatggaccagagttctggtgctacatgcccagctcagccgaggcgactacgtcctcgcccaccatcgggatcatccaccagatcttgaacctgaacagggacaaccacttccaccccctgcgcacccaacaagagaacgaacccatcacaaaatcagcaccaccggcggcggcgcacatcgcagtctctcctatgggattgcctggtgagacacatatgtttctttaccttttagttttgtgtttggtaccacggcagcgtcatgctagttaaaaccgcttatttgtatcgattttacaagttgagagatgtgttatatacttatatctggtattgcggttgaggacgcaatttgaactcaacatcaagtcgagggatcttaagtgaacttgttccatttttttcctggagttacatggatgggctggaatggaggcctattgtatgcgacggattagatttcggcccaccgagacgaggacttttttgacacggaccaaaataaggccttactggcctttttctggcgaaaaagcaataaccggcctctgctctctggcccagtttggcgagcccaacaagttctacgtgaagaaacatttgctgggacaatttttattttatttttttctacttgtgttttggattttgtttgttttttttcgtgtacggtgttctgacctgagaaagaccatgcggcgtgttggacactactaaggagctgtttggttgggccgtttttggcccgtatcagatcccaccgtgaatagattgcattacacatgtttgtttcagatggatcgtaatcggatagcccgcaaacgaattccggcccaatacaaagctgattacactcataggcgggcggaaaacgataccgatacggagcgtaacctaactctcctcacgcgcctcgtccagatcgagcgccgccgcagcttctcctccacatcgcgcgcgtcgccatcgccgccccctctccctgtgcgcgtcgccggcgcctcctcctcaccctgtgcgcatcgccggcgcagccccctcgccccgcgcgtgtccccgcgccttcccatcgtcccgcgtgtcgccggcgccgtcccctcaccccccgcgcatcgccgacgccgccgtcttgcgctcctccaccaccgccgtcttccgatgtggatcttgaccggaagaactccgggaacaagggcgaggctgtgaagcagggggctggtgccatcaaccacatcggacttccgtcgttgctgtcatctatcaatcacctcgccggtgagaaccctccccctactgaaaccacctctctttataaattgtgaatgctgatgagtgatgatcctgtgataatcttttcattaacaaatcatgaagtagcttatactagtgaatctcatgtattaatcctgcctcatacatgttttcttcataagttcacatggttatgtagaatatattttcccagattgcaggaaagttgaatattagtgaatattttttttgagtgtagggaagtttgaccaactcatttttactatctagattttgagaattttgatttcttttactgccaggtgatatatcattttccacaatgtaagattggaaaaaaagttttgtgtaaaacaacagatacatgtaaatatccctgaatggatgcttgatattgtgttctagcaaatcacttaggtttagcaataaaaaaaatatgtactgtgtttattttagtggtagcttgatgtattatgcgtgctagcaggatatattctggacatggttaatgcttttgttttatatatttgtagagtgctatggctcgccttcccttaagtaccaaaacgcggagaagaaatttagggcttagaaatatgatgattgctgtcatacttatgtattatcatgttgttgtactgtttttaatttcatataagagaaaatattggaaaatagagaggaggatcagaactagagaacttaggagtgaaagactattccagcttattcgtgagagtgatattgcttgtataagcgagctccgaatggacaggaggacatttcacattctatgtgacatgcttagagacgtcggaggtattgaggatacaagaaatatgccgttggaggaatcagtagcttcattcttatatatactatctcaccatttaaagaatagaacaataggaaagtttttttaccgaagtggagagactgtgagtaggcatttcaatttatgcctacttgctgttctgaggcttcatcaacttctacttaagaagccagaacctatacctgaggacaccaccgacgatagatggaaatatttcaaggtaacccattctaaaaaataaatcacatttcctttaaaaaaaatcacatctcagcactattaattgtaccatattttattgatgtggtgttctggattgtagaattgcctaggtgcattggatggtacacacataaaagtaactgtcccaactaggataaaaggaagatatatgtcaagaaaaggagacattgttacaaatgtattaggtgtttgtgcacccgatatgcagttcatttacttactacctggttgggagggttctgcacatgatggtcgtgatgcaattcacaggccggacgggcttcgtgtccctcaaggcgagtctttttccaatcaatttattttgaagtttgacactccacagcctgaattgtactgatatttcttttttaaaattttaaaggttgctattaccttgtggatgctggttatacaaaagcagatggttttttagccccttaccgaggccaaagatatcatttaggccgtttcacagcacgtaacccaccacatagtgcagaggagtactttaacatgaggcatgcaagtgctagaaatattgtagagaggtcttttggaagactaaagggtcgttgggcgattttgaggtccccatcatattttcctatcaaaactcagtgtcgaattataatggcatgtgctttattgcacaacttaattttgcaaaagatgtctagtgatccatttgaggatgaggacgaggatgaggatgaggacgagataccattggatatacttgagggagaactcgccgaacctgagtttatctcagctatttcgacatctgatgattggacaaattttcgcaacactcttgctcaggggatgtataatagctatagggctcattgaggtttgtgttttaaatggaatttctaattgtttgcaaatcaaaaataaaaaaaatgttggtacaattatggatgcttactgatgttagttttctgttgaatttctaatattgcagttatggagcatcttggaagctcaagcattgtgcgtgggagaggcaagaacaagaggatttggacgtactttgaggatgaggagctgatcaaggcattgttcgagattgctttggatccaagctggaaatcagaagggggtttcaaaaatggatactgccaagttctagagaacgtgcttgctaagaagttgccaagttctggccttactgctgttccgcacatagagtcgagagtaagacactttaggaccaagtttggcgcaattgaagtgatgctaaccaaaagtggcttttcttgggatgacaatagaaagatgatacaatgtgagaaacaacaatacgatgatcattgcagggtaagtcatcaaactaactatggagtagaaaatttatttattgattcatgagtgcattgaattgaaatatgtgaaactactgtaagatattttatgaaattttgttccaaataagcggctatgtaaaattcctctgaaatgtttgcaaagacaacattatggttttctagtagtatgctttctcatacatatgttctcttgtgtttttcatgcaattgtagctgcataggtctctcttttgcttgctaaaccatgaccttaattttgtgtcattctttgtattttacagaaaaacaatgaggcaaagggtctatatggtgtagcattccctcactatgatacactagctgcaatttatggtaaagacattgctactggagaaggtgcagagggtcttggtgaggctgttgctaatatggagaaagaaattgttcaagatattcaagatgaagaagatgaggaggatgaagagagagtgtctagagaaacgcctcggcggagcatcgattcagctgcagctcgacggagcatcgattcagctgcagctcgacggagcatcgattcagccacacctcgacggagcattgattcaactgcttcaagctctaagaagaggaagaaagacagcaacaaactgaaaaataccttgtcaagtgacccttttatggatgtctttgccaatgttcaaggtgatctgagggatgttacaaagcatgtgggagcaatggtggcatctatgcaacgtgaagctgagatccaagagaaggcaatggctgaggaggacccactacaaaaaattcagaacgaagctattcttgagtgtcaaaagattggattgactggtactgaagttgtcaatgctgcagctgcttttgtaaaagtgccggctcaaatgagtatgcttctcgctcttccagagtctctcaggagggagtacgtactgaaaatacttgctggtaattcacttgatcaatcttgtagtgttgcaaatgcaacaggaaacatatcactttattttgtgatcattaattgtaagcatattgctctttaccacttagcatttcatatatgcattcatattatttgccttgcactagtataatgcatcaatggacccagctgtccatctcaatgccatagtaatattatattcacttctaactggagtatgtgcttggtctcttgcttacttgcttacacctaactgggagtttttgtactcctaaagttaaaaaatgctaccttttttctgaatatcatatatggcttgtctgtgcaagaatattcttaatttggtatgatgctgagcactatatattttctttcacctaatgtttctttcactaatttctgaattttttttttgttatcagatgaggcaaagaaaaattgatgtactgatgtgctggctgtcaagcatgatctacaagatgttcattatctgtttttgaattattagaattccatataagcataggccttggggattggagactacctatgtcctaaggatgtttagtttcagtacttcagctttatttgcttgaaccatgacaatctatatattctgtgatcaaagtactgtcctgtttttcagacagaagtattgcccctagcttattgtttactaatctgcaaaatgtctttttgtcttgagttctcactgtcaaaatttgtatccaaacatgaggtgacagtgtttggaatattatgaactatctgccaaaactctgctcgttgcatgtataggaattaactctcgagttatctttcaaacatttgcatgtcaaaatttattgagcttctttatgtagcttttgatgtcagctgctgttgatatagtactggagtgtgtctggtgcgaatgtttcatagcttatgtcatatgcttaattgcgtacttgtataagcatacttgtataatcagttatttgatcaatggttgtctggaagcaagcagttctttgattagtgtaatcggagcaaatgatcttcccaaaggcttctgtttcaaatttcgaattgtgtcctattgatcagcctcccgttccttggctgccatccgcaatccgcaaccaaacgcagtaatgtaaataaatgacgttaccgcctgcaaccaaactaatcatgtaatcggataaattggtatccgttacggctggaggcaataccattagcgtttacgttaccacatccgaaccaaacaccacctaaagagtaaacaaaaatgttctctagaattatccttttaagaggcaaatattggcatgagtacaatattgtcagcgttattggctgacctgatcgctaattcgctgtgtggtcagccgcctggtctactgatctggtgctgcggcatctcgcagcgttcacactgcacaggtggagttctgcatcttccctccgatcgcatgtgccagcaattccatgagagtccatgcggcccaaaacatcctcaagtggttcatagcgtaatcatgcgacacgtagcaggcgtttctaattttaccatttccaaaatttttaaatcacatgtgctaatttttcaccaggttgtaccctgtcggatggtttggaaattctataaatactttatacatctgtattactagaaacacatcaccctatatatttaacacgtatttaaactcgtcatagagcttatactgtactctgaacggtcgacatgcatgccatcaccactgcgatcctttcgctttgcctatccttctcgcccactaccaccgctatgggtgtcaggcctatgacaacgtcatcaacaagtgttacatggatctcctcggcatatagatcacgtgtggtgtaattaaagacacatgaaaagagctaaagtcggacaaaatgataccaatcggaaatgctttaagaaatgaaaggaaaagatacggtaactagcaaatgtgatagatgtatcggcatggattgactgagtattcaactcttcaacggattctactatcatacatatgtctgtacgacaaacaacggatacctcgaccaaacaggatgacaatcgtgataaatgcatcggtgtggatcaagtgagtattcgaggccgtgtttagtttccctctattcccaactttccatcacatcatatcacatcaaaattttttctacacatataaacttttaacttttttttcaaactcctaacttttttcaaactttcaacttttttcaggaactaaacacacccgactctccaacatattctactgtcgtacatgcgcatgaacgatgaataacgaaacatatacgtacagcttttgtcggactcaaaaaattcgtactctcttcgtcaaattaaactaatctagtataagattggaacattatattaaaatatatttattttatatcagcttattttggaatggttgtattaattcaattcggataacatgacggaggactgttatcgtcgttggttgcatcaacaaggctcaacctaaaagcacaattatctgttgcagaaaatcctccaccttcgcatcctgtcctgttgagacctgaggtacccttgcagtggtgcatccccctttctttcccacttgaccaccttgtttgattaatcgcttaaaagctgcaggtgtactaatgaaagtagtactagtatacttaaccaattgaccatactcttcctagaatggcgaagagcaaatttaatagtaaagctcactgcttactataaatttagagttaacttatataataagttagttgtaaggttaactttattttttctataaggttaactttattttttccattctctctctttctcactccataaatttaatgcatattttttggaggttgtgtggagctaactcttgcatgagagccaatactacccacttttccttatctctcttccacataaagtatatagtttgcttatagcccattattatccttgctcttatgagggggggcgattagttaacgttaagcacgcttttacgagcgagaagacaggctgtcacgcttttaacagcaaacacatcacacattaatcaattcgcctccagcaccaagccaaccgaggctcttgggagttgggagttgggactccctgtgcctctcctctccaccgcaacgaccacaaatcaccatctgctttctagtttcttcctgaagttctgcgtcataaaggcaaaaatccaagattgattttggatgaaaaagactgcagtgcttagcaagtgttctgttcttggagtcgcaagctgcggctagctagcaagcaagcagctttttttttttcgcagatcttggtgaagagcctgttcttccatggctttcgctttgtgaggtaacatgtgttttttacattctggaatatgagtaggagtatatacttgaaacaataaggtaccatggcatgcttgtaaaatttctataccatagcaccgtcagatttttatggtaaaaaagaacagatttttatggtatttgttcagttctctttagtgagatccttgtgtttaatttgcagagaaaagggtattgttagtcagtaagtaaaagggtggatcttgttcgaagattcaagagtcatgttggattctggttcttatgatgatgttgactatggggatttgttctccatccccaatccacctgcgcctcacttgctcaatttccccctccagttcttcccttccaacggattcatcagttctgctgatgattcccatagatcaccagctggtatgtttggctcgaccccaagccccacatcaaccacaaccgagttggaaaattcagaggatctgtctgaatccgccgacgatgcggtcctagcatacatcaatcagtttcttcttgaagatgaggaagatgaatcttgtcctggcaccatcacatcggtggaggactctgccctcctcgccgtcgagaagccattcgttgacatcctcactgctagccaagaggcctgtcaagagaattcttggatagattcttgttgtgatttcacggggaatggaggattgcttgatacgttcacaaccacacatgccgcttgccagccagcgccttgtgaatttgagaaggagaagggggagtgtgctgttcataaaggccggaagaacccgcatgatgattgcctattgttcgaggaagagagcaggaggagcaagcagttggcagtgtctgaggaggagactgtcagagagatgtttgacaaggtgcttctgtgtaatggcgaatgcgagctccgggcaccactgccagctgaagcacggaactgcggggtgtacgtgaaaggatctggaaataagagaggccgaaagaaaggaaaatctggagcatctgcagaggatgatgcggttgatctcactaccctactcattcattgtgcccaggccgctgcaatcgatgatcaccggaactccaatgagttgctgaaacaaattaggcagcgttcttctgcatatggagatgccggtcagaggttagcacattgttttgctaatgcgttggaggctcggctagctggcactggcagcaacatttaccgttcacttgctgccaagcgaacttctgtttatgacatattgaatgcattcaagctgtatgttacagcatgcccgttcaagaaaatatcgaacttcttctcgatcgaagccatcttgaacgcatccaagggtatgacaaggttgcacattgttgactatggtatacagtatggattccagtggccaatcttcttccagcggatctcgaagagacctggtggccctccaagtgttcgaatcaccggtgttgacttaccacagccgggattccgccctgcacaactcattgaggcgacgggccgtcggttgcatgactatgcccgtatgttcaatgttccatttgaataccatgctattgctgccaagtgggacactatccgtgtcgaagatcttaagatagacaaagacaaggatgaacttcttgttgttaactgccttttccggatgagaaacatgatggacgaaatggtgacagatgacagcccaagaatgcaggttctgaagacaataagaaagatgaatccaaatttgttcatccatggcgttgtcaatggcacctacaatgcgcccttcttcgtgacacgattcaaggaggctttgttctactactcttcactttttgatatgcttgaaacaactgcttcacgggtcgacgaaaacaggctgctgatagaaagagatctcttcggccgggaagctcttaatgtggttgcttgtgagggcactgagagagtagaaagaccagagacgtacaagcaatggcaggtgaggaacatcagggcaggcttcaagcagctaccactgaaccaagagacggtgaagaaggcaagatacaaggtgaagaaatcctaccacagggatttcctagttgacgaagataacaaatggatgctgcaaggttggaaggggcgtatcatctttgctctttcagcatgggaaccaaactagcaaactgtaaatatgactaactcagctgatttcttctgtggaggtaccactccattagttatgtctgattcctatttcaatgaattttgacctatttctgggcaatagaagatattggattttgactgggctagagtatactttggatgagtatctgacagaaaaggatatacttctctctaagcgtgtgtgacctgtggggctcaaaactgtactttgaaaacacaattacacatcatgcatgtactgttcacatggtccagcctgggcaaagggttaaagcctacatggtgaattggtgatataaataacgaaatggtttatctgcaacttgatatgtagtagtacagcgtggatgtaaccaacttgcaactagttcaatgaaccaaaagaacagcacaatttatccacccaaaaacaaaagcccaacttgctcataatgtgctaatgtattgttcagtgcaatgcttctgaattcaagtggcgcctcaacatatttttcttctgtacaacatgagcacggagcgggcccagactgttttttcttctgacaattaatgtttgcattgagaaacataagcgtctcacactctcactgatcccaaatcgtcaaatttgatgagaggccctagagatccaaagaaagagcagtatattgatccattgcacgctgcctttccggtgttcatccacaagtccacaaccccccgcaccatcgctgcgttactggagcacgaatcatgcagcggagcggacaggagaaagctagctagccgcgcgcattgccggaaaacgcgcaacttgattttactttgggtggcagattagctgggagcatgtgtgtgtggagtaataggaatgcatgcacacttcaattcataggatttttttcatgaggtttgtgtggatgaaaattttcccttgttttctctccacaattagaaaggaaaatttattttggttttcttatatctaaattcctatgaaccgtatgatattcataagaattaatccctagaaatccaaatcctttaaaattcctccaaaacgattaggccctgattgttatctttgtatccaacttctgggccgaactatatctaggccctgcctcaggtggaggcctttctgcataaaaacgcttggatttgcaatacattcactaggctttgaatagctgatttccaacccagacaccaaagtactaatacactggtaaaaactttactataactatattttttatgccactgacctttgccatatcaataatgtattataaatattttatttcctactgattttttaacatgctaatttctgactctagagagcaaatgttaatgtttctttgttttccactcttttttacattatctggggatttgattagtgtggaaatgtggactagggtactggccgtatactgcttagccgtccgaaacattgggatatctgtgcccaataatctttaatcagtgatatcttctctagttagcaggctagcagttgtaactctcaattccatcgatactactttcatacctgggattgtcacaaagatatttcaagctgtcatttgtgacgtacatgcttgcattgattattattttttagtacgcaacgacaaatttgcttctgtttttacacctctctctttttttaaaccttagccagcttagctggttttatatttcataagataagcactgtacaaaatttacacctctctcaacaatatatttcaatgaaaacatcaacactgttacaaccataactgtcagtctgtcacattaccatctagaactaactctagatgaaaagcacaagctcttgcatgtttagttaagaacgatgcttgcaggacgtacggactctccctagtgattaggacacaagaaatgcccttagtagtgtagtctcccagacaacccagcggcatagtttcgcagcatatgccggctaaaactatacagaaattagaatgcatttgaactttagatatacagacacgacgacaccaatggttggacttttcatccaggctcgacagagatgttttgactcatgacaacgttagctatatgcaaggacgacgtacttacatatcgtatacacatgcataattaattgcgtatactctctgttgtcatgtgtgtgttggaaaaacggggaacagattctgaaaaatggctgtaacctcattggaatgaccatttggccaatcatatcttccgttctagaagcagaaaagaatgaaaggttgcaagcttggacatggaggcgaaggaaccgaggacaagagtccataggacaagatgcagacagctagcttggataatatatagagttgaggagcttaacgatttttacctgtttggttgtttgtattttacttgagattcactcagtttgtctcactgtcaaagagttcatgacagctcaaagtcctacttttatattagcatcacacattttactaacagacttgtagcttacttcagtttcctgtctgaaatttaagtactactagtactagccatataggagggaagagaaatggttgtcactgaatttggttagtgcataagaattctgtctttttgtttactctaaaattgaatccaacataaggtgcatttgagcatttggatagatgaatatactacaagtaaattcaatgcgacatatatttgtagcctctcaggtttgatacactgtaatagttggttttgcaattatgtgtcaatcctgctaaaacgaacttgcatagatggattcagagaatcagagatgccgctgcgtcctctatggtaccagtgtaatctgttagctactccttggaagtacttcacccagattccagatcgacttcattgatcccaaacttcaagttcaaggatgcatcacagaagccaatgcaacacaactgtgtcatatgctttttccttggcagatttttgctgattccatcagcagaatcaactcagctcccagcattcaccaggtgatagtgatgcaatccatgccagtttgcagcatacagctattctgtgtttcacacttgcaaacatgagcaaaagcacacaactcggtgagactaccaatgctagccccctcctcattttgtctcgccgaacccggctcaagcgtagcacaagatttgtataaatactcggcgaagaaattgcacgcagttctcgtcagtgttcgcgccaaaacttggttaaaaaaaggcacacgggagctgaccgacagaccggaaaatggcgccaacaagtagcactgaggaggtgaagcacctgacgcttcaccacttgttgaagcggcagcaccggctcaagcccgccgccgtggtgtggagatggccgacgtcggtggtgcccggcggcggcgccgggcggccgccggtgcccgacgagcagctggcggcggacgacgtggacggcctgggcgggacgtggccgccgcggtcctacacgtgcgcgttctgccgccgcgagttccggtccgcgcaggcgctgggcgggcacatgaacgtgcaccgccgcgaccgcgccaagatgcgcggccacgggctccacggcgccgccgggcagcagctcggcgcggcggaggcgcctgccgccgccgccgccgcgaggacggagtacgccgtggcgctgtaccccatcctgaactccggcgcgggcggcgcggcggtgcgcataccgcacggagacgtgctgctctccgcgcccgtcgcgctggcggccgcgcgccgtggccatgatcaccggtgcatcgatgtaggtgacgacgagaacgacaagaagattgacctggagctgcgccttgggtggccgtgatcgatataccatggacatggagacatttttttacagtcgccatgatgtgtgaatttctttccccaccattttgatcatttttcaaataactcgagtgaaactcatggtttgctactgcatactccctccgtctcataatataaggaattttgatattttgcttacattttttgaccactcatcttattcaaaaaaaaatttatgtaaatataaaaaacgaaaagttgtgcttaaagtactttggataataaagtaagtcaaaaaaataaataataattccaaatctatttattattaaaatagctttgaaaggaggcaccacgttgattgtggaggctagaaattcccacattaatcagagaaaaagaaaaaaagaaaaaaaaagtccaagtagaaatacaatctaaaaatagctaaaattcagaattaaacataagcaatattgaaagaaattttcatataagaacccaatacgagattaataaaaaatcgaaataaaaataaaataaaatccaaaattagaaaagaaaaggatagtccaagtagaaatacaattttaaaatagctaaaattcggaattaaaaataagaaatattaaaataagagtccatataaaaacccaatacaagattaattaaaattgggaataaaaataaaaataaaatctgaaattagcaaaaaaagagagttcaactaggaatacaatttaaaattagctgaaattcggaattaaaaataagcaatattgaaagaataatctatataagaacccaatacgagattaattaaaattcagaataaaaaaataaaataatatccaaaattaaaaaattaaaagagagttcaagtaggagtacaatttcgaaacaactgaaattgaaaataaaaaataaaaaaattaaaagaacacaatacgatattaattaaaatttaaaaaaaaatctgaaattagaaaaagaaaaataagatttcaattaggaatacaatttataaatatctaaaatttgtgataaaaataaagactattgaaagaaaataccatataaaacacatgacgagataaattaagtaacaggcctataaaggagtaaagtggtgacatataaaaactgttaataaaacacctaatagaatcctaatgacgattaaaatgagggacgacaggcaggccgtgaagcaaacgagcgaggcggttgccgggacttctagaaagtaaaaagaataaaccccattgataatcatattcgatttttaaatatctctatgacaataaaaaggagaagcagcaggcggggtgtataggagtatagttgcagagccgctgacggttgacgggacttctagaaaataaaaaaagaattccaacgatagttatgtacgatttttagaatcacaatgacaataaagagtaggcggcggacaggccgtagaggagcatagtggcatcatttgacgagacaataaactctaaaaactagaatgtccaatttttaaaggttcggaacttctaaaaagtaaaaaaaacaatgataattatgttcgattttaaaatctcaatgacaataaagaagagaggcagcgggcgagccgtagagaagtacaatggtaaagccgctgatggtttggcgggatttctagaaagtaaaaatgaacccaaacgataattatgttcgatttttaaaatctcaatggcaataaagagaagagacagtggaggggccatagaggagtataatggtaatgtttgacgggacatctagaaattataaaaacgaaacccaacgtgacaataaactctaaaaattataaggtccaatttttaaagattctaaggagaatgaaaagaaatagtggtagatcgagcaagcaaataaaaatggagatgacataaggggtagcaactggtgtgacttaaaaaaatatataattagaaacaaggggatgataaggtttggtctttcaaagtcttaagacaatgaaatagctatttaataaattttaagtaaaatcataaaaaaatatgattttgtttcggtgctaactgcgtaattgtacgggccacccagctagttttttttaataagacgaatggtcaaacagtgtaagttcaatgtcaaaatcccttatattaggacggagggagtgcattagtaacggtgagacaaaatgaaatttatttccattattaacaaagaacagtgagaaaaaaatggtgaggcaagaagagcgaagaagaaagggacaaatatgtaggcctaagcatcgcgagtgatgtgcttctccccatgatttccgacagtttcgaggcggcgccaaggcccaaggattcctatctgaggattgccggtgaaatatcagtagcatacatgatacatataccatacattttactcctatcatataataagaaaaaaaaaaggaataagttcacttgaacttcaaccgcaaaaccggataggatgcctatccgaactattaaaaccggtgtaatttcattccctcgacggttttggaggatggtttcgctgacgtgatgcatacgtggcggtattgacctggtctttcttccacgtgacgttgacgtggcacttatatgacattaaaattttaaaaatatgtagctccagaagagagcgcagcagaagtacagcgccaagcagtgacatgaagcagcactgccacgacgagcatgtgcgcgtggtcgtgcggccgcggtgcgccgtccttgcagtacaccttgtggatctcctcgcggtcgtcgccggtgtcggggcgccaccggcggagcagcacgaggtggtggaagatcttggcgtgctggtgcaggcacatgatggtgaagagcgtgttgaggttctggaccatctggtcgatcacctccgtccacttcttccgctgctcgtcgtcgggatggtggagtcgagcatgccggtcatgagcatgaacagcagcagcagcccggcggcgacgaacaccaaccaaatgatcatggcaaagttcttgggcttcctgcaccagctcactggaggcgccgacgacggctcctccatggttgacatgcttttgcgtacatggtgcgatgcagatggcggtgacggcggcgttgaacggcgtcgggctagcactgcaaatcccggcgatatgctccttcaacgccgactgcgaatcctggcaactacgcggcggcggtgctggcagcgtcgacgaccaccaccgccaagccggtgcggcaagagctacaggagttcgcaagggaggcgaagggactcacgggctcattccccaggtcggcgctctccttcacggcgatgtggctagagctcgttcgctgccgtcctactcctcgcactccctagtggcctagtgacccacccaccgccgccaagcacggcgccgcgctgctcatggcgtcgtggaacccatcgtcgacgaacggtggtcggcgtcctcgccgagcgcctgnncggcnncnancnnnntncnnnnnnnggggggggggggggggcgccgccgtcgaggcggagcggtgcaacgcggcgtccctcgcaagggcgctgtatcgccgtccccatggtgctgtccggtactgagagaagggaggaagaggggaggaagaagaagagagaggatgatatgttgggcccacatgtcagtgggccccaccttttttatgtgtgtgaatgacaaacggatcccacatatacgtttttaattcaaatgacatctaagcgtcatgtcaacccacag

SEQ ID NO: 8643 - DNA, 64653 bp, Oryza sativa
aatctcaaaaggtggagcagagataaaattggaaatataaagaagagcattgaaagatgcagaagagagctagaagaaatgagaatgagaggaagggaagactcagaaccggatgttcacaggctgaaaatttttttgcaggaactgctccatcgcgaagagatttggtggaagcagagatcccggatcacctggctgaaagaaggcgatcggaatactcgctactttcatttgaaagcgtcttggagagcacggaaaaacctgattaagaagctgagaagatcagatggtatgatgtgcagtaaagaagaggagttaggagagatcgcacgcagcttcttccgagatctgtacacgaaggatgaaagccttaatccaggtgagctgttgaatatgtttgaaccaaaaataacagatgaaatgaatggcatgttgacaaagccttttacggatgaagagattagtgacgccttattccagattggtcctctcaaagcaccgggtcccgatggttttccggcacgcttctttcaacgcaattggggtgtcctaaagagggacgtgattgaaggtgtccgagagttttttgaaactggagaatggaaggaaggaatgaatgatactgttattgtcatgattccaaaaacgaatgcaccggtggagatgaaggatttcagaccagtcagcctttgtaatgtgatttacaaagtggtggctaaatgcttagtcaatcggcttaggcctttgttgcaagagattatatcggagacccagagtgcctttgtgcccgggcgtatgattacagacaatgcattagtagcctttgagtgctttcattccatacataagtgtacacgagaaagccaagacttctgtgcgttaaagctggatctttcaaaagcttacgacagagtcgactggggattcttggatggagcattgcaaaagttggggtttggaaatatctggagaaagtggataatgtcatgtgtgacgtctgtaaggtatagtgttcgactgaatgggaatatgcttgaaccgttttacccaacaagaggtttgcgggaaggagacccactcaatccatacctatttctttttattgctgacggcctatcaaatattctgcaaagaaggagggatgaaagacagattcagcctctaaaggtctgtcgctctgctcctggtgtgtcgcacctgttatttgcggatgacagtttgttattttttaaggctgaagtgatccaagcgacgagaattaaagaggcactggatttatatgagcggtgtacagggcaactcattaatccaaaagaatgttcgttattgtttagtgctctctgcccgcaggagagacaagatggaatcaaagctgtattgcaagttgaaagaacatgctttgatgataagtgtctgggactcccaaccccagatggaagaatgaaggctgagcaattccaaccaattaaagagaggtttgagaagaggcttacagattggagtgagagattcctttctttagctgggaaggaagctttgattaaaagtgttgctcaagccttgccgacttatacaatgggagtgttcaagatgccagagcggttttgcgaagaatatgaacaactcgtccggaatttctggtgggggcatgaaaaaggggagaagaaggttcattggattgcctgggagaaacttacaagcccaaaacttttgggtggactgggctttcgggatatccgatgttttaatcaggctctccttgctcggcaagcgtggagattaatcgaatcgcctgatagcttatgcgcacgagttctgaaggcaaagtactatccaaatgggacaataactgatacagcgttcccgtcagtttcatcgccgacatggaaaggaattgtgcatgggctagagttgctaaagaaggggctgatatggaggataggagatggaagtaagacaaagatatggaggaaccactgggttgcacatggggaaaatctaaagattttggagaagaaaacctggaataggcttatatatgtccgggagttaatcgtcaccgacactaaaacatggaatgagcccttaatcagacacattataagagaggaggatgcggacgaaattctgaaaattcgaataccacaacgggaggaagaggatttcccagcgtggcattatgagaaaactggcatattttcagtaagaagtgtttatagattggcttggaaccttgctaggaaaacatcagagcaagcttcttcaagctcggggggagcagatggaagaaaaatctgggataatgtgtggaaagcgaatgttcagccaaaagtgagggtttttgcctggaaattagctcaggacagattggccacttgggagaataaaaaaaagaggaagattgagatgtttggaacctgcccaatttgcggacagaaggaggagacggggttccatgcaacagtggagtgtacgctggccaaagcgttgcgagcttcattgagagaacattggacactgccagatgaaagcttgttttcaatgacaggaccagattggcttctagttctgctagacagactaagcagtgaaaagaaggcccaggttttatacttgttgtggagagcctagtatattaggaatgaggtggttcatggtaaaggtaatgtccctattacagattcggtgcgttttttgattaattatgataacctacagttgcccgcccgaaaacacatggaagacatcaaggggaaaggacctatgtttcaggatccatgtcagaaagagcagacatgtcagttgaatgcagagaaagaaaagtggagttgcccgcctgatggaagtgcaaagctcaatgtggacgcagcttatagaactgaaacaggcgaagcaagcgctgggattatcatcagagattgcaggggctagtactcctggctgcatataaaactttgcatcagtgtacctcagcggctgaagcagaagtgctagcatgtttagaagggctcaaagaagcaatgaagtggattcatatgccgattattctggagctagacaatgctgatgttgttaaggctctaacacagcaggtagcttcaagatcctcctgggcgacgacggttgcagaaatcaaaggtgtgatacaatgtatccaacgggtgcaagtgcacaagattaagagagaagctaatagggttgctcatgtgttagcacaaatggcaatgagtactaggtcgtgtggggagtagaggctgtgcgccgcccccgcataatcctagacttgttaaatcaagaatgtaaccctctatttagtcattaataaagttctctcttgacttaaaaaaaataatctaaacgaaaatagatagatttgtagaaaaaacaacaattttcatcacgaaaaaggttcaaatacagtacagtagtaagtttcctattctcgtcctgacgccgcggcgagccaggaggcagcgagttattttactcgatatctcgcgttttctcgtcactcagatctgatctgatctgacccctcacagtgaggtaacccctctcgcctcgccacctccccccctgttttctccatttctcctcccaatttttttctccgcatccgcagaaattctgtcccctcctcctcctcctccatttccgatgtattttattcgatttcgagatttgttttccggtgcatagagctcacgtacaaccgccgcgccgaacggtgcatgtgaactgttcggcgaaacgcgcaggtgaggagaggtcgcgaggagcggctgctgcggcggcggcggcggcttcgattcaggtgggggtgggtgccctagggtttcgctgccgggatggatggccgggagcagcagcagcagccgcgcgtgagctcgccgccgccggccggcggcggcgtgatgatgcctcagcacccctacggcgccgcgccggcgatgccgccggggtcggcgaatgttatgcacggggtgccgctctcgttcaaccccatggcgtcgccgaccgcctcgtcgcctatgaagcccgcggatatgtcggggaccatgtaccgcaccgatcccgtcgtgcagggcatgcagcagcagcccggttccggcggtggcggcacggcggtcggcggaggggagctcgtgaagaagaagagggggaggccgaggaagtatggtcctgacgggaacatcgggttgggactgaagcccgcggctgcagcagggacggaggccggcggaccttcaggtggtgcaggatcgaactcgaaccctgacgggaagcgcagagggcgacccccaggatccgggaaaaaaaaacagctagatgctttgggtaagcctgcatcatttctctgctttgggtttatatctgaactctgaaatgatatggcttaatatgactgaaaagtgcaatgttgcttggcctgtagctttggaaaaatatggtccaagcttgtggcgggtatggagtgtgattgttggaaatggaattaattcatgtgtttgcttgtgtgcattaaaaagggcatgtgtggaataatttttttaaggatccctcatcattctgaaggaataaaaatatggcagaatagtgcaggcagagatttgaataataaagaaaagtacaagcactctttatcctttcctggtgttgcactgggcacagtctaaacaggaaaagtaggaattattcaaatatgagcttagtctttgaatattgaacattcattggtgattggtttcttttatatatgttactttctattaagagccaatctatgtgcatatactgacaaatggacaatattttgctgatgtcctttttgcatgttttgaattacaataacttctacacttgcccctgcagaacagggcagtgtcaactcggtttacatattagtagtagtttgttctgttccatagtccttacccatgtggcacggtcagaatgataatgataatgccatttgtcagatttcgtagtttttttttgggtctcttttaacctcaactgaacttgaccactttgtgtggatcaataattatatgccagatctgatatatatgttcttttatgtgctgattttcaggatcttccgggacatcttttactccccacataataacagtgaagcctaatgaggtacctgaaaatgctcccctctctgctatctagtacgagctgaaattcattatttgtctgcttatgttgtcttgttgtgacaaagttacttttggagaacttaagtttttgatttcttgcttgtggtttgtaaattgtaataagtctttgtgccttacatattacatctgtctgctggtgggatctcaagtaatacaaccaaatacataagtgagagctaagaagagagatgtgtagcataagcttcctataataaataccaaactaacatataatgtattcttcagcatctttaaacttgttccctttttgagtttatttgagttgtcaatgccatttacagaatactccgtataaacctttcatttgtttctgaattagtaattttacaattcaggagattgcatatatttatgtcattatttgttgacttgattctgtcttggccaatgagtgtccttcctggctttgatcatcatacacttgccacttggttgtttttttagcgccaatctactacggattggacaccttttagcctattctcctcttctatgtttctacctgaagtccaagctgatgagcatgcatgcatcacctcttctttttggcaggatgttgcttcaaaaataatggcattttcacaacaaggccctcgcactacatgcataatttcagcaaatggcgctctttgcacagcaacactacgtcaaccagcaacttctggtggtatagtaacatatgaggtatattcaagctaaactatctgtgtgcagtgtgcttactgctcagagcaatgcttgagctccactggtgttctttctgtgaaatagtaatgaatatgcttaattaaagttttctcgatgtctttgtttcattacagtgcagtacaaaataggtggctagatttttcttagtagtatatgtgctactgtacagtggtggatccaatgcctcttgacaccgatgagttgcccaggcttgccatcgagccacagtagagcagtgctctgcagtctgcacttcctgtgttcggcaacaccagttgctacgtttgcctgaactacaagaaactccagtgtctgtcttgcactaacaaaccagatatatacatcacaattgccagcaacccctttttgaactttgtatgctttggtaggatgcactcagttgtccagctttctggctatgataacttattttctgatgtattccaatgataagaggagaaatgactagtatagtagtatgtttagaatgttatcacaaattgggggtgggggatagaatgaaaattttattcttctttgttctcaacagtcacaccaggtgcaagtaacataatatctaaatctgatgataaaggcttctggtcattttcatttacagcatgtggttgttagtggccatttctatgtggacagacaaattcgaacaatattcagttgctttgtttataatataattgtatttttttattgtagaaatcaatatatgaatatgaattcttactgtgatgtttcacagggccactttgatattctctctctgtcgggctcatttctgctcgcagaggatggcgacactcgtagcagaacaggtggtttgagtgtggcacttgctggaagcgatggacgtatagttggaggttgtgttgctggaatgctgatggcagcaacgcccgtgcaggttccccattcatctatttgctgctatcactttgttttcagctggtttgtgccctaaactagcattttctttggccttctgttacattctgttttccaggttgtagtggggagtttcattgctgaaggtaaaaaaggcaaggaagaacatctgaaacgtgagccaacatctgccccgacgccgaaccacgcagctggctttggcgcagccacggctgccagtcctccgtctgatggatcatcaagcgaccactccgatgacccagggagtcccatgggacctaatggcagcacattcaataattcaggtcatcccatgcattcttcgtatgctcctgttagctggtcgctatctgggaatcaaggccgttacgatcccgacctgaagatgatgaccgactagataatcctgtgtttttaagctctgttagctgttgacccagtagagtgtagggatcagggattcagtgtttcctgcaccgacaccaccggcagcgttggccaataatccggtgcgctagtagtaatcagtatcacaatgcctgaacaaaagagatcaggaacaaataagtagccccagcgcatggcttggcctgtcaggtagctaatttttatttttctcaatcggtagcttatttagcatgctttgtcagttgtcagcctagttgtacggttttcttatgaatgtttgtacacctttttcttttctcgctagtattcggcgtgtacgaatcttaattaagattggaatgacatgttattggatattgtcgtttttcttcgctgtgtttcaccctgcaaaaccattccactactgatgcgttttggtgtagggatcacatagacatgaattctgatcgcattcatacatggtaccagtaatggtgtgtataagtctatggcaaagtgccaaaatctatcgagaatccgcaaggaaataacttgtaaggacagtaagaaaataattcttgtgggataggaacactagagaagaattaataattgtgtttaaagacaaggtatttgccgtcagctcggcctacagcttccaaaatggtggcagcaggtgcgtctctgttttcggtcaaaggcacagagccgccttcgattctctgtgtatgttgatctgctggaagctttggaaagaaagaaacgtaaggatttcgattctatgttcatgttgatctgctggaagctgtaaggatttcgattctctgttcatgttgatctgctggaagctttggaaaggaagaaacgtaaagatttttataacagaaagggtggtagaacacttggtggcagacatcaggaggtcctctgatctgaagagtggccggaattttttctttcgaggagtagcagcatgtttttggcctccttaaatagttttcctgttctttttcgaggtttcccctcgactctgtaatatcatgtatattgtattaccctctttttttatgtatattgtattaccctctttttatcttaaagaaatttggtttacgttctttttcgaggtttcccctcgactcgacagtgtaatatcatgtatattatattaccctctttttatcttaaagaaatttggttgacgtccttccgccgacccggcaaaaaagttttctttttaggctatggaaatgatatatttgccgaacaagttttctttttaggctatggaaatgatatatcagtatttcgttctaaaaaggtgaaacaatagggatactaagttctaaaaatattttacatgaggcagaggcatgttggatcaatttgatttaagagaggcacgtggataacatattctcttacctttattggattggcaaaactaaggatgtcaatatcttgtactccctcggtttcatatttgactcttaaaactcctttatgtttttttgtttgatcaaatttataaaaaaaatagcaacatatatgataccaaaataatttaattaaatatatcattaaatatattttaatagaatattcattttgtgttaaaaatatcattatatttatctctgaattctatcaaacttcaaaaaaatggggaaaaaatcaaaacgactagggagcacagcatacactgacacggctacatgattacattcatcgatataagtagatccgtagatgcgtacttcaaaaacacatgaaaacgaaagccctttcattgaacagaactacatcaagcatgttaattttacatctgacactttttattccagcacacgcatgtgcacacagcatacacgcgtgcgtacgaacacaagctaacacgatcagcggccgggctgggaccagatcactcgctacactgaaaaaaaacacactagcgatccagatcgatcaagcccgcccatgtccatctaccccaaatctagatgtacgatttgtcggacgccgcgtacgtgccggtgccggtgccggtgccggcggccgggtatgcagggtcgacggcggggccgccgaccggagcgtggtggtggcggttgccgccggccgtaagcggcacgcgcgtgccgtggcggcccgtggtggcgttggcgcggtgctccgccctctcctggtgctcgtcggccttggcctgtgccttgccggccttctcctcctgcttggccatctccttctcgccgtgcgtggccgccgtcgcctggccggccttgccgtgcgccttggccgtcccctccttcaccttctccttggcaccgctcaccatgtcctgcaccttcaccttcgccgtctgcatcttttcttttcttttgctcctacagtacagtagctacgtgcgttgcgtatcagtgtgagcctgtggattgagattcgttgcttgcgttttgtgcttcgacttgcgacgtgttttggacgattgggttgattggagtagagtatatataggccatcgacgatgatgggatggatcatggatgagatcgagcggcggcgttgggtgttcgtgctaggtggcgcgcatgcgggggatgcgggaggaggggatctgcacgtcacggcatgaggtggcgcggagcttttgggcctcggtgggcgcgtggctgcgtggcgcaccgtcgagccgccatgtgcctagatgccggccgtacgtcgtccgtgctcgtgacctgacgggcatcgcattcccatggccaggtacgcaacgcatctactccctccgtctaaaaaaaaccttaacctaagcaaatatgtaacatgtctccccgcaaaaaaaaaaatgtaacatgtcgtagtacaatgaatctggataactctttattcagattcgttgtactagaaaatatcacatttccttttaaatttatttttttttctgaaacggaaggtgtggagggagtatgtgttcagcttttattttttcccttcctcttaatgacacgttggagtctcccggcctattatcgctagactcaaatggccggccctgcagcccatataaggattttgtagtgaaaggagtacatgcacatgggcctgatctagaatgttgaccggatcgattaacgatgcgtccggcctgtactttgatcatctcaaggacagtaccatcacattttcaagttcaactctcttttgttctcgagagaagttcagttgtctccaatgaaagtcaacgctttgctcctctctgaaggtttcgatacagaattttttgtttgaaaaggaggattttctgtattgattccaagtcaatggtactagttttgctcaactaaacaaaagtacaaaacacacgtacatgtcgaattcaaacatgttgctagtggatgaaaaacgccccagcttttacacagttcccgttcttttttccaaaacaaaaagttagacgaagattaagatttttgtagcacgcttttcaaactgtttaaataaacagtacgtttcgtgtaaaaactttctatatgaaagttgctctaaaatatcatattaatatacttttttaagtttgtaataattaaaactcaatcaatcatacgttaataccacattgttttgcgtaaaaagcttaatcttaatcttaatcttcatctttagaaaaaaaacaccacctagattttttttcctatctcctaatgcacttgaattgtttaatttcaaatttctatgaaaatcacgcagaattcatgcgattttagacagcccacacacaaacacagatgcatataccatgctgaatgtcctgctttaatctcctgtattcctacaaaacaatacacatccaatttctcttaatttacaatttacaaatcactttactgatcactctgaaagatgatcagttgagagatttgaggtagtccttgaggtccgtggggaagcaagggtactgcctccagaacgcgccgtgcgctcgcagcatcttcaccgccttgtccttggtcgacggcgagctctccacttgcatcagcgccagcagcttcgccacggcgccgcccaccaccatgtcctccagcaccctctcggcgggggccggggcgcacgccaccagccacagcacgttgacggcgagcctcgtggcgagcccggacacccggagcacggcgcgcgccacggcggccaccgccagcccgtgctcggcgaaggccagccgcccctcggggcacttgcacatgcgcttcaggaggaggagcgaccgctcggcgacgtggcggtcggcgtcgaggaggagctcggcgaggacgcgcacggcgcccagctccacggccttggcgcgccgcgcgccgcgggagtaccgcgccgtgacgtcgaggagcacgtcgagcgcgcgggagctcagcttcgcggaggcgccgtcggagaggagctcgaggagggccttgaccatgtcgtcgacgtcgacctccgcggtccagtcgcggacgctggccctggagatcttggagatcatggacattgcgtgcagcctcgcctcggcgctgccgcgctggaccagcacggacacgggccttatgcactccggcttgagcaggagctccaccgacgcgtcgtccgagagcggcagcgtggcgaggacggcggcggcctcctcgcacgtccggaacgccgagaagtcccccccggcggagctctcctccagcgcctgcgtcatgacccggccgagcacctggatgccgccgcacgccacgaaatcctcccgcgccgcctcgtcgccggccatgcaggacttgaggttcttgagcgcggtcgccttgaacggcgtctcctcaatgccagcgagcaccgacggcaacctctccctctccatcgcgtttgacgacgacgacgacgacgtcgtcgccggcgagccggccgtgctcggcgacgacgacgaggaggcgcggtccagccacgacgagatgacgcgcttgagggtgtggttgggagtgaagtcgaaggaagcaagccgctgcatggtggccgggcacgtcgtcttgccgtacttgaagaaccaccgctcgatgctccggcggtcgtaggtgacgccggtggccaccgtgacggggtcctccattagctccatcgagatggggcacaggaacaggggaggaggctccattgccattgcgatcaaacaaagcagcagctcgatttcttggcttgagtgagaaggttgagggagaccaagctgggatgttggttttatacctgtaatgtcatcatatgcaattaaaaagtcaagctaacccaaagtacagccgcaaaatggctcaaattcaaataactaatgaaatactcccttgtcgaaatataggtatattttgtttcgttaggataaagctttgactaacaattgttatactaatatactagctctatattacattgtaatagatgacgccgttaacttttgggtacacgtttgaccattcgtctagttttttaaaaaaattatgtaattattatttattttattgtgagttttcttatcactaaaaatatctcatatatttacatacaatttttgaataagacaaacggtcaagcatgtatctacaaacaacaacgccatctacaccaccacaccacatttcattatatataagaaaaagtttttgatatgaatctaacaatatcaaccaaaaacatatgttctaatagactaattgttggtgctagaaaatctttgagaaaaatgaagaatctcagacaatttagtgctagaaaattgtaatacctgatgctcgaaaatctcagagcaaaatgaaaaaaaggtaaatcatgatgcacgagaaaaatgaagatgccatccgtctccttttcatctcaatagcaggttaaatatatgaaaaaaaaatgttttcttaataacgatacgaagatatgagaaactatcaaaccaagtcaacaattcttccaaattaaaatcccgtaggggaaatgcttaaaaagtacagcttgcagcattagtacattatctgttatgatttctaacgatctgtattgatgtaaaatactctagtcaagagtcagacgggcagaatagtaagcgatcgatcgatggctacacattaaagtgccactgtgcaatgcatgcaaaataaataatactaagtctatggattggccgtgatctgtattactcaagacttcgtctcttacctagagcttatgttctatggatcaatttattcgagattttgacgaagaactagagactttttttattccttttgttttgctgcgtgcagggagcaattcgatgggcgtcgactggagcaatctgatgggcgatgatgaggtgacagtttcacaagtattaacctaagacttggtgtgatgctacttgtcagaaacgtaatgaagagaacacacttgcttgcttattcctttctgttttcttcttcttcttcttcttcttctttttttgtggagacagaagaagtttaatttttcaaaacggcaaatgcatctttggagttgttaaatggagattggggaggagctggcagaggatgacggtggatcttgaattgttaatctgtccggttctatttcttcttctgtttgttcacttgcatgttctttttcctctgtctgtattaattagttgcgagcggttgagcgtttcatttgaccgtgattgggtcatccatccatccagccgcattctcatattttctttggatgaaattatattatagagataagaaatttgcctgtaatgtcatttagttagaagtttcacacctctcaacatcatattactgacggcggatgattaattaatggtaaaaaaaacaaggtggattgcctcttgtaatcttgtatctatacaccatcttctgtacccaattatattttacctatacaagggcttttagcttgttaatgctgacttccctcccatgtataatgtatttttcagaaatgaaagatcatgtgtgccagattacttgggagtcaaaattatggtttctcttaatgtggtttaggtgatagtttggcatcattacgacatctttctttgtcatgcaccgtctgccaactcctgaaactaaaatggaacagaaaacgagtacaagtgcagttccaactaaatcactgtctgacaaacgagtactgtcttcagttcatcatatctgagctatgaagatctatttcatcacagagaatctgtttctgctccaattaattagcaagtagttttaacaaaaataattaataagtatcttgtggttgtcatgccttaatctgccagcaaaacattttctatatgattaaaatggctatatcaaccgtactgtagtgggaacatggatgatggatcactttgttgctttattttttatatatagtattttgctaacgcaagccaaaaaaaaaaaaaaatggttggccttaagctgtccattagtgcaccgccagttagcggaagatgcaattttcaaaacaaaaataaaaaacttgcacgaaattatgtttacgaatacttgcatatatatatataagcacccactagttaatacccacttgctagttgctacactgacgttccacacgtcctaagatcctatcgtttgctcttgccatcgccatacgactttaagagtttttatttttaagtcttgtactttgacaaaattaggcatatcgtcgaacaaacgctccctgttcgatttgactgtggcgaaatattcttttgaacagacgttgcaatcggcgcagctgctgatgatcatccataaattgataaattcgttgactaatcgatctgaaaacaaaggagcgtcctgacaagaactgtcaccggctggtggggttacaatatttttcagaatttggaactgctcagagttgaattactagtggtaataccgacacgttactcttactaggttcttatcctttctttgtccaacagtaattaactttaaattctgttcctgtgaacagaagcaataataattccactgcggtgacaaaactacattgacaattggcacagagatcttacctgttcgaacttcgagtttcttctcgggaagacttcagatttcttaatttcggttaagcacacagcgtttgacattaatcagttgcttgtttttgcatccatttcagcaggctaacgttttccaaacgtatgactgcagattgtagaaaaaatgatggtcggatgattcataacgttcaccgaattaacaatcgtgcttccacttggagcagctacctgtacctgcatgattcctttcaaacattgttgtttattcctacattgcatcttgctagtgggaattgatcctgacagtttagctttgaccatcacatcaactgttgtttcagcaaattttgtacctgatatctctttccagggaaagacaatcagattgtaaacttcagctctgtttcagacggcccaaatatatattttttcctgtcattgccacaaatggtaacattacaaagtcgttttcactattcatccgtatataatactctatcgcatgcgtgtacatcgaagtcagaagtaacaaaagaaaaggaaaaaacatgaaaatgatggtctattccaagtgttccacggcattgccgacaccgaattggggatcactcaatcctctgatggtacacattaaggacatagctgttcagaaggtcaccaaatgtcttggttgagaacttctgcacaacatggccccttgcttgtttacccatcttaactgctagatcgtgatcgttcacgagcttcagcatggcttttgaaaattcaggggcagagggctcacagagaaaccctgtctcgtcatttatgactgtttccactggaccaccactgttgcatgcaattacaggtttatatgcggccatggcttccagaggaacaataccgaaatgttcatcctgcaaaatgtcagacgcaggtttattatgggaaaattctcatgttgttgagaatcaaaagacatgccagatatttacctttggagtgtataacacacaaaggcagttggagagaagttcgttcctttcagaagttgaacaagatgtcacaaatttgacatgttcagaaaccccttcactcgctgccaatcttttgagctcctcaaggtattcaacattttctctgagacgcttatcatatccaccttaagcataatcttttgtaagtaaacagtagttgccagttggtaattcataatgcagtgacgatgcaacattcaacctgtagtggaaaggaaattacctgctactgttaaggttacttcctgtcgagcatcaccaggtagcatagaagcaacagagcgaagcagagaaaatgctgaaatggcaagaccaagattcttttttctctcaaaccggttaattgagaggaaattcaacctgcgcagaaagatgatggttaaatttggctagacctgaaggtgcagaaggtgagaaaaatgcttacacttcacactatactatttttttttaaataaaatgaaacctaagcgagttacagagagatatacaagcatgcagttacttataagcatgaggttcctgaaactgttcaacagagacagctggatatagaacagcaggctcgactcctctagcatgaaggctgcaaaaggtcctggcaaatgttgttgcagtgaacttgctgtttactagaatcaaatctgccatacctaatacatacaaaaaagggataagcactacagatagaacaaacactagggaatggtaaaaaacatagcaggcaacagttctagatgaacaagaccataccagtagttgtttcttcaatcatgtcaattggcttgcgatacaacctccgaagcatggtagtatgttgagcaagcaacatatcaggaaagtgacaataaaatactatctgaatacacgggaaaaagaagttatcaacatatatctacagtggaaacatactgatcacataaagcaagggatcaataccttggattttgccttcagtttaagcagtggaatcacaaccgaaacctggtctactaatatgatgtcaaatgagggccaccaaagtagcacacacattgcaacaaaaatgcagcgaagatatgcacagatagcgtggaagcggtaaaaaatatggcgaggcaagaaatctccatatactttaacttcaaatggacctgcaggacaatagaaaatcaagtaaagtttccattggcataagaatccctacacactattgagcgatttgagtagggtatccgaggaaacgttttgtgaaattttgtacgtaatcaatcgacaattcacataggaatatatgcatatcctctacaagtccacatcaaatcagtcatagtacatagtaagtctttaacacaaataggtactgcaactaccatagtaagagagttataagcaacattcacctcagatagagtttagatccttaccagaaacagtctcttcaaagcatcggtttttgtcatgatgtgatgtgaaaacatgaacatcatgaccatggaccgcaagctgacaagccgcatcgactatcaatctctcagcaccacctacacaaaaacatatgttttctttgaacaattgagatctagtacaatgctagaaatgctgccacacttagtccattggtcaatgtcctataacctgctgcaatactgctacaacattttttttctcgaaaatgttcttaaaaatctcacctgcatataataaacaagccgcaagtcctacattcaaatgaaaccgtgcaacggcttccccaaaaaataagccaattctagggcatcactactcactacttaactagaagtatcaacacagtatggaagtgaagaagaagaaaaatctttccctaacactcagactaccccgtaattgcagcaagcaactaagcatacgtcgaaccttgagcaaaattgaggaacccaacaaatatcccagctacaagctcaggcagcaacggttcctcaaatctactgatgcttccaccgcgtggactcggaattgctacatatcgaccaatttacaaagtagcacgcaaccaatcgtttcggggactcaaccggatctaccaaaattctgcccacgagagatgagggttcacccaagcatcgacaggagcaacaggaggggggagagagagtagaggcgtacctatcccgagatcggggtggatcacggcgaccttaagctgcttcgtcctcgtccccgacggctcgccggcgactcctcccgccgccgctgccatctccctcgcgtaaccagatgggcttcggccgccgccgccgccgccgccgctgcgggccgtggatctctgctcgctaactcgctctcgctagtcgtgtcgtcacgattccagctgagttgatgtgcgggtggattgggcctcatacagcccagtatctgataacgcgtgcgaatcgcttacggcccagtagcccatatcaatttgatggcatcgagccgtcgagtactcgagttcgagtgctcgcagaatgcagatttccatagcatattatttcggggatggctaattagcgcgtacgtgccctttacctaagtcgcgcgcgcgtagagaagcggtgggcccacttgttttcggcatcacgtacgaagaaaagccaaactcccgttcgtgtttctctctttttttttccggaaaaaaaatcgtcacgggagtgcttaattctcttaaacacttttaacttagatttgaatcttttcaactttgattcgaaaactttcaactctatatttgaaagtttaaatttatatttgaaaattttcaagtcaagcttgaaaacattcaattcagatttaaaaaattttcagctcagatttgaaaactttcaagtccagttgaaaacttttaccttagatttaaaatttttcaaatcaaaatttgaaaactttcaactgaagatttgaaaattttcaactgaagatttaaaatttttcaactcaaattttaaaacttttatcttaaaattcgaaactttcaacttaaatttgaaaatgttcatgttaataatagagctaattactggaaaaaagaaaaaaaaaagtatgagatcatagcgctacgtactcatgttaatcacgttagatatggcgttaatcacacactaattgtatgagttggcacctgcacgtgctttactaatgagcctgcgaacgtccgaaacgcgcgctgagttgacccgttggcgcgtacgcacacaacagcaaatccgtattatttcttgcaccaggatcctgataaaagatgtaggtatacaagtggatcacccgcgaagctttatagattaaattaaataaataggcaacccacggccggttcccgtcgtcaagttggttagtaagtaacccgtggattaattcataggttgcccactaattttgtttaagtgggtacactaattttgtttaagtaattttgtttaagtgggttcacggtcaactcacttcacagattcatcttgacttcaaagtaagacttcaaagtaagaggaaccgtcacatatcatgaaaaatttgcctcacagcagctactgtacatatctgcttcgatctaaactgctcatcgactcatagagtcataatgcagtcgtcctactgctacaccagggcctcaaaagaagaacaagatagtgatccactgcatttgcaaaacagttttcaggtaactgctgtactgattttacacgcgagaagatttcaggccatgatgcatctttcacacataagaagggcagtatcccactgggcagttcatcacaagaccatatacagtcatggcagttattaaggccaagggtcctgatcacagtctcagcatttagcgacacacgctgggacacgatatccacacttggaagtgtaagcagtaacatggtcacacggttaattaagcctaagcagcagcggtgtccttgggagagcacggcgtaggctgggcatcaggcgacaggttggagatggagatgagctttgatctgtacttctctgccccgtcatcgtcgtggtggtggccattcaccatggcgccgctcggtgacttgatgttgacggcttctcctgccgctggaacagaccgggagatcgcaatcagagactgacgggcagcttcctgagtgaactctctcggtgatgcaggtgaggccatcaaacaaacaaaggctgcaattcaagcataacaggaaggtgtaagtatacgatacagcttattagaaggcttggcatataaatggaatgaataactaattaagtagatgctagtcattgagctaaattaggcagcttataattgtactactaccaacactcctaatataaagcaataaaaatagtaatgttgaaaacacaacgtaatggtccacatgaaagctcctaaaatattctgcagtaactgcatgtcagtttcatatgaaaaatgttatacataaagggcgattccatcctccaacctctgcttaagcctgaagtgtgctgccctgattgagtttccgaaaaagtagagttattcaatttaagtggagcatttggtatacatgggacgaacgggttcagtttgtgtagtcgcacaaataattgctgagctatgcacccgttagcacacactgttttagcatgaaagatgctatttttgttgcaaatgatccacccataaatctgttgtggataggatatcaggcagacaggcaccaaacaatcacactgtattcttgctaaaaaaaatgacttgccttttgaatgaagagcattttgatcatgtgactactgaatttagactggaagcatagactgggtacataatctggagtgagattttcatgctgcttgaaacgatttagtacgtttttcagtactaaggttaaacatcaaaagagtggtagatcgcaaaaattaggtaggccatcactcaaacagtccctcatatatagactaaatacaaccggtcgttttggtaggaccagctaaaatagactacttactagaaaagaattactactccatataaggaaagacaacctcaaattgcagattactatttcaaagcgtcgctactatagttacgtaaccttatcctcagcgtgaggtgcacctaccaaaccgaaaggcaccaaagaactcacaagcatttcactagtattacgagcttttcggagttccagtatcagccatgtggactaaatcgttgacgctccgaataccgcgaaacaggggcggatccaacttgggacatgaactgaacccccaaaacttttggggaaacaaacaaactgtttacttgtagtaagttcaaggctctgaaattaagagaagagcttcttccagatctagaagagaagctaggattgacgaacgcaagcaaaatcccagacaacagtactcccggtgggagagagatgaatcagaaagagggtgtggatgctcaccaggatcccctcccctcccctgttcagccgcgacgcgagatggcgcacggagctgaggagacgacgagacgggtgtttttccttttacgccaaagagaaggggagagatactcgagaaatgagtactccaccttatatctctttttttaggatgattggtggcccacatatcagcattactcagaaaataaaaatgcaacaaattcaactgggaattgtgtcgatgtcaaaatttggagtgattctctaattggttcgcttaaggaaaggagtcgattgatggattgaagttaatcgagagatcaaatttatgtaggaatcgtaaatattacgacatgacaaattaattttatctattaattagacaagatttagaaactttcctttttatctttggtaagtttcatctagtgtccgatgacttgtatatttccttttacttttacttttaggaaacttgtgtcgtgtttcgatcacgacttatatcaatctataagggtataaatatatacacttaggatctatagaaaatatttctatatatcaatacaattatttttggcacaccatcatcttttgttccagcgagttcttagttttgagttgggatgtatcggttttgatctccggcgaggatgttccgtcaacttcgcttgtattggcgtggttaagtccgatattctattcaggttgacgcaaaacgttgcctatttgatatattagttctatctttaactgtattgctgtttagagtcgtatcggcttagatatgacttttttaattagattcgatattctgactaagttgatatttctctaatcgtattgttgttttagataaacatattgtattttttataatattgtataataatgagataatttattgaaccttatttataaaatcttacgtccgtcattaccgcgaaaactagaggcatgacaagaaaatgttttcaatactgtaatagcctcctgaaaagaagtactccactacactactaaagaacagttaactaaatctcgagggagatcaaatcaaactagtcaggatgtgttcatcgccataaacaagactctttgctggtgttctttttttctgaaaataaatatgaagatgaagattaagtttttttaaagtaaaacgagatggtattaacgtatgattgattaagttttaattattacgaacttaaaaaataaattaatatgatattttacaataattttcatgtagaaagtttttacacaaaacgcatcatttaacagtttgaaaagcatgccacaaaaatttttatcttcaaccaactcttgttgaagaaatgaacggacctttatcccaacaaatcatgaaatctccccacacggaacggtagacaagaattacttccatggttaaatactcacgtactcgcgactgaaccaaaatcaagtaatcaaccaagcgacgagcggtcaagcaacacaaaccaaccacgatatactgtcagtacacaatccaaccggagggacgcctgaccagctagcaataatccggtgcagaaactaacgcgcttataaatacacgagatgcagagcgagcgcttaccagataatctggcaggacagcgggaggctgcagggacgagcgatgaggctgcagcctgcagggccgaagatgagagaaagctatgggcgatggagagttggagacgattgggggaaggaggccaaccgaggatgacaaggacgacagggtgtgggttcggtttctttacggagtatatgaccgtgcacgttgatcacgacgcgcgggggttgagctggtcggtgagccatcgtggactaccgccgcatccaccgctcgtttgctcggtggatggtggggtatcaggctcggtccatagaccaggttctgggcattatgcctcgcccgtgatgaaacggacaagagctcgagttgtaaaacacttcgagaggtgcacgtgaggtgtcgtatctgcacgaatcgcgaggccatgtgtctctggagaagtcggcgaggtgaggcgcgctcggagctgcgggccccacccgcagatacgtctgtagcctggagcaaggtggggccgggccgtgctggaccgaataggaaggggagcggacacgggctatcatccagcccagtttgttcgtcactattctgttccggcccaaactgctggtgttactgttacgctccaaacctaagaaccatcttctaactgcattgtgtcacatgtaattctgttgcaaaacctcatggcagccattttgttagttgtcgaactactttcatttcattaatgaaatagaagaggatctcctctctttctaaaaaaaaactcatggcagcttatttattcttcgcgttatccaactctgaaatagtttggctttgagagtttcagttattggttggaatagctagcttttctttgcaagctgcacagctattttatcgctcgaatacgaattgtatgaatgtgatagttctggaaatagtagtgatgcatttgtgctcattagatatatgcgttacacttgaagaagaacaaagtgaaaaaacacacatcacatctatatgcagcaagtatcaacggaaccaaacgttcccctcatttattaagcatggattacacttgaaaagcgaactgaaaaacacgatcagagaagcagcgtcgccaactgccgctgccgcccggccggcgaggaagaagctagtcagaaccagcgccgtacggaaaatccgggctcgggctcgccgtccgcgagctgctcggcggcgactccgcagctgccacgggcggtgagcctccactccgaataaccttcgggttgggtcccgtcgacccacccacacggccggctgcaccgtcatacgcaggcactgccggggagccactggacacggccgtcggagaacatggtggtggtggacgaccagtcatgttaccggaaaacgtcggcgacggcggtggtggtggtggacgaccggtcatgttaccggaaaccgtcggcgacggtggttcatctgggctcttgtgcctgccaccggaagctctcggcgtgtcctcctccggcggcgcctgcgttccaccgccggaaactcttggcgtggaaggtggtggcacacgtacactggcgtatgcgtccggcggtgtgtgcttgccaccggaaactctcggtggtgtgtcctgtggtggcggcggcgaacggacactcgtgtttgcgtccgggggcgtgtgcgtgccaccggagatctttggtgtgcgtggcggcggcgatcttacacttgtgtatgcgtccggcggcggcgtgttcgtgccactggaagaagctgtcggatgttccggtggagggagtcgcacgcttgtttcaaccactggcgccggcggcggtggtgttcgacggggaaaggtctttggtgaaccaagggaaaatctgggagcaggcggtggaggagagcgcacgctcgtttcagacatcggtgtctgcggtggaggtgttcgacggggaaaggtcttcggtggaacggacggtggaggagagagctcgctcgtttcagccactggcgccggcggcggaggtgttcgacggggaacggtcttcggtggaccaagggagaatctaggaacgggcggtggaggagagagctcgctcgtttcagccactgctgccggcggcggaggtgttcgacggggaaaggtcttcggtggaccaagggagaatctgggaacgggcggtggaggagggtgctcgctcgtttcagccattggtgccggcggcggaggtgttatacggggaaaagtctttggtggaccaagggagaatctcggagcagacggtggaggagagcgcacgctcgtttcagccactggcgccagcggcggaggtgttcgacggggaaaggtcttcggtggaccaagggagaatctaggaacgggcggtggaggagagagctcgctcgtttcagccactgatgctggcggtggtggtgttggaccaggaaaggtctttggtggactaagggagaatctaggagcgggcggtggagaagagcggatgctcgtttcagccgttggtgttggcggcggcggtgttggactgggaaaggtcttcggtggaccaagggagaatctaggagcgggcggaggaggagattgcacactcgtttcagccattggcgacggtggtggtggtgttggactgggaaaagtcttcggtggaccaagcgagaatctcggagcgggcggtggaggagatcgcacactcatttcagccgttggcgccgacggcggtggtgttggactgggaaatgtctttggtggaccaagggagaatctgggatcggacggtggaggagagcgcacgctcgtttcagctgttggtgcctgcggcggtggtgttggactgggaaccgatggcgcgcacgcgccaccgctgctggtgggaggcctcgggctggcttgagcaccagcggggactgacgacgaccgtggtggcgccctggaggtcgccgcgacgccggcgcaatgccgcagcaggccatgcgggaggagcgaggcgacgaaggtgcgggtgaagggcccgcagtgctcgtcggcctcgcacgccgcgaggcggcacgcgcgcggaatggggcaccccgtgaagaaggcggcgagcaggtcgtgcttgcagcggcccagcgtcagcagagactcccagcagatgcccgagtcggtgtgcgggccgcccgggaagatgctgtcgaacgtgagcgaccgccgcgccggggtcgactgatcggcgccgccgccgtgcgcgacgcacgcggccacgagcgccgcgagcagcaaggccgtcctcatggttggcctcgcaaaaccgcagctctctttggctgcacctgttgtgttttgtgcttcactttggagcaccaaggccgtagtagcgggaaactgtatttatagagtgttgccaagctgttaattgtcccgatcgttttgcttgcacgttgggaggttgcacgtttagattgattaatgctagcgtgttaattgtgcatgtgtaacccaccccgaagatttgttgaatgttcatcgatggtttctcatctatgttctgagttctgacgttttctctagccaatgctgtgaattgccattactcgtagttgttgaccagtaatgtttaattcatgagtaaatagaatgcgagtatgtgaccatgtctgaacggttatccagatggaaaagtagaaatacaagtaaggaattttggacttgaaatgcaaatcagatgagctgaaagtctaaacctgtatgtttgtggagtaatatatttcatattaatctatgttgtcggtttttttcatatttttttttgactatttagatgacatgcaaataacgagaggatgtcctcgagagggatgaaaatccacatctcctataccagattcaacctgtttggcagctgagttttccaatttgtcttcctcgttttccgtgcaaaagcttttaaaactgttaaacgatgtgtttttaataaaaagccttttttatgatagttgtttttaaaaaatcatattaatctattttttttaaaaaatataactaatatttaataaatttcgtgataataagttactccggtttttttttgtatgcgggagattagttcccaactggaaggaacaaaacgcagcccggcctgatgatgaattttttaataatccctaaacatagagtacctattaactttcatattgtcaagttgcaccatttttttttaaaaaaaaaactgaagcgcctgatctcgatgcctacctacatatgaggatatatgacgcgtgtttttttttttctctttgatcattcgacagaatccctccttgtccgataatgaatagaacacacgcactcgaatcggattcaacagagcccccgacttttgttataataagttagcgtatctctcgcgcactaacttcaggcctcatcgatcattcatggcagtcgaggcatgcagcatatgtcgtcgaagaggggcaagagagcacgccggtcgtccgccggccagccgctgccggacgaaatgatgacagaaatcgttctgcgcctgccggcctattccatcgtccgtttccgcgctgtctcccgctcatgggccgctatgctctcttctcctggattccaggacggctacgcggccatggcagatgcccgtcgcatgagcatgagcaagttcgtcttctttgcggcgtcgccggcgtcgcccagaggcgccacggctgtctactcctgcgacgtcggcccagtccggcgcatcacgacgacgacgaccgacttgctcttcaatatcgaccgcctgcgcccgggcttcctcgtcgtctcaagcaggccgtgccacggcctgacgctcctggctgacactcgatccttcgcctactgggtgtgcaattccagcaccggcgtgttcaggccattgccgcggcggcgctgccacgatctgtccagcgccggcctagccttcgacgatcggaccaaggagcacaaggtggtgcatctcttctgccatgtgagccgtggcggcgagagtgagtccatgaccatggttgcgaggtctacacgctctgcaccccaagccgcccgtggaggccagcctccggaggcataccggggcgtctcggtggcgtggtgatctgcgccctcctctacgagggcgcggcaaccaaggtgcccccggtatacgccaatgggttcttgcactggcagctctaccctgacaaatacttgatcaagacctcttccctgacacgacggtatttgagaaccgaaacagcagcgttccagtgctatgcttctctgttgccgacgaggccttcagcctggtcgctgggccggcggtcgacggcatagcggattactgcgctttggacagccactccccggctgttccactccacctggtggagctccatggctctttgtgcatggtccgcgatctccgccatcttccgcatggtgaaagctgcctggagatatgggcgctgagagattacagcgccagcgtatggtcactcgacttccgtgtcgccatgacgccgcaggtggcacgcgacatgcacgatccccggttcatcaccgtccttggatgtctcggcggcgcgcgcggagacgacgtcgggagtgtggagcggatcaagaaaatcctgatcgctacctcgcagcacaaggtgcacgcctacgacccagctacggggagcatcgaaacggtggtcaccgtcccagaggatttcgccggcggccgggaggaggcggtggccggtattcggattggtctgtacgaggacagccttgcccgtgtaggcggcgagagttgtcgacagagggaagccacggcggcgatgactgagatcctactacggttgccgcccaaatcaatcgccatgtgcatgctcgtttgcagacagtggcgcacactgatcgagagcgagcgctttcttacgtcacacatgcttgctaacatggaacggaagaaggtcatggtagtcacgaatggccgtcgacgggagaatttctttaatttcatgccggtggagacctggattgggcctgccgccaaagctcgttcggacgttcttgtcaaccgcaggatcctctgctctaagccatgccatggacttaacctgataagcaccagcagcgacgactacctgtgcaacccttgcactggttctatccggtgtcttggaatccgtggaaagtttcgtgagattgatccaactgtcagtattgatgacgatcgccgccatgtcacgagagttggcaggaacatcgggctaggattcgaccggttgtcacaagagcatgtagtggttgagatgagccgcttcaaaggcgacctgcagctgtgcatgatcaagacgagctgcgtggattactggagctgcgctggcaagccgccgaggccggtgaccgacatgccaccggcacatgttgacgggacgctctactggatcagcgagccacagccgacggcccgagaccgtgtcattgtggcatttgacatctcctcccgggagttctccgtcttgccatgccagccatgctgcagcgagagggacggcggtgattatccgttgctcgtcgagctggaaggatcgctgtcgctcgtcgtcgcaaacgcggaggagaacaatctgcagatatggacgatgcaggaggctgacggcacatggcacaaaagttacagcatcttactggacgagaggtacccggacttctcactaaaaacgggcgtggtggtagtgccactggacgccgtcgccgatagcaatggcggcggcaggatcttgctcgacacagggcgagcattgggctactacgatctcgagacgagaagcatcgacaccttgtactcgctcgaccagctaaagcttccccagtgccagatggcattccccatgctgtacggggatagcttggtgcccatccaggacgacgaaccgcccgactacgtcgcgccgactcttcgcgacgacgacggcgggcggcgctgctactaccagccgcaacacgtggagatcagcggcggcgagcagcctgcggctgcctcctgcgtattccggccatgcgaggcggccggcggcggctgcaggggcatgggctgcgtgtacgcgggtagctgctgcaggagggtgctgtgccgggagtgcagcctcccgtgcgtcgagcacaccgacggcttccacaccgcgatactgcccttcctgccgcggcgctccgcgacggcgaccgagatggccgaggatttgctgctgggtttgcctctcgagcacccgtgcgtgccggggcccgagtactgctactactactcggagggggacgaggtggaggaaggcgtggggcggcacgtgttcgtgtcgctcagggatctcgcgcgcaccaggcagccgcgccgtctcatcgagtgtgggtacaggatggatatgatttacattttggtccttttaaaaaacttatttcgcaaatagacccctggaaaaacttatcccaaaaatggtcctttttggggcgccagagtggctggcgccgtcgtccaactgcagcctctctggcgccgtccccctgccgacgtggcggggcaatgctgaggtggctagggggagcgcgccagagtggctggcgccccccccccccaaaaaatttttttttaatttttttttatttttttgatatttttttcacgcttagggacatagaagaaccaaccatagaaaaaatgaactcaaatggacgtaatatgtgacatgtagaatttttcctctcctctcctctctctccgaactagtgcagaggagagagatgtgcaactttttttatttttatttttatttttttgatatttttttcacgcttaggaactcacaagaaccaaaaatataaaaaataaactcaaacggacgaaacatgtggcctgtggaattttccaaagctctaccgaaaaacttctctcatcgaaaacacaatcttgcaagcggaatttggaggttttaatatcgccgaacacaatcttgcaagcggaatttggaattttgaattagattaagtaatttcataaagtggtagagtgcattatgtttaacatgctgatcaaagggtagatcaaagtggtagattagtgaaggtgcaaagtagactaagtggtagttcaagtttaattttttttttggttggttgtatcgtgatcctgagagtgaaaaaacatccgagaaataaaacaaaaatgacactgttgcaactccatacagagaagcaggaatggaggcgagggtttgggaggggggggggccggcgccagccatgctggcgccctcctcctgggggcggcgccagccatactggcgccctcctcctgccacgttggttcgcgtgtgccacggtggcaggaggacggcgccagagaggccggcgccgtcccgttggatgacggcgccagccactctggcgcctcaaaaaggaccatttctgggataagtttttttaggggtctatttgcaaaataagtttttcaaaaggaccaaaatgtgaaaaatctagacaggatggacgggaaggttattagggagacgtgggtgcgcagataccgcgctgtgtcttttaatagagaaattttacggtactttaaagaaagtatctaaattttacactgaaaattttgatatatgaaaatatcaaattttacattataaaatatggtactatgcacagagaactagagaagtcaagtactttcttaaggatggtaaaatttatctatttagatatgatgcaccatatgcacagagaactagagctttgcagaaatagctcgggacaatgcccgacagtttatatcaaagagttgatgaccgtcattgcgagcagtccggattccataacacgagcattgcgataaactaaaatggagtttttcacgaactaaactagtagtgttcaactctttgaactgtatatcatgaagtaattatgatttctctacacagatctgtcggactgtcaaccatacaacactgtctaggtgaagttcatttcctgtggatggtagcgaagtgaaagcccatgggttctcgaaattcaccggttccatggcaacggtggcagtaatctaacccgctaccaccacatatacggcacctggaaaatggaagtcatgccggagaagcatgtttctcagtaccagcagcataagtatggcagacagcttttgagtatgaggctatgagctcctcaccattgtggccattcgcccttcgggagcatgacaagatcggcatgattggttctccctgtaaatcccaggttccatggtcatgagagaactggtttgtaggatcatgatactagcaagagaagagaacatggagtacaagagatacctcgaccaaaacagttgcggcaatctattttgcctgtgcctctgcagatggtgcatggaggatcaggcctttttggtctctccctcctaatatttgactgcatcatacttgcagtgaagatatcaggattggtgtataaacatgtcaaaagttaacaaatgacaattcttaatgtacaatatggtctgagatggtcttgttccatctgtctggcaagttgaaggactcctaactcagtgacaaacagagagggtatcagttggcacagaaaggaaaatagcatgccctttctcaaccccattccccttttcccctgccatgtttccctcgcaatgaatctatgataaatctcatgtactatcacaatttttttcagataatggataacccgaccgctacatcaaaaaacacataaatctgcaaggccaaccttggtatgtttggagttaagaaatcactacaggctagagcaaacacacagtaagcattgctggctgtaaaaacgttggaacaagatctaagtcatgaagtgaatggcaagtaaattttgcttataaagtgttcagtggattgcatatttgcatggtgctaagcttcaggtattcaataaaaaagaagtggaatcaattgctacaaagttctgatacacatgacgaccttaacattctgtaagatggtttgaaatatattcaggtggggaacgcccccctccggcgacttggtcagaaaaaaacaattccgtaaatgtaatgccgaaacaatttctaccaaccatggcctaatttcctcatttttggtactcaattgccgattcctcatgattcttcccatcgcgctagcttctgctgcaggcagcacaatcttacccgctaccctaacccatccccacacctcctctccatgtcccgctgccgaggaaaaacctaccggtcgattcaactacgcttcctgtctacgaagtgttcgacgaatcgcaggcacgagaacaaaaggggagaggtgcagggaaggattgagctcacctcgctgcggacgatccatgaaggtctcgatatgagcacgctaggaggggcctcgtgaaatccggggagcgagctcgaaggagcctgccccgccggcgacgccacgccgttggggccggccgccggcgtcgaagccatcagcggctacaggttgcggtaggggcggtcgggcggatactggaaaggcacggtcgcacagagagaccgacctgttttcatcagttcaggctgcgttatccgcccacgattgggcctctttgggttctccttaactgggctaggctgggctgggctctattctaacgaaacaatgaataagttcactttaggtccctcagtttgctatcgagttcagagtccctagatcacaaaactggataaaacgcatccccaacttacaaaaccgtacaaacgaggtccctcggcagtatagcatctgattttaactgacgtggcatctacgtggcttatttgactaggtcttcgtcccacgtggcatttgatgtgccgtttacgtggcaattcgatccaaaaaaaataaagcctatagggcccacatgtcagttacacaccaattatttaaacatggtgagggccatgtaggccacatgtcagcctcattactccatttatctcactatcctctctctcctctgcatggggtcggagaggagcggccggcgcaaccctagccacagccgccgccgccaccgcgacggaggaagatggggcaaccacggggtcttccatggcgaaactggggaggtcacagcctcacggcatcagatcgaggggagctagggttttgggaggctaagaggaggagaaatgagctagagaggaaagaagccgctctaggttttctagttgggggaggagacgcgatggcatgggtgacgggtggggtggagcggctagccggccggtggagcagggcgggcgacggaacgaggcggcagcagagcagggggggtggagcggccgcggactgtgggcggagcaggccggcggagcgggcggcggaacagggtggcggcggagcagagggacgggcggagtggccgtggaccgcgagcagagcagaggggtggatgggcggagcagagggataggtggagcagcggcggagcagagggacgggcggagcggctgcggaccgcgggcagagcagagggatgggcgggcggagcggcgggacggagcagaggagataatggccgtgcctcctcctcctccggcggtgacgacggcggaggtggcgagctccacctcatcaagaagccgttcctttcccccctccgccaatgaggatgaagtgaggctgagacggagcctgctctaccgctatccccggaggaggcgctcgctcgcaccgttactgaagttcttccacctttctcccttctccccactggtcgcgtcgctgctgtgcacctctccatccgcccgtcgctgtcgagcccctacctgtggtgccctaccaacatcggcctccctgcctctggcctccccacccgtctcgctgacctccctgccttatccctctgcggctctgcacgctctcgccggtggagaagtggagaaaggagatagaggtagagaggattaggtggaggaggtgggacccactgacatgcatgtgaggcccactatttttattgactgacatataggtcccacatattttgttttaatttttaatgttgcttcgtttatttttttcaaatcaaactgccatgtcagcgccatggcaccgccacgcaggacgaggactaagttaaaccagccacgtaggcatcacatcagccaaaactgccatccaaactgccgagggacatcgtttgcaccggttttgtaagttggaggacgtattgtatctggtttttgagttgagggacgaaaatcgaatttggtgccaagttaagagaactctaatgaacttattccatgaattgatgattttttaaactatttataaaaaagttatataaaatattcaaaattttatatttctacaccactatatatggctgtgttcttaagttcaagttcccaaccttattctctcgtttaccgcgcgcatacttcccaaactgctaaacggtgtatgttttgcaaaaattttctatagaaaagttgctttaaaaaatcatattaatctatttttgaagttttttaggctaataattaattaatcacgtactaatccattgctccgttttccgtgtccaacccttacctaagaacagaaccttaatgtttttttatgacgtggcacacggccatgtggagggatgccagtcattttgcaggcaacccctgccaccctcctaaaagactataaaagggccgtcaatgtcattttacaaccggccccttagaggctacaactctctccagaggctacaactctctccagatgcttagaaatgtcctaggctgccattttataggtgagcccctttgcaggcgataaggtgactgcttgtaaaatggtgtcttcctccatgtgacattgtagatttgtgaagggcaacataggtgtagatttataaaactttaaaaagaatatgttttaaatattttaataaataaaattaaaaataaaaattcgaaaacaacaatacactctttagtggaattgaagggaattttaaaggaattgcaaggaactttggaatgtaggattttgaaaacataaagcatgaaaagcacaagattggaatatatcttgccttgcaaattcctaaagaattagatgcactcaaatgctccaaaataatcattcgggtggtacataggaataggaatgataaaataatagtggacacaataatagaacaccacgggataagaccttaattgtatttccacataaaattttaagcatcaaccctttgttctaaaggacttgataggaattttgccataagtattcaaatcctctaaaattcattcactttacttttttttccaaaagagcctaaaggttttgattcctaagaaaaatttcaccatgtaaccgtttagatcaaaggaaattaaaacaaatgaaagtttccctcaagttaaaaaaaaagaaataaaaagtttcctgttgtaaagaatcctgcatcctgatctgcaacatgtctatatttcttcttttttttttcagttctccgggtaaattgctcatgctatgcttagcacaaatcctatttctttcccaaacacaaaacattcctttttttgtccattcttctagaggcgctccgatcaaatcatccggattattttggggttgtttggttcggtctcaaactttgccaaaaattgacacacctcatgttagacacatttgaccaagttaactcatcgtttggtttatggtcacacttatggtaatattctctttcatttctcatggtcccacgtgtcatcaactaaaaaatgtgtgccacactctttttttctagctaaagtgtggcttacattttgttggccataactaagataaagtgtggcacacaagtatggtaaatgattgttgtatagcatgcaaacagcccctttattttgcaatatagtttgtttattttttttggtttgttaatattagctctttttctagagacatgtggggaccgatgtatatattgacatttgacacgtttctctagaggtgcatgatgtgttgtttgttcggttttttttttggaagccattggtttcatcggagaaacatgggtggaaggcgtgcgggtggtgcgaggagggcatagaaggaggatgatttcggttttacaatagtaggaatatagatagttcgatttttctggggcggttaatattggtatttttaagacgtgttgggatgcataccgtcattttaatgaaacgcagtatatattgatctatttttctcaggatgcaagatgtgctgtatgttttgcttttttggaagtcgctggctttttgggagaaacttgggggtgataggcgtgccgagtggtgggaggaggaattgcaagacaacaacttctttttatgttactaaagatattttccagttgtactcctttttttctactaagattttagtcttatattttgttttagtgtaccgcgatatatatttacactttttactgtgcatgatgtgtcgcgtgtttttttttaaagccgccgctttttcctaagaaacttgggtgttaggtgtggggcggtaggaggaggaatcgcaagatgataggtccgcttttatagtagcagacttgttttctagtcatactcctatattttttctcttttctactaattttttattcctatatgttgtttttcagcattcccagggtcctactgtacataaaacccctgcagcacaaggaagcctaggagagagagcagagagtagaggatgacattcccctcacaacatgagggaatgccaacatgagggaatgccatctcgaacccctgaagttgtagctggtcgagctagtagaggatgtcatcatgtcaatgtcctccctatgtcgggcaagatcatgctgccattgacagcagcgtccagtggcagtgtggcactaccatgcgatgcgccggtctttactgagaagttaggctgcctctcgtatagaaaaatgtcgtaagttttcaagcacatcgccattactgcaagtccagtaaaatgtaaaaaaaaagtctttagtacaattcaagggaatttcaaaggaattgcagggaactttggaatgtaggattttgaaaacatagaagcctgaaaagaatataattagaatatcttgccaagcaaattcctaaagaattagacacactcaaatgttccaaaataatagtttggatggtacataggaataggaaagataaaataatagtggacacaagaatagaacaccacgagaggaaaccttaattggatttccacataaacttttaagcatcaaccctttgttatgaatgacttgataggaattttactgtaagtattcaaatcctgtaaaaattcattcacttttcttttttttccccagaagtgcctagtggttatgattactaagaaaagcttcactatgtaaccgttttgatcaaaggaaattaaaacaaatgaaagtttccctcaagtcaaaaacgatattgaaagtttccctttccaaccatggcaaacgatcgttccctactttaaggattcatgcatcctgaacagcaagatgtctatatttcgtgttcttttcagttctcctggtaaattgctcatgctatgctcatatcaaattctattatttgccaaacacaaatcatccattttttggccagtttttctagaggagtactgatcaaatcgtctatattactttgccaaaagattgccacacctcatattaggcaagtttgaccaagttaactcattgtttggttcatggccacacttgtggtattccctttcatttctcatggtctcacacgtcattaactcaaaaatgtgtggcacactctttatttgctagctaaagtgtggcttacattttattggccataacttagctaaagtgtggcacaaaagtatgacaaatgattgttgtatagcatgcaaacaacccctttatttcgcaatatagattgcttaattttttgggtctgttaatgttggctcttcttctagagacgcatggggaccaatgtatatattgacacatttttctagaggtgcatgatgtgttgtgtgttcgattttttctagaagccattggtttctctggagaaatgtgggtggaaggcatgcgggtggtggaggatggcatagaaggaggatgattttacttttacagtagtagatatatagatatctcgatttttctaatattgatattttgtaagatgtgttgggatgcatacaatcattttaatgaaccatagtatatgttgacctgttttttccaagacgcaagatgtgttttttttttgagaaacttggggtgataggggtgtgccgcagtggggagaaggaattgctagatcttaaagatattttccagctgtactccaatatttttctgctaatatttttattcctatattttgtttcaatggaccatggtatatatttacacgtttttttttaaaaaaggtgcatgatgtgttgcgtgtttgggatttttttggaagccgtcattttttccggagaaacttgggtggtttcgcgatctttgtttccttgtgccgcgcgcgcggcgtgcccaggtggtccgcgttctttgaacctgatcaaggaggagttcgtgatgggcgaccacgcgcggctcatgtccttcttgtggttcgccatggagcttgccatgtcatcgccgcttttcgcgaagctctccgcgctcttctcctccgatgccgcgtgcctcgagggcctggagcgcgtccgtgggcgtggccacgagcggctccgtgtcgtggcgtataggctcggcggcttgcggtacagctgggcgccacggttccgcctcgccgtgctgctcctcctacgggacaagtttcccgagctggttggcgccatcgaggtggttgatcccaccgtggccccagtggagcgccgggccatggaggagctgggctgcattgtcaccacatctcctgcgctatgcctggtggtagaagaaccaactctgatctttatgccatacgcggaccgtgtcttctttgagaatttgctcatcttgaactggagcccggacaagctcgggaagatcgtcgtgctcgggcacagtttcagcaccatggtgaagatgcttgagctcagcatttcaaagcaagagaagtgtggtgtcaatgagcagagggagaaggtgaagagggtactggcaattccgagctatgttcaggaattagagctttgtgcagagatatctggcttattcgataaccctctcttgggagatgagtatccttatgaattgaaccagtacgactacaataattcaccagagcagtgtacatgcatgcactgcgttgcgcgtatggaaagcggtgctttgatttgtgctcttcccagcaccttttcaattcatttctttcacctcgatgctgaaatcgatatggaatatttgataccaggttcttttgcagctcatttccttttttttcaaagcttaagagtgtgtgtgtgtgtgtgggtgggtgggtctgcgcgcgcgcgccaatatggattgtggcattatggtcttctgacttgttgcctctttcttcgatgcaggtaattgcgctacaagggtcgggagcaatgtcaatgtccaaatgggctatgatgctcagttagaagggtaaggctacatactgccaaacgaatcatttggattagttttccatgcttatttgtttgcctagttctatgaattttaagctaaatgaaagtataatttggtttcaaaaataaaagaaaggatgatgcaaacaagatatgtttgctaaaagaaagggtttcttgtgtaaaaggggttctctgtttgagtgagatttgctttgtactattgctgcagtgcaggttattgttttgcttcggcgattaactcaaatttgtcctgaacagagaaataaaaacaacatatttttgtaaaacatgtttgttgttttactgcagtcattaactttaacaattggtttgttgcgatatgtcacatgtgaagcacatgccttaatttttgtggtatatttttgttgttcactattgatgacttcaaaactaactagctgggtggcccgcgcaattgcgcggctagcacccaaacaaaatcatatattttttatgatattacttaaaatttataaaatagatatctcattgtcttaagactttgaaagactaaaccttatcatcctcgtgtttctaattatatagttttttaaagtcacaccagttgctaccccttatgtcatcttcttctttatttgcttgctcgatctaccactatttctattcattcttcttggaacctttaaaaattggattttatagtttttagagtttattgtcacgttgtgtttcatttttataatttctagatgtcccgtcaaacgttgccattatactcctctacggcccgtccactgtctcttttctttattgtcattgagattttaaaaatcgaacataattatcttttgggttcatttttactttctagaagtcccgccaaaccgtcagcggctttgtcattgtactcctcggcggctcacccactggctcccttctttattgtcattgagattttaaaatcgaacatgattatcattgttttttttactttctagaagttccgaacctttaaaaattagacttgtagtttcattttttataatttttagaagtcccatcaaacgatgccactatgcccctctatagcccgtccgccgccgactctttattgtcattgtgattctaaaaatcgaacataactattgttggaattcatttttttattttctagaagtcccgtcaaccgttggcggctctgcaactatactgttatacaccccgcctactgcttttattgtcattgagattttaaaaatcgaatatgattatcaatgaggtttgtttttttttactttatagaagtcccggcaaccgccttactcatttgcttcacagcctgcctgacgtccctccctttaatcgtcatttaggattctatttggtgttttattaacaatttttgtatggcgtattaataccgttttgtgttcttttaatgcttttattttttattttcaatttcagttgttttaaaattgtattcctactttaactctctttttatttttctattttagatattattttattttttattctaaattttaattaatctcgtattgggttcttatatggatttttctttcaatattgtttatttttaattccaaatttcagctaattttaaattgtattcctacttgaactcttcttttattttcttttgctaatttcggatttatttatttttttctgatgtttaattaatctcgtattgggttcttatatggactcttcttttaatattccttatttttaattccgaatttcagctattcttaaattgtattcctacttggactctcatttccttttctaattttggattttattttatttttatttcgaattttgattaatctcgtattgggtccttatatggaaatttctttcaatattgcttatttttaattccgaatttcagctatttttaaattgtatttctacctggactctctttttcttttctaattttgaattttattttatttttatttttatttttgattaatatcgtattgggttcttatatggaaacttctttcaatattgcttatttttaattccgaatttcagcattttttaaattgtactcctacttggactcttcttttcttttttttctttttctccgattaatgtgggaatttctagcccccacagcgaacgtggtgccttcttttcgagctgtcttaataatataatagattcctttccaaatgaatcaattcaccatgtggcatttaaatcctagtgatgcatacattgaggacagacacttatatgaagctgaaagcatagttaaagaaatgcgtgaaactatttctgatgttaggaattctacgctatcacaaagtttgttgatcacatgaagaaagatcagagcatttgttctcacatctcaagcatgttgggagctcatgaatgcattcaattggttgtttatggcattgggagctttgaatttgatgtgaagtcccaatatcagattgcttttgctctactactaaaggaagacaatatattcccaattagtgatatcgaaatctatgatccatcactacctcctgctgatgtgaaagcatgcttcgacttggatctacgggtgctcttggttaatgaacaatgccaaagaagtgttgacaagccgataattttctttgttccaggactggcatttgttggaaacctcattgagtcaaatttctctcctgagcaattaaacaatattattctaatttcctatggggtcaagaatatcggggatagaatttctgccgaacttgaaaattggaacaatggatttaccagtttgaagggttccccagaattggaaagagagaggtttatttgggcaagcataaattatattaatgaagtcattgtgatggaaaattttaatgcccacttctggggagtctctgatatgagatttgagttccttgatgttgctgctgatgtggacatgaactcaaatttgccaagtatgtgtttttgcttccgaacatcttcgatttataccaatttacctcatttttttttgttttcattacttttgtttgatggtggagctgactttgcaaggccgactcttaaggaaaagtttttacttaacttcaaattggagctggaatataattctttctttgcttttgagtacgccttcttgagacttatgggcaatatcttgttacttagtagcattcattgtctagtgttgttacatgctgaatcatgtactgttattgtctctgtattttcagccatgtgtcttattttcgtatgtgcttggaagaaagaatgtcgcgtccatttcaagacgatcaagacgattgcaaggatggtaaacctcaagactgggcacatgaattcctgcaccgaatcccagcaatgcatcggaagacttggtctcctcctcccaaaggttggatcaagttcaatttccacggcattggtggttccaaagatcgttctgctggcatgggtggtgtatttcacaatgaggatggtgtgctctccttctttattggttcattaggtaacgtggatcaaaccgtggctagtattggagcaattgaacttgggctaaaggtcatgcttgagtaccatgaaccagttaaaaagctgatcgttgagggggacgatctcacggtgatacgttggttcaacagagtctctcacccgcctgcaagagcgcatgattcattcctacgtagttacttgcacttgacttcgatgccattgccatgtgagggggctgccgtgcctgctgagatatccaaagaccctgaccatgagaatggtagttcttcacatgatgcatcacctactaagccaccgaatgacggtaacatcgagaatggtaaagatagagaatcatagttctttacaatattctttatctgctattaagctatctgaagtctgtaacagtaggaatggttctttgcagatgcttcacctgctaagcaatttgaaagggagtacatagcttggcgggtcgatgaagaggctaatcaggtcgcaattggattggcacgtctaggcagtatgctacctgaccatcagaatcgggtaaaggtacacagctcaacccagtgtgactgtgaaatccaaagagaaatgaggaatggcaggctaccagacatcacagttggtgagaacctctccattttgccgatccattatgtagccacaagtccacaagtgctatttttgtgcattattaacgatcaccatatgctacaggtttgcctgttgaggagccaagctaataaggagtggagggccttgtcgtgtggaaccagcactctgatgctaaaacagttttgcctgtgtctggcattccaaatattctcaaatctgaatgtatgtttgaatggtccgatgaaaaatttaaattatgtgttctttggggaaatttttatgtgccttttgatagttcatttgcagattcaattgtagtttttggtatatcttttttttttaaaaaaaatctttctaccaggccagctgaagaattggctgaccaaattgtattaagagttgaagaatttacagtatgggaacattacaatatcgaaatgaaaatgtgaagacccagcgttcaggcgaaaaacctgaactccggaggagaaaatcagcccgtacggttatctcaaaacaactcggcctccttccaaacaacaatctcaaaatagcttcgaaaagttgcactaccgttcgtgatcattgatcgaaaatcgagcattgtgttcctttcacaccaaccagcctttatacaaagataatttgttctacgtatgcctctagctcgtccgaaaacacagtcttgtgctcagtcaccaacctgctagcttttaggctccagttcgctctcgcctggcagcagaaagcacacaattgtccatccttcgagcatcctccacactcgattggacggacacgctacaaacaggtgatggcactcttcctgcattgctcggcattcctgaaattagtgcgaaaaatgtaaacatatatagcggtcggaaacacatcgtttataaaaaatgattatcggtcgatctggaatttccatattttattagtttaactatttagtggcaaatgcagtatggtgctagaagaaattaaaaatagctaaatataatatgtggttaaaagtgaaaatgattagaaactatactatttttacataaacgatactcggtgagtcaagaatttcgctagcgtttttatccccaagtaggcgaaatgctgcagctgaagttgtaccatgtgccaacagtcagcatcatattatatccaagttaatgagggggtgtttgggaactagggtccctcttacaaaagtataagtccctatgatagggacttatgtttttgtgagagggactaaagtttagccccactttagtccctccaaccaaacaccacctgaatatctccaaaaataaaactcccataagaaaatcattactctcgctccaaccaaaaatatttaaatatttggtgcttggaacaaagttcgatccaacttttaaaattttgattatcaattttttttatagatatttagtttaaaaacaaaataaataatatacttggatttgcctaaaaaaatactaccataataccataaacttaatattaaaatgtactttttacggtaaagagatagctttattgataactgaacgaagggattagattcctgattcaaccaattcaaaatccgtgcaagcacacataatctcccctcctagcaagatcttgaattcgtcgtcgtttgattaagagtatgtactaccctcttagcttcttttcctattttgtgcacttgcactctttgaaagcattgcatcgcacctttcgtttcatggaccgtcgttgccccagccgatctcgagggattcttgttctcgagggattcttgttcgattaggacgcaacaacttcagcattgtcagttttcaagattagcggcgtatcatatgaatccatcccattgccacccgaagtcaaaatttacaaacacattctaatataaaattgatttttggaactataaaagcatgagcaaatctttatctaaacatcaaatatttaaaagggagcactacatttaagtatttaacggcaccctatctgtaacttggtgatggactaataagcacaaccataataataagggtatcaatcagatcataattttctttttcgttttatcttcaactaccgctcatctcatttaatgataaacaccaaagttatttccccccaactttattctctgctacacaaataaaaatgagatgagcgtggatcaaaggcagtactcgcttgccataatcgcgtgattcgagacatgctttcagcgttcagcctccaagcaaatcaaatctgtgtgattcatacacaaatcctttttcccttttcctttttgccgcaaggaagcaacaaaatatctctgacacactctgaaactgtgacagacttgacagtcaatggaactgaaaacgcaacccccgtgccaagaccattttcttcccacagtccactgcgcgagacgggagagacggccgcgacacaaaggaagcccaggagagacgcagacgcccgcccacaaagcccactttgcccatggcaacttccgcttcactgcctcctcctcctcctcctcgcagtagtagtaaccgcctcatcgcctcctcctcctcttcgctgcatactgcatactactgatcagctcttccgttctcgcggctccagatctctgcagggtgacgggggagatggcggagacggaagaacctggccaagatcgacgagtactccctcctgctccacatggtgagggttttaccttctcctctccaacttttttgatttgctgcggcttctttctcttcacgcggcggtcccgtggccaggcctgatcatggaggagttcgtgatgggcgaccacgcgcggctcttgtccttcctgcggctcgccacggagctcgccgtgacgtcgccgctcttcgcgaagctctccgcgtgcctctcctccgacgccgcgtgcctcgacggcctggcgcgcgtccgcggccgcggccgcggacgcgagcggctccgcgtcgtggcgtacaggctcggcggcatgcggtacagctgggcgccgcggttccgcctcgccttgctgctcctcctgcgggacaagttccccgagctggtcggcgccgtcgaggtggtggatcccaccgtggccccggtggagcgccgggccatggaggagctgggctgcgttgtcaccgcgtcgcctgcgctctgccttgtggtcgaacagccaactctgatcttcatgccctacgcggatcgcgtcttctttgagaatttgctcaccttgaactggaccccagatcagctcggcaagatcgtcgttctcgggcacagtttcagtgccatggtgaagatgcttgagctcagcatttcgaagcaagagaagtgtggtgtcactgagcagagggagaaggtgaggagggtactggcaattcagagctatgttcaggaattagagctttgtgctgagatatctggtttgttcgataaccctctcttgggagatgagtatcctgatgaattgaaccggtctgtctacaatcattcatcagagaagtgtatatgcatgcactgcattgcgcatattgagagggctgccatgatttatgctcttcccagcatcttttcagttcatttctttcagtttgatcctgaagttgatattgaacacttgataccaggttcttttgcagcccatttccctttttgtaaaagcttaacgtggtgcctacatggactatgttgtctgatgacttgttgctgctttgtttgatgcagataattgtgctacaaaggtctggagttatgtcaatgtccaaatgaattgtgatgctcagttagaagggtaagactgcatactgacaaaacaattaatttggaccagtttcccatgattatttgcttgctgaattctgtgaattttaagtaaacaaaatgatgctttggtttaaagaaatatttaatgaaggataactcaagcaaagatgattacaccattttaggcagctttcttgcgtgtaccctaaaaaaagggtttcttatgtaaaatgggctattttaccgtttaagtgagatttgcattaattatagtattgctacaatgcatgttcttcttttacttcagtgattatagtattggcagattgctgcagcctgcagcacctgtttgttgttttatcaatcatcgactatgtttctaggccatctgttttatgatttttcacgtgcgctaataattttgtgggatgtattttgtcgttcgctattgttgacttcacaaattaattccttttctaaatgaattaatcgaccaggtggcatttaaatcctagtgatgcatacattgaggacaagcacttacaggaagctaaaagcatagttaaagaaatgcatgaaactatttctgatgttaggagttctgcactgtacacaaagtttattgatcatgtgaagaaagatgagagcgtttcttctcacatttcaagcatgttgggagctcatgaatgcatccaattggttatttatggccttgggagctttgaatttgatgtgaagtctcaatatcagcttgccttcgctcttcttctaaaggcagataatatattcccaattggtgacattgaaatatatgatccagcactctctcctgctgatgtcaaagcatgcttcgacttgggtctatgagtgcttttggtgaatgagcaatgccaaagaagtgttaacaagcctacacttttctttgttccaggattgaaattcgttggaaatctcattgagtcaaatttcactgctaagcaattaaataagatcattctagtttcctatgggttcaagaatagtgggaaaagtatttctgctgcacttgaaaacaggagctgtggatttactggtatcaagggttccttagctttggaaagagacaggtttctttgggcaagtattaattatattgatgaagtaattgttttggaaaactttgatgaggaattctggggagtctctgaactgagggttgagtttcttgatgttgccgctgatgtggacatgaactcaaatgtgccaagtatgtgtgtttttcttctgaactcattttttttttcggtactcttgtttgatggtggagctaactttgcagggttgtctcttaaggaaaagtttttccttaactttgaattggaactggaatataattccttctttgcttttgagtaagacctcttgagacttaagggcaatatcttgctacttaacattcttcatttgattagtgtttgtacatgctgaatcaaaatttaggtcaataagactaattatgtaatgttcttgtgtttgtgttttcagtcgtgtcttatttccatatgcacctgaaagaaagaatgttgcgtccatttaaacaagatcaaggcgactgcaaggatgatgaacctcaattctggggacaggagttccagcaccgaatcccagcaatccatcggaatacttggtcccctccacccaagggttggatcaagctcaacttccatggcactggctgctccaaaaatcgttctgctggcatgggtggtgtattccacaatgatgaaggtgcactctcctacttcatcggttccttaggtaacgtggatcagactgtggctagtattcaagcacttgaacatgggctagaaatcatgcttgagcatcatgaaccagttaaaaagctgatcgttgagggggacgatctcacggtgatacgttggtgcaacaaaatctcttgcccacctgcaagagctcatgattcattcttacatagctactggtacatggatttgatgccgtgtgagggggctggtgtgcttgctgggtcatccaaagagactaacaatgagagtgatagttcttcacaagacgcatcacctgttaagccactcaatgactgtagcagtgagaatgataaagatgagtatgacggttctttgcaggatgcatcacctagtgaaccaccgaatgacagtaactgcgagagtggtaaatatgagaacagtgactctctacaagatgcttcacccgctgagctatctgaagtctgttacaatggaaatggttctttacaggatgcttcgcctgctgagctatctgaagtcagtaacaatggaaatggttctttacaagatgcttcgtcttctgagctatctgaagtctgtaacaatggaaatggtcaggatgaggacggatgttcttcatcttctgagtttgtgatccctcctggatgggctcaaagggagtacatagcttggcgggtcgaagaggaggcaaatcagaccgcaattggtttggcgcgtctaggcactgcgctacctgaccatgggataatggtacacctctcaaccaagtgtgactgtgaacatggaagagaaatgaagaaaggcagaccagacatcacatggtgagaagctcttcatatagttgattcattctgtagccacaattgcttttcttttctgcagtattaacgatcaccatatgttacaggtttgatcattagagagggccgttgtttgaggagcaaagcttgggctaacagagagtggagagcctttctcatgtggaacctgtcgctgatgctgttagaatttcaatggttactctcattgagaagaggatggcactcgagatggggcaattttctggttttcttcatttactaaacacaaaagccatgtcctcccaaagaggattggatacatatttatagctgcttgtagcagccatgcagccatgcaagtctaagagggtgctgtcctagagcatcccaacaaactgtcctagagcagagcatcccaacaaactgtcctagagcagagcaacccaacaaactgtcctagagcatctcaacaaactgctgtcctaactgtcctagagcatccaaactgaaagtagagatgctgtcctagaaagttgaaaagcaggaaaaggcaccacaagaccaagaccaaccagccaagacttattcctacattctccccctaagtcttgtgcgccgtcttgtgggaaagttgagccatcccgatccgggagcaaagctcaaggaacttgatcctcccaaggggtttggtgagcaaatccgcaagctggtccttggtgttgatgtagctcgccttgatgctcccttcctccaggtagcttcggatgaaatggtacctcacccggatgtgcttgctccgttcgtgaaaaacggggttctttgccagggccagagcggacttgctatccaccctgagctccaccgctccagtatctctgccaaggagatcactaagcagtcgagcaagccagagcgcctgggtcgaagcggcggatgccgccatgtactcggcctcgcagcgggacagggccaccacctgctgcttgattgactgccagctaacgaggcactcgccgaggaagaagagaatcccgctcgtgctcttgctggtgtcaatgtcgccggcgtggtcgctgtcgctgtacccgacgaagtgtgccttgtcaggacacctcgggtagtagagaccgtggtcgagagtccccgcaacgtagcggatgatcctcttcacagcctgctggtgctccgtcgtcggtcgctgcatgaaccgactgacgtagctgacggagaaggccaagtccggccgtgtgtgggtgaggtagcgaaggctccccacaagacgccggtactgtgtagcatccacttcctccgccgtgctgtcgcggctcagcttcagtctctcctccatcggagtgagagctgggttgcaatcggtgagcccagccagctcaacgacgcgcttggcgtaggcggtctgtcgaagcgtgatcccggagttgtcctggtgcacttcgatccccaggtagaaggagagaggccccagatcactcatctggaaggtggccttcatctcctccttgaacgccgcgacctctgcatccttggtgccggtgatcactaagtcgtcgacgtagacacccaccagcaaggcatttcctccattgccccgccggtagatggccgcctcgtgcgggctttgctcgaagcccatccccttgagcgtggaatccaacttggcattccacgccctcggtgcctgccgcaagccgtagagggccttgtgcaggcgtagcaccttgccctccttgccgggaatcacaaatcccggcggctggtgcacgtagacctcctccttcaagtcgccgtttaggaacgccgacttgacgtccatgtgatggacgccccagccttcctgagcagccagcgcaagaaggagtcgcacggactccatccgtgccacgggagcgaaggcatcgtcgtagtcgatcccctcctgctgcacgaaaccgcgtgccaccaagcgagccttgtgcttgacgatggctccggcttcatccctcttcagcttgaacacccacttaagggtgatcgcgcggtgaccacgagggaggtcagcaagctcccaggtgcggttctcctgaaccgcgtccatctccgactgcatcgcggcacgccatgccgcgtgtttctcggcctctgcaaaagaccgaggctcaccgtcgtcgcacgcaaggtgcaactgcgcctccaggttgcgaggcaccagtcccggcaccggctggtcgccgagaagatcctccatcgtacggtaccgtagctgctcgccgtcatggtacgcgtcgatgcgctccccgtcgtgggagagcggagtaacgaaccccaccgggctgcgctcaacacgagctggcgtcggagtagacgtgcccggaggagtggctgttgatgctggagcgtgtggggacaccggctggggtggtgtcgacgaagagctcgtcgtagtcgaagtcgtggcccgagggtgtgttggtgttggagtcggtggaggctcggggactggggtagacacgctcggtgaagaagagctgcctactcccccagctcccttgaagtggacgtactcgatggtgaagtcgtcgtacgtcggagtcgaaccatcatccaccgccttgtcccatacccaccctcgcccttcgtcgaacacaacatcgcgcgcaatgcgcacacgctgtgtctccgggtcgaggatgcggtaggccttcgagccctccgcgtagccgatgaacacccctggggtgctcctgtcgtcgagcttgccgatgtggccaagctccttggcgaacgcgaggcagccgaagacccgcaggtgggagaccgccggcttgcgcccatgccaagcctcgtacggtgtcctgccatcgagggccttggtaggcgagcggttgaggatgtaggcggccgtcaccaccgcctccccccagaagatggccggcatccccctctgcttgaggagggcccgagccatccccacaaccgtctggttgcgccgctcggcgacgccgttctgctgtgggctgtacggcgcggtgtagtggcgctgaatgccctcatcagcgcagtacgacgcgaattcagccgccgtgaattcgccgccgttgtcggtgcgcagcacgcgcagcttgcggccgcactccgcctctgcagcagcctgcgcatgcctgatggcgtccgcagcctctcccttgatgccgaggaccatcacccacatgtagcgggagaggtcgtcgacgagcagcaggaagtaacgtcgtcctcctggtgtggccggtgtcactgggccacacaagtccccgtgcacgagctgagccgctccttggctcggaagctcgtctgctggggaaaggggagccgccgctgcttcgtcaccacgcagacgtcgcagagctgctccatgtggtcgaggcacggcatgcctcgcaccatctccttggcactgagctgcctcagggcctcgaagtggaggtgcccgaagcgctcgtgccactgccacgcctcgtcgtcccgacgagcggcgaggcaaactggttgtgcgacctgcgcgctgaggatgtagagtcgattagtgcctctggttaccttggcaagaaggcgacggcggcgatcccaaatcctcatgagtccgtcctcgaccaacacgcgtgagccgttctcatccagctgtcccacgctgatgatagaattcctcaacgcggggatgtagtagactccggtgagcagcctgtgctcaccggacttggcggtgaaggtgacggagccaacacccttgatctccacgccggaggcgtccccgaacttgacggagcctcggacgctggagtcgaactcggtgaagaactcccgtcggccggtcatgtgatgggtggcgccggtgtcgaggtaccacccatcagccttgtcgttgctggagccgtcgcagagggagacgagtaccttcggttcatcaaggtggaggaaagccgctgcggccggtgccgctggaggtagctcgatgcttgcgtgagctaggagcagagccggctcttcctcctccacccatgcgacgtgggcctggccgcgtcgtggctgtcgacagtctttggcctaatggccaagcttgccacagttgcggcaggtgtcgtctcgtgccggcttgtggttgccggtggcaacgccctgggcgcctctgcgggcgccaccctcggcacgtcttcgcgcccaccgtagctggacacctccccgcgccttgcgcggcttacggccgcctgtcggggaagatgactcccccttcctcccgtcaccctgagaggcctcccactgctcccgagtaagatggagcttcccgccgatggtgatgggccccgagagaggctgtggctcatcaccatcaacgaccttgaggcgacctaacgcctcctcgatcgacatcgtggagaggtccagcagagattcgatcgagcgagcgatctgtctgtacttctcagggacgcagcggaagaacttctcgacagctctctcctcgtcgtaggtgtcgtcgccgtactgcaccatcttctgcaagagagtgttgagacggagagcaaagtcatcaacatcctcacctggcttgaaggccaggttctcccactccttgcggagtgcctgcagtgtggacttgcgggcgcggtcgctgccgatgcgtgccgcagcgatggcgtcccaggcctccttggcagtccgcttctgggaaagcgagaactgcatctcgggcgggactgcagcgatgagggcatccagtgcccgccgatcctcgtcgtagtcgacgtcgccgtatcggactgcctcccacatgtgccgcacctggagcctcaccctcatcaccgcggcccactcgatgtagttggttttggtgagggtaggccacccaccgccgggaccaaagtccctgaccaccgtctggacgccgtggtgaccatggcgccggtcaggggagagagagccgtgccgcctgcgagggccgcgtgcgggctccgggctgccgccggcacgcccgcgcccgtctgggttcccgtcggcgggcgcgcggtcccttgggccgccgccgccgccgccgtggaggtgggctgctgcccaccgctctgctcgctcccgtgcccttcctcttgccagctcctcaagctccctgtcggcggtgatgtcaccggcgatggagccgttgatgctgctgcgcaaggtctcaacctctacctccgccgcacgtgccgcatcttccgccgcctccgcctccgcctccgccctggctgctgccaactccgctgccgccagtctggccgccctcgctgctgctgcagtggtctgagccgttgctcgcctgcgctcttctgctgcggcgagctcggcgtcctgctgacgccgagtgctcaaggcgaccgaacgccgagaccgagcgtcggacatggcgcacctccggggggctgctgtgtggagagggggaagggaaaggggaaggaggagcaaccggtgctgctgctgctgctgctggctgagagctcaaccgagcttgggaaggggtggaacaagagatgtttagcctacaggaaagtgtggctctgataccagatgttagaatttcaatggttactctcattgagaagaggatggcactcgagatggagcaattttctggttttcttcatttactaaacacaaaagccatgtcctcccaaagaggattggatacatatttatagctgcttgtagcagccatgcagccatgcaagtctaagagggtgctgtcgtagagcatccaaactgaaagtagagatgctgtcctagaaaattgaaaagcaggaaaaggcaccacaagaccaagaccaaccagccaagacttattcctacagatgcaagaagtggtggcgcaatccttttgtaatattttgcagattatagtatgtctatgttagcatgttacctgccatggattcataacgatgagaaagaaccaatgatgctaatacaacagatccaggattgacatctgtttttttttagtcacctgtgcgtgagtatctccttgtgtatttgcagcttgtgtgacttgttaatataaacatgctacaacatcttggtttttttatttcagatgaacagtgggtttaaactttttactcctttgctagtagaaagtggctttgattctgcgcggactagctgcagcctgcaggttataaccctgacgtcacgctatgttgagctcccaatgggcctaacataacggcatagtgggccgttaacgggcctcgtacctgtacggccgaaacggatcggagtagcaaaccaaaggaaaaagtacacccagggtctctcaacttgtcattgggttacaaaatcatccttgagctgcaaaacccgatatacgatatacgacgtcctttaacttacaaaaccgttcactttagtgcatagacggttttgatcccgggctgagtcaacgtggaacccacgcgggccccatatgtcagtataccacgtcatcgccctctctccttcccctcctctccatttctctctcttctctgtcttctcgcaggccggccggcaggtacggaggaagccggtggggcgaagcgggagaggaagagagcgacggcggccggcgacgacgcgggagagtccacagccgccgtacagcgagggggcggggcggcgggagaaggcgaggtgggggcgaccgcgacgcagagaacgaggcgagctcggaggtgcggaaggaacgccagtagacggctcgggcaccggcgatgctcgcgaccagttgaatgggatggtgccgcagccagctgtgggcgccgcggtcgacggcggtgcgcactgctctccgtcagggtcgacggcgcagcgcggcattgggggcgccgtggccaacggcggtagcgcgcggctctccgtcggggccgatggcgcggagcggcatgggggccgccctcaggaatgacgccgccccggatccagcagtcggcggcggcaaatgtggcgagggacagcagcaagaagatggatgagatggggaagaaaagatggatgagatgggaaagagaaagagggacgacgccgccctggatccagccttctccgctcgccgccgcctcgctggcttcgcgcgccgccgctccgcctcatcgtcgccccacttcgcccgccgccgccgccgccgccccgctccatcccaccagctccgtgcgccggcgctccgctgctcggcttctcccatgggaagatgaagagggacggcgccgccctggatccagccttcttcgcccgccgccacctcgccggctgcgtgcgccgccgctccgcctcgccgtcgccccgctccatctcgccagctcagtgcgttgccgctccacttgctcagctgctcccatgggagagagccgatagacacacagaagagaaggaagggggaagaagaggctaacacgtggggcccacgtgggtcccaagctatgtcaggtgccaagtcagataaaaccagagtgaaaaccaccggggatgtgttgtatctggttttgtgtggttcaaggacgattttgtaactggatgccaagttgagggaccttcggtgtactttttccgaaaccaaaaccaaacctccaaattttctcaaaaaaaaaaaaagaaaaggaaaaagacaaacaacctccggggcttctgctctcgcccctcgccatgccaaacacggcggccctcgctggcgtgcgcggaacacgaacctgaggccctgagctctagcgcggcgccacgcgcgtctgcgtggtgtttcgcactcccatctccgaaatccgcagctgcgcacggccttgcgcgcggttgcaggccaccgcccgccgctaccaccctgcttgaccagatgcaagctccatcttcccagtgttcaaatccgtaagcactgctcaccaaatctcagtatcaagtctcaagcattcgttaaaatcagtgtgcattcgtagacccagaagtctgggattaccagtctgtgctggtcaggggacgcgaaacagctgttcgacggaatgcctcaaccagcaggatgttttcttatctgggaatcacaagctaaggtagtgccatttttctgtaaattaatcatttacgctgttttgctattcataggttttacatgcaacatttagaaaattttacttggactacgaagcaattccctgccccttgctgagttgctgtggcgcggatacttcaggtgtgtcgtggggaatatagccatgtagaatgtagtatgtcttcaggaaaattagtagctacccatcctgtgcattgccgttgaagacttgaagtgctgcgattgttgtgagtactctttggttagcttagagaatgtagagtcctctctctggagcagtttggtgggggtgtcgtattctaaaatactacctgcatagagatatcagatttaaagagtgacgtagctgtgcaacatgatattctgaggttgttttagtattgtagtggtatacctaccttcaccaagaacaagaataaggtcactatcaataacagtgttcatcctatgggcaattgcaagcactgtgcaatctttgaattcttgacgaattatctcttgaataatccggtctgtagcagagtcaactgaagcagttgcctcatcaaggactagtatcttgctcttcctcaggagaattctgcctaaacaaaatagttgtcgctgtcccatgctccagttgtccccattttcaattactgcgaatgaaatataaattcatagtagcataagtatttcagaaaaactacatattaacatgttcttttcctaaaggactcattgcagtttttttgtcttccttcaaaagtttaatgctgagcagtacctatttcatccagctttttctcagtcgagcgcaccacattgccaagctgacacttgtctactacctgacatgggtagttcattacttcagaatgaaaactactgttgatctaccctaaaattacttctagtttgtatgcttgcttttgaggtcttattcatttactggtggataggggtcgcaatctgtaccatcttcacttcatattgttgtcgtctattcacgcttacccattttttttgctttatatgatttgtgctatttatggaaccattgtctatacaaatagaaaagctttgtcatatattctagttaggatgtaacatgtaagttttctgcacttacctcccatatcctactatctgggtactcgttcatgggatcaagatttcctctgattgtaccatcgaacatcaccggatcctgtgggagaatacatattctcgatctcagatcatgaagtccaattttgcagatgtcgatgctgtcaatcttgatggtcccttctcttggctcaacaatccgaaaaagtacttgtactaaggttgacttcccactacctgtgcgtccaacaatacctactgttttctcagctggaatcacacaagttatgttttttaatactgaagggagatgttctgcatatctgacctgtatgattaaatgtgcaatatcattactgggccaactaaagggtgtacacctctgatacttagtatgaaataaaattattatgatcttctttctaatcatttagaaccatacctctaagttgcttatgcttatcatgccaaactctggccatgccattggtggcttgctaccctcggttatggttggggcttcacttggaagctttgtgtactgtaatattctttcaactgatatcatgtttgcttctgcacgacttatattccgggtggcttctgataattgtgtattcaaattccatgcatacatcactaccagcccaccaatgcctgttttgcagcaagagaacatcaacccttataccagaaaaaagatatttatccttcaagtttgaatgacggtagaacagcatgagtttacgttcaattaaattcatgggtccgaacaagtcaaaacttacttggattaacaaaaccttgtggaagacgcacaagcaaaaccaacgagaacccaaagacaaagttgcataacaaattcattctgaaagagagccattctactgcagccatcaagtgaaaccatggtcttgaatgattgtcaagtagactcagatttgatctgtagaaccggtcttcttggcgaaatgctcgaattattgcagctccatagaaagtttccccaaaatgatgaagaattggagccttttgaattcctgataggcgagctaattctgttgctgttagactgtaatatctctgcaggatattatgggagatatgattcattctcaataggcatattgtgtgtactgatactattttgaatctgactaagttacagttaactcttacctgatacctgatgcaaatcaatattgatggaataaaaataatgagaactggccaggaaacatatgatatgattagtattgttcctagaaactgcatcactgaaaatgtgctctcacttaatgttgacgctgtctccaaatctagcacactttgatcaatcgaagcctacatgaacaatgcaaaaatcatgtattagcaactcaggtaaagcgacatacacattacactttcctgtgtaatgcagtatatgtttacttattttacatagaatttctttaggatttattttacatagtttacacttctgagacaggagaatggactgaccctgtttaagattcgccctgtaggtgtcgagtcaaagaaagacataggagcatgaaagatgcaatgcatcatgctcttgaacaatttttctgatgtgaggaggccggttacagctacaagaactgctcgaatcaagatacacaaggcgctgccaactgatataaatacatataccatgaactgggtggattccatttttgatttgcttccagttcgtggatggcaagctgatgccatccaatagttgcttcccacttcaaatatctgaaagaagcattgtgctgcaattatcataggaatgaaaagaccacctcgagcagctgtgaggtatgaccaatacacttgcttgctaatgtatccattctctctttcttcaccctgcagcaatttcccttcttcagtgttatctctaaatacttcttgtctgcaatttatcatatttgtgttttgccatttgctgctgatttccttttctgcatcggactcattgatgcttggtaccttttctgattctgcatgatgctttgacaaatatatgcttgtgccttttgcgttacaaacttgttcgacggcacaaaagtgagccccaaagataactccaaaagccatgttctgttggagttcttgaaatttccctgcttgtgctatccttccattttgcatcacctgcaatattgcttcaaccagtcaagttaaacatactagtttcttttctgggatccttatgagttattgagaggtagtagtatctcctagtgtggatcatgagaactgataggtgtagctactgaaagttatacaaaactaacactaggagatacctctacacctcaagcctgcaaagggctgtaaattctctaaaaggattcccatatgcacagcatgtttttagcagtcatcattatttatcctaatgttcagtacaatcatgtctttagtttttttttcaggggcttaccataataaggtctgcatcaactagaaattcaacttggtgcgtgacgtataacacagttttatcccttaggacccccatcaggcatttctgcaaaaaatgtatagagccaatgttaatggttatgtaacagggcttctccttgccagtaaaaatatagatatgagcaatttattttagcgagagaaataaatatcaataataatatggacaagattattgaataatcacaagatctcaaatatacgatgcccattgtttgtcctagagaacatgatgacttcttttaactatggaaaatttgaaaccatcaaagcattatatttttgtgaccctggtgttattttcttttgttggctcttaaggggaaaaggaccttgtatagatgcctcccagtttgagggtctacagcactgaaaggatcatcaaacaggtagacatcagcatccttgtaaactgctcttgctatttgaatccgttgcttttgtcccccactcatagtcgttccccgttctcctatatctgtcatatcaccatccgagaaaactccgatgtctttaaccaaggcacatgcttcaattgtccgctcatacctatcagtttcaaatgggctcccaaagagaatgttttctctaatagtcccagaaagtatccatgacgactgtggaacatatgctttggttccaaagaccttaaccgttccttgcacttttggcatctctccaagtacacatgacaacaggctagattttccactcccaacagctccacatactgccactttcatccctttgtgtatctttacatgtatatcttgaagtgttgggatttttgcatcagttttccaactgaatgctccctgatcaatctctgcagaaaattcattttcgtctattgctacttcctcaattgcatcagatcttatttcttcttcttggagatatgacactattctgtcagctgagatcttcccctgtgcaaaggcagtaagcaattctggtagactaaagataggctccttcagtatattcacagttgctagtgtggacaacactcttccagctgttagagggattcccatcagaatgcatgaagcaaatgtcatgattgatatgacagcgggtgctccccagaacataaatgctagtagtgcttttagtcttagaaattcccacaaccacaaatgttctcctttcctcaaatattccaatttcctaaggtattggatatcccaagcttgaagttttaagatcttcatgcttcttataacttcagatgtcatgtccattctgtcatcttttgctttcataattcctgcgtgcaatcttttctggattcttgtaaaaggaatattgcaaagcattattatggctgttgttgctattccagctaaagaacccagaccaagatttttccaaagaatataagttgctagtgtaatctgtataggcatcatgaagaccatgttcacataccatgcaacattaacaatcctctcgatgtcaacactcacatagttaattatctcccctgaggtatg

SEQ ID NO: 8644 - DNA, 1332 bp, Oryza sativa
caattacctagcccccagccgtgaagttggaaaaaccaatttccaattacacggcttggttaatacgcattatggagcactcttacatgaccaggttttacatggtcgtttggctctttaggatctgacaagagcttatctgctctgggtgtccccagccgaaattcccttaggtttctcggaggcttgtcagactggcgtaaagggacaataatttcgatgtcaagagtaggtgttatcgtggttagggatctctggacaaatattgcacatataaacacttacagaagatgacgtagatgatgagataaccaccacactaggcaaagcccaggcgtatagttgtacccaataaatcgcataggtagtgggagaatcgctacatcgttggcagaaaaccagttgtagtcatatctcgaccactacgacctactggttcaagaaccaggagtaggagtctctcaaccgtttgaaattgaggtgcgaggactactacgctactggtcgaggaccagttatagtcgtaactcgacctttggaagtcgtggtacgaggaccgctacactgccgatcgaagaccagtcgtagtcgtacatcgaccatcagaagtcgtggtgcgaggaccgctacgttgccgattaaagactagtcgtagtcgtacctcgaccatttgaagggaatcagagtaatgtatggacgacattcccgtgacttgcgagaacaacctcctgatgaagacgaagacaatgaggaattatcgtagtcggaggttcggctcctgtacctactacctcatcctcggaccctctagaagtctggggatctcgagtttcgtcgtcgtcgtgtgatgtagttaaccgtgtccgttgtcgtcctgatgtcattagtcctcgacattgtcgtcctagtgacaacggcgatctagtcagtcttggttgtcgttatcacgacaatgctgattgtcccgttagatgtcgagagcttgctaaccgattagtcgaggaccaggagtaggcgtatcttgatcacctgaatatgaatttttaggtggtgagagatcgctacgatctactggccaaggaccaggcgaaggcgtatctcgatcacctaaagacgaattttcaggtggtgagaaatcgctacgatctactggtcgagaaccaggtgtatgcatatctcgatcaccttaagacgagattttaggtggtgagagatcgctacgatctactggtcgagaaccaggtgtaagcgtatctcgatcacctatgaagttttaggtggtgagagattgctacgatcgactagtcgagaaccaggtgtaggcatatctcg

SEQ ID NO: 8645 - DNA, 7974 bp, Oryza sativa
aattgcttgatttatcgtacagtagttcatcatggaaccctgtttagtgtgaacgcagctgtctctagagcgtaaccccaaaagcttagcggcatatcagtttggctcatcattgatcgcaccatgtacaataatgtacgattcctccgttcagacaccccattccactgaggcgttcctgtcggagtgagttgcggaacaattccacactcctttatatgattgccaaattcaaggctcaagtactcttcaccacgatcagatcatagatacttgattgtcttgcccaaatgattttgtacctcattctgaaattccttgaacttttcaaaggactcagacttatgcctcattaagtagacataaccatatctactaaagtcatcggtaaaggtaataaagtacccaaaatcacctctggcagttgagctcattggtccacatacatcagtatgtactagtcccaatagttcacttgccctttcactttgaccctgaaatgtgcctttatcattttgccaagtaaacaagattagcatgtctcaaattattcaaaatcaaaagagtgtagaagtccatctctatgaagcttctccatgcgtttctcatttatatgacccaagcgacaatgccaaataaaagtgggattcaaatcattaggacgttgactttttgcattaatgttatagactgaacatctttcaagattcacaatgtataacccattcatcatgggtgcatggaaatagaaaatgtcattatagtagactgaacaaccattgtccatagatctaaaatcataatcctctgcttgcaaacaagaagcagagataacgttcttacacaaaactataatgcaataataattatttaactccaaaactaatcatgaaggtaaagataatggcatagtgttgaccgcaacagcagcaactcttgctctattgcccacgcgaatgtccacttcgcttcttgctaagctcctacttcttttcagcccctgcaacgatttgcatatgtgagcaactgacccggtatcaaatacccaagaatcagtagaggaagtagcaagattaatttctataacattaatacctaaggtggaactcttaccatcctactgcttctgcttgagctgctctaggtatttcttacagtttctctaccaatgatctgtctccttgtaaaagaagcactctgtatccttagcgggccctgtcttttcaaccttggtcttagagttgctagtactcatgatctcatcagagtttagctttctcttttgaccactcttcttgttgttgggcttgcacttatgcataaccatcacatggttggagtttttcttgatgctttcctcggcagtctttagcatcccatgcaattctgccaaggaactgttcaagttgttcatgttgaaattcattatgaacggctcaaagctgggagggagcgactggagaatcaaatcagtagccaactctcggctaagaggacaaccaagcttatccagactctcggtgtaaccaatcattttgatcacatgtaggctcactggattaccttctgcaagcctacacgcaaacaaggactttaaagtattaaacctttcagctcttgcttggtcctcaaacatgttacgtagtcccgtgattatcgtatgagcatccaatgcctcatattgcctttgaaactcaggggacatagtagcaagcatgagacagcttatatcaagataatcattgcatcgcttttcatgctcgctacgttgtgcaacaggagcattgttgggcaagtcagctggaaaaggctgtgtaagcacaaactctttgtgctcttgtctgagaacaattcccaggttgcaataccaatccatgaagtttgttccagtcaactcctctttctcaagaatagaccgcaagttaaaactggatagtgcaggagctgccatgatctacaatagaaatatatgtatgcaaaatcagcaccatgtctacatttaacctttcattaaacaatttaacaaaagatactcccattatgtattgtgaaacgaaattccctctagtaacatagtgagtcaagatcatcattttattagtgtctagtgagctttggcatcacagctagacaactatcaaaataggtaagcaacaccttgctaatcacatcatatgtgactcttatgctgttggggtgacatctccatcttcaacccaacctatgccccaaggtccaaaaccgtttcgataaccttgtcaagtaaaccaataatctccgcatatagatgtcagacatctatcctattttatcatgataaaaagtgatactttgctatggcaaacccatcacttatgatcacaaccgtaataggtgtaattattggaagagcataaattacacttaatttttctgagggaatcaatcctaccatgtcatatcaaatatacaacaacaataaagtaagatagatataaaaccccaagcaaaatctaaggggcaacgcacacggcggtcccgctatgattcgccatgtgaaaaccttaacggcgtaatcaaattatgccgaaaccgagtcaatctcattggctcgtttttctcattggcgtgcggttccagtggacatcttactacccgatgaacacaatcacgctcggccttggtgagtactagacattccagtgaagtcaccaacacacataccgattgatctcatcaacccatgcggctattggttcatctcatgttccgatcacctaagaactcatatacaacataatagatctcaactactacacccgcatatcaattatatgcagtgatctagatcataaactatacaaggaggctctgataccactgttgggatacgcgtaggctacgatagcataaatcaaaattttctatcgcgtaaaccaggaaccatgcaagtattagatcatagatcgttaccactcgacgcgctgcgcagaggaaaaaggcgttaagaagtcgaaggaattctcgcgaagtagcgcgcgtcgatgtagaggaagtagtcgatcgcactagctcgaccttctcctccttgtgtgttctcctcgccgtactcccacgccgatcagcaccgcaaaccagcggcgcctctactagtatccacacgtacagggacggaacgccacgcgcagatgtgctagcacccgcgtgcggctagggttttgctcagggagggaagtgacggctagggtttctcacgtgatgaaatatctccaccggtcacacccctcacgaatatatataggatccatcactcgggcctccaaggcacgtaggactcctattcggatcccaatccaaattaagctcatattgggtctccatccaatccccttatttcggcccattaagcgtgcgaccctgtaggttcatgtatactcggctgtaacttggaaactccttctcggtccacgcgccaatagcggcccctagcagaacgtattgacccaccgggcatacataaagatcatatcgactgaacctctagtgtatacttgtataaacccctttgtctcacgatatcgattaagctcaaggctagatatgtgccatcctctaatagctcaatcattcactcgaacctctcgatagattatataacttgtgattgactccttaatcacctttggcatggccatgcgcttccataatctacaacatcgaggggcccagagatatctttccataggaggggcaaatcccatcttgattattcatatcccaatacatgtttcatagcatactcgaaaactacttttataactatccaattacgaagtagcgtttagcagtccctaagtaagctactacacatgttgggaaccatgataatctcagtgtctcatgtttggtctatcaaacaacatgttcactaacatgtctccacattgttaatttggtatctatataccatgatccatgagacatgatcatcaattaatacatgtgctgatcatctaatcatatttgttccacatttgatatttgatcaggaatcctttaaaaatagtaacaaacaacataaagagtctcatgaaagaatcacatatttattaaccaataatgagtttatctatttcaaggaacaatgtcggataaatatgtaaacatagtataggatacaatcatctctatgattgcctctagggcatatcactaacaccaccatccttacctccaccaaccgccagcctccccatccacgctgctgcgcctggcagccgccgtcgcgccaagccaccgcgcgccgcgccctgccgcgccaccgaggtcggccgctggccccgccgtgcacacgccgccctcacctctctctctgttgcacatggagaagaacgagagagagagcagaccaggaagagatgagaaagatataagagagaggagaaagattaagaagaggaaataaaggagaatgagacttacatgtaggacccacagtggaacccagtcggttgacccctcactcctcttgacccacaaaccctagtgaaagtctatattggcccccttttactttagtatccttcatttaacaatcagacaaagcccaccgtagccacctcatactaaagcccacataccacatcccctatacaactcaaagcctctcagaaagtctaaaccacctcccttcccgagaatgctccctcctcggtttataaaaccttccaatttcgaaaattcatatctctccaaccgtaactccgattgactccgttcaacttccataacctctctaaaatcgagatctatttaatggcaccattagttgtattgaatgttgttttattttatttcttttaggattgtgcgtggatattctttggttatttattggacgtgtcggatatttatcgatcgcgggtattctagttgtccaactgtcacagacatctcgaagacattaggaacctatagcaaggcaagtccctacgctccattccttgaacatattgatcctacatttacaaatgtgttgttttacaaataaattgcatgctatttataaattgcgtacctacatttgattatagcctgccttgatattgttacccttgtacatattaatgtatgcctttgaatacccaattcatttatttatatacggtcaattattgacaatgcttagcaatgctattgtagacatacgtatactccatatttaagctagatgattacggatgtgagatcactcgatgtgagtgattgatgatttgcgggtggagacatgagcgccacccgccacacacaaaccttttgtgaaaaccaaaatttaatacaacaaaactattttgactggggcagcatgaatagaatatgggtgggtctggaaacggttagtcgccgaccctggtcagttaaggaccgagtcaggaagctatacaggaaacgaacagagtacgaccgcatttctcaagtgggtatagaccggcggattaggaagctctcgtggagcggcacctaaatcgggtaggttctatatcagtgtggtgatgagtacagtgtcggaaaggtaaaggcctagatatgaacttaaaatgaaccctataaatatatatagtaaatatcccctattccgtggagcgccaggactcccttcaccatccagcagtaggggtttggagtgctggggtgcaatgggggttcatagtccttggagcaggtgccgaaatgcgagagcaactgaaaagtcgggccgtggcaagtctcatgtgttgggactaggctcatatgttgggcaagccgcggggtgcgggattaaaagcgtacatccgctgcagtgtgagtaaaccaatctattcgaatagttgtgctcgcggttaatgagcgccgagacctgtagattttaatactgcttagagtagatatgggagagatgtgaaccttgcccaaatagtgggaaggttagtatagtagagttggtataagatgaaatgtgagggtaaatcgaaccaagcgaggcttggagaggtggatgaaccctggataattacaacttcaacaatagtgttgtttttcagttaaaactgctaggtcaatagatttgtgaaatgaattgtgaaaactagctttatgcaaatgaactaagccatccttgaaccactgtgtgcattagattcattttgtagtggtggcttactgtgtactcactcttacttaattaaatcttttagaaggagttggcgtcgattagatttatgccatgctgctgtcaagtacgtgttgaagatgatggattagggaccataggttcaccagtcgttgcttgtggagttcgatggaccgccgctgcttcgctttcccgttgttttatctattactttggtattttgtattgtaagtgaccatgcttggtctttttcgggacccaatgaggttacccttatattattactgtagaaacaccggtaaacgaagtcagttgtgatattatactgtgctatgtgtgtaccacctactgatccagggagtggtactgtataacacatgggattaccggtgtataaaaccgggggtcccacagatatagggtattatttacttaggtaatgttataaaatgtttttgctatgtgatttttattagatttgacttcacataggtgtagagatgtgttttctaggacttgcacattttggtttcataatttttagagttattatgaattccttatgtattttacaagttatagcgtgttacaggtgaatagttttttgtattcatatagttttgggacaatatgtccagaatgttttgcttcctgttttagttgcataatgtgaatgatttgttgaccaactaatttttattttacaccattgaggcttttagtattttgcttcgcattttataatttaggggtgctctaagtttgtaactcaatatatcaacctaggaatattgtatgtgctgagtaccataaattttggtaagagaggatggtgttgtagcttttctggttcatctaggatttatttgttttatttggagctagggtgcattctatataatttgcttaactagtaatatgtgattagcactcagtttattaatttaaaatttagagatatatttgtacagaaggtgccacatttcattttactgggttgaagctcactacttgctggttagatagaaatttagttcaatccatttgaatctaaaatgatttttttttacaaaatttccaagtttaagtgtgcttatgttgattgttccttatatataagtttaggggcttttcatgtactgtaagcggatatttctattttataaatctgaaatgcacaattttttgattctacagaacttgagttcatttaaaaaaggagtcaaaatggattttatacgactttccaaagttcagcttatctaaaaccaattattttgtagataatatttttagaggcatttggtgcaaagtaagtatatatttttatttctccttaccaaagagtgtatgttagtgaatctgtagaatttgagtttgtcccaaaatgggttaaattaaattttctatgtattttataagttcttacatgttttatgtttactttttcttagataagttttagatgtagattttgtacagtaaataccactttttaagttgtaacattaaagctcatcattttgtgaatccatagcaactggaatcatctcaaaatgatgtttttttattttatatggattttacaagtttaggtgttttcttgttaaaaagtacatgtttttttattttattttatattttcagattttaaattcccaataagcaaaaaggtcccgcaggtttcagggaatagatcccttggtccaaacacgtgtggaaagccaagtttattaagagtccttgagttttaatgtatttataattagatccatggtcccacatataagtctaacacattttacacttcaaaccttgcatggggc

SEQ ID NO: 8646 - DNA, 12721 bp, Oryza sativa
agttcatcaacaaattaatacgatgacctagtatagatttgatggttcgatttggacaggaaatttgtaggaacaatactacactttcaagtttcttcttctcccctactctatcaatatataaggcaatcttcttgcctttccttaaaaaaaaagtttcttcttcatgctgacattttggaatgtcaaagcttagtgattaagtaaactaaatacttggcacattcaagaatgtatcacatgttaaccaagagcattctgcgtgagagcttaatactaaaatctataaaaaaataaacagggatgagagaagaaatgtgggagcacctatggatcgggcgaccgatctggggctgggaaattgggcgctgaccaaattactttaaaccgatttttctcttaaattacttatccaaatcatgatccgattgcactattaaattcgttgcaattaaatcttcaaaacaaaaccacacatggatatattccgacgaaaaaaatagcttattattgatttttttaaatgttgcatgatgtttcatcaggtatatcggaattgtctcactaagtaaatcgaaaatgtttcactcgcttaaatcgggtgttgttacaccttatataaaaacaatgtttcagcaaatagcgaaagaatgtttcagttcactgcaacattagatttataaatagtgaaacattgtaattacactaagtgaaacatttttcggtggaacaaaaaataaaccaaattcccttaatagggggtttctaaaatatgtgggttttttgttgcaatggaatatttcgttcactgcaacattagatctatacatagcgaaacattgtgactacactaggtgaaacattttttatggaaaaaaataaaccaaatttccttaatagagagtttctaaaatatgtaggttttttttgttgcaaaagagtattttaattcactgctagctatattagatctatatatagtgaagcattataagtacactagttgaaacatctttttgtggaaaaagggagaaagaagtgggtgggccaacaggtagcacgtgggccaggggcgcgcgcggggcgagcgcccgatccgtctccctccgtgccgatcgactggcgacaagcattatcgaagaaatgatggaaacatggcatgatacaaactaataaaaataggaaaagatacataccgtataggaaaaatccttgtgtccaactcgatccaataattttctatgcagatcttatagtgaataattaaataattgttctacctttgtccaagattgtatatatatccaatgacgtcctagggtcctgtagcaactcgtttcaaggccaaagctgcctataactgctaacagataaatccatgtgcctgtggataagtgaatacaaaatttaacttggtatttccttgtgattcatcatgcaagccccaacaacagagacctaaaatcaggggaagtgaatgtaggtattttatcagaaactttccgaacaacaaaaactggcatacaactgatgcaagtgcatttgggcattttatcaaacacatagtgcacatataattggttagtgtgcgtacctgtgctaaacggcagaagcttgtgtggatccaagcgatacaggaagagggaaagggatcctctgacttaactgctgtgcagttgagtcactgatatgtgggccatagcaaagtgggacccacagaggatctgcttccaggaagaagagtttgtccagcaacgcgtagttgatctatgggggaggtgaaggcaattgattcagagctctcgaggtatattgcttgatataggagcatttgaaagcggttatgaagaggattcttattgctgatttactttgagtcagaaggggaggagtcctggcgatgcggcagctcgagctgcgcatggtagcaactccctcgcaacccctgtcaatgcctcgcttcctcttgcggcgctgtgtagcatgtgggatggacggggctatgtttttattcttttctcggagaagcggaggggcttggtcaacgagtagcctaggctggcccaatattaccgaaacattcatctgggaaatctgcaggacgatccaacggctcaggaagtgacgtggctcaatatggtgcaagctttatagtaataactgtataggactatataggaagaagggatttcatgcatttcccttcctttaatatattgttgccctgtaaccttgtcaccttcaattgtaaatggttaggatggtttattctatcatcgaatgcttagccgtgcttaggtctacttttgattcaccacccgtgatttatgggtattaaaatctgattacctcactcaatgattaatatggaaacatgctttaacttggacgggtgatagggcgatgacgggacggtgattttccctgatgcaagtagcctcgtctgggttgttaaggaccgaacatgttgacgtatattcaagcaccatacgtacttccacacgccttatttggggccggcttgtctgttttcaagtttataggatgcaattggaaagcaaatatgcaattggaaagggaaatatgcaatgtgatacaagttacctcagtggggagagagatgtctccccccaagcttggctttcgctcagggtccttggtaaggattgaatccctgaaagcggaaatatgcttgaaggtcatcgtgttgttgctgcatcatgttgttgatgttggcaaattgagcattagtagtctgttgtcattcttgtgtctgagctatgtgttccgtgaggttgtattggatctcccccgtctgcacatcaagggtgtccattctcctagtgatttcacccaagtcccaacgagaggaactcgagcgccattcacttggacatggaggtactccacttgatctgggaggttggttgtccccccactatatgtcatgaggcgcatgccaccggtcctcactggcacttgcccagcttgagacaccgatgttgtggcgtggagcttgggtccatccgagtgcatccccagttggttcccaacctgcctcatataatctgcacgggtgttgaggatgatgaactttctcgttcgttccttgccatgttgtgtgtgtccctgtatactccacctgcatgagattcttctatggtctgcaggggaatggttagctcacggcagttgtacaaatgataccccgcatttggtaacgggatttcattttgtcacgaccggaattaacccagcgggcattccatacgtgtgtgtattactccttgtcccaggaggcaaggtacaccaaaagttgatacaattcagagtttaacaagcggaagcgtaaatagttaatttattacatgagcgatgaaggcccagcacacacgaagataaacgagaaacagcggaagactagggcgacgaccacaggcacttgacggcaggcacgagctagacaccaaagccttcatcctccaggaactcctcttctgggctggggaaaaattaagcaagattgagtacaaccacctactcagcaagacacacccacgaatgcagaataaatgcaaaggagtacaagggagttataataaaggggttagggtttgcagtaaacagcatttaaaagtcacttagttgcccaaagctattttgtaaagacgattctagagctacacaatgttataatcaaggccgtgtacccacacgaacctgccttaacccaaggccttcgatgattcagaccgaactgacaacccgacctgggtcctagctcgtcccaagccaacccagaccaaccataccacattttagttgttaagcatgttttaagaattaaaccactaacttgggtacattgctaggcttgcccataaccgagggcgcggctattcgaatagattatactttgatcagaggtgtacatctttacccacaagacacatctttctcatgtgtaaccatgtgccacataccaccacggcataccgacgaaagacgtgacatagttctcaatccatcctagccataaacaagagtaccgacccaaccctggctacggccaggattcccgagacaggtaaccaaggttgagcccctagcagcaggacaccggccatgtgccatgacatctcgactaccgggccgcagctcgtgtagccttaatttgccctagagatgtccatcgagccccgacttcgtccatccctatccgtgtatttttgcccatgaccagactgagccacgaactaagccttacccactagacatgtggaagtacggtagtgctttgcaacagaggcccgaagaccggtccttatagtggccgagatgctactatcaaaaccatgcacctcgagcccagcctaaaaccattttaggggtattgaatagagggggaggtgtgtgtccaattccaacataagccaaccattccataatgtccaaatgatatgagaattcctaaagtctaaagttataaaatcacctaatgttgtctaattaatcagcgaggcatctacctaaattcatgctcgtggaaccatgaatagggtacccactagttgggggttttgtttatcctagggtaaacaaggtaataaataacaatagcaataacaataaggtcataacaaaggtaaataggcatggctaaataaaacagtgataacacgggaatttaaataaaacgatattgcaataatttaaaccaaaatagttttataaactgggattcaatatgctcaaggatgatgtgacttgccttgctcgctttcccaaacgttggcttcaacctccacgtagagcggatcttctgaagctgcagcgtctacacggccaatagaaagaaaaaggcttttactctaataaactccatataacaagcagaaacaaagcacaaaaataggttcttgacttcttaaggaaaaattagagacttgaacggtccaattctgagttcaaaaggccaagatatggccatttgaagtttatatgctcttaatgtgaatatttgcaaatttcttcatttaaattttaattaaaaaatagggtttattgtgtcagttgaggggagggagcgcgcgggccgggtccatgggagtggtgggcccctgcggcagcccctcggtccacggtggaccgggtgcacccgcggctcaccagccggctccgggggccccacacgtcagccgcacccgatggcacggggggctgacggccaggccccacgcggtggccacacggtgcgcccagaggcggctacatcggcgcggccggcgggaggaggcgcccgcgcccctatggccgccggcggcggccataggcgcggcggagcggcggccaagagaggggaagggaaaggggaaagaggcggcggtccacggctcaccccggagcgacgacagcgacgaggaggcggccgaagtggagggaggcggtggtgcggctcgagtcgacggggtcggcggcgttccggcggtcggcgaccgaaacggaggggtggacgaggtcggcgacggtgcggcgaagccggaggagacgacgccgaggtgggggacggtcccggcgagcagctaggcccagccagaggtcgatggcaacggcggagagagaggacgacggcgcgagctcgattccgacggggaaaaagggcggcgagtggcggaaacggacgagggaagtgcggggagggtttatatagggttgggagtgagagagtgcggccggcgggtgtcacgcccggaaattcactagtaatttccgaacttatttgtgcataaaaccctcgtctaggaatcagccgaggtacacaaactgacaattcaatatacaaatccatgataataataacgttacatactcacaaaagaaaagaaaacagcagcggaataacggtctagcgatggcttcagctccactctcacaggcagctcaactggggtataagccaaacgtcttctccttctggatcctttttcttcaactgaggttgattgattattgcaagaatgagcatatgacatactcaacaagccacacagcaaatatgcaagtgcacaaggataccaaaggatggcataatataggctcatttgcaaaagcagcatttagcaaacatttaagagaagtaaaacagtagagtaattaatcatcaattttaatcaacactgaacagcaccccaatgctgcacaaactccaaaccaggagctaaacaaattattaccagttattgcatcaataactatttgtgagaggtgtgagactaatcacgaaaaatattgctcaaccagcccataaccgcgggcacggctattcgaatagttttactctggccagaggtgtaccactgtacccacaagacacgattccacacatgttgccatgccccgaagtaccaccacggcactgcaaagggggaaatcgtgacaatacccttcgcacaacacaactcaccatagtgcaccattcctggattataatcaccccctcaaaaaccaaaggcatggactccccagcgacccccacggacttctcgccgcttctcagtctggcaccccgtaatgaaccatgctatacaaaagataaagccgttgcccacgctggcttgtggttggtacggttaatgtttcacaacagtagctcgcgaaccgatccttaattgtcatgagcacgaacttcaaaaccatgtgctcacaacccaccattgacaagttttaattatcaattaattatcataacacgattaaccatcgtaagctacatttaaatctaaccataagtaataatgtaatatgattcaccccattaatgagctaatgtttctaagcatggctaagcaattatatctatatagcatttagctgaaccaaaccaatatataaggttctagctaatcgaattctaacccataggaaaataaagtcatcttcggccaataattaattgggaaaggctcaccacccgatgacattcgaaaataatgcataagttgaaataaaacattagctttaaatgggttcaacatgctcaaagggtcgtttgggatctgtgtgacttgccttgagcttcatcaagcgcttctgaaccttcctcaacgaaaacgctctccttcagaacgtcggaaactaaagcgaaagaacaaaatcaacaaaacagtacaaaaacaagcataaacaatacatgtggatatttttaacatgtagatctcgattttagaaaaatttagcaacttgaaccactcaaatcggagttacgatgaattagttatgaatttctgaagttttaatctatttgcatctagaaaaaaaactggaaaaagaaaatatgacgtcatgctgacgtcatcatcgcgcaatttcacgggcaacgaccttgccggcgatagagaggtcggcagggctatctaaagtcatctacacgtagaggacgatgacgcgaactcaccggtactagcaaacgcgatggacgacgacgaatggtggccggcggcgagctctagcggcgacacggctcgggtcgtcggcggcggcggctctccggtgaccggcaacggcggcgagggggcagccgaggttccccgcctccgtgcgcacctaacggcgacgacgggaagcggcggcgactgctaacgcgatggcgtggcgcggctgaacgtcggccggcggcggcggcggcttggacggcgtggcggcggcgctacgggggacgagaaggctcgggagttggtgcaaacgaaagaggacgccaaggggatgctatttataggcttggattagagagatcggactccaaacgagaggatttgagccggaaaatccgagggttagttggagagataaactcgaaaacgaattcgattccacgttgatttcttcgggataaagtgcgacgacgggaagcggcggcgactgcgaacgcgacggcgcggcgcggctggacgtcggccagcggcggcggtggcttggacggcgtggcggcggcgctacgggggacgagaaggctcgggagttggtgcaaacgaaagaggacgccaaggggatgctatttataggcttggattagagagatcggactccaaacgagaggatttgagccgaaaaatccgagggttagttggagagataaactcgaaaacgaattcgattccgcgttgatttcttcgggataaagtgcgattcttggggggaaggatagaggaggataagaggaatatttcccctcaactaattttgcaaacggagcacgggatgcggcggatttggtggaggaagcggcggctgcacaggtacaggacggcagctcgggcttctgtccaagcttgaagatgagcagtacaggggacgcaaattagactttcggctgggcttctacttccaaggactgattaaaggagggacaaaaagcagacgtcgggaaagagagcgaaaggactgcaggctgagaggagactgggccgagagtgagaggacttttcctaattcggcccgaaaaggaaaaggtgaattttaattacttttccaattaaattaatcactgaaatgatctttgaattgttaaaaatacttctattgctcaaataatttcaagaaaaatcttgaaaatacttggaccctcaaagtatttaacaaaattataatcagaccatttaatgattaatttaatatgtggataattactgaaatgttctttgtatgattaaaattaagaattcagctccgaaaaatccgagaaaattccagagagtataattaaccatggaggatttaataaaaattaaatccatccatgctttatatttaggaaattttatttcccacatttaacttcacttgtaaattaatgaacatttaatataaattctaataataatttattaaataatttataaatcctgaaacgaaaatcaggacgtgacagcgggggaggaaaccggcgcgggagacccggccgccattaatggcgccggcgggattagtggggggcttccatccgaaataaagagagagagaggggaaaatggggggaaagggagagggaatcaggggaaatatttcccccattcaattttgaacgggatcggcggagcacggcggagcacagcggagcgcggtggatttggcggcggcgggggcgctaggcgcgagcggagggagcggcgcatgcggcgggaggaaggggatgattggtgggccccacccgtcagcgagggtggcgggcgggcccgtccgtcagcggctgcacgtgcagggagaagccgagtggtccacggggaagaagagagaggaggagatgggccggattcggcccaagagagggaaggaggatttttagaggttttctttttataaaaccttttcaactttgtttatttcttgataattattatttgtgctctgaaaattccactaaaatttatttacacattttaggcttttaggaaatatacaaaaatcctccaagccttttttgacttttaactttgcacattttaatttttggaggcttttcactaggattttaattattctaggcataatttaaaggatgtattttagggtcgttttggggcgtgacacatttgtacaaccggggtaaaagtatatcaaagatccgtctactccatgtttaagaatatgcccatgcactagatagttctcatcaatacagggacgagctgctgagatgaaagcgatttggtcactaacgacccctagcactttcgctatcctagtaatcagagaaatgcactcaataggagcagaaaatcttatactttctaaccattcccttatcatacatttcacaggagcaattttgatttttctaaccatagcaaacatgataattaattcatcccccctaatgggtctaagatcacctctaggaaacaaactcagagcaatccacttgtgcatgagcctaactataggattatggatatcatttgtcctaggtttcttgcaaattggagcaccagaaataccttcccaaaacctatttttctcgaacccagaaattcctttctagagatcgattttacaagaatcgtgaaagccaaaaagtgtactcaatcctttccatgtaagtgtatactctttatggaaaaagcgaaaagaaattccatcttctatttctttcaaagtgcacagaaattgcaaagtaaccaaacgagaaccaggctcatctaccacaagaaatctctgccaaccaacagctttccaaatagcacgaaaatcaacatccattcctatctttttcagcagctccggagagtattctcgcgtgtgagcatgctcccggtcgcttagcatgtagtaggcttgtctttcctgattgtcgacaaggtcaaggtcggcgtcgttcaggagacatcgcggagcttcggcatcttccatcgtgacatcagctgatgaacaagcgctagactcatcatgattgacttgacgaagagccggaccacttgaatagacgaggcagccgcctcctcattctgcacaatggagcaagaatggtctaactcggcgggggttagaatagcaagagtgtcacacgccggttagtttcaccaaagcaacatgtatatatgcagctaagtatttgaatttgagggaaacaatcaaagcttgaatgaacttgagagaaaactttggagagggaatgaaaatgtgctgaaatggggtggattcccctctcccggccggttggcttaagtagtgcacccacaacggtcaaaactgacatgtggggcccactagccattgcctcaaaaaagggaggcagccgatcgaacccctggtgggcccaaccggccccactttcggccgttgggttccaacggtcagtgtggtcgtggcacagtgaattttcgttgaaaattttattttggtttgtttttaaaaattcatttgaagaatttcctcaaaattctgaaaatcctaaatgcaattatgaaattcaaacatgtgatgatgcaaaaatttaaattattgaaaacaaatatgcggatacataccaatttatgtgttggtgaaggtcgcatcattttaagtccgacgtgcaagaccgtaccacgtgcaagaccgtatctcctttcagttcagtgcactgattttccacctgtctccggaggtaatggagtaggcgtctttgacttttctttccacaccttctttggttttggtgtggaagacggcttcgactgctctagcttcttggccagtgtacttaattttaccagtatcttccaataacggttcgtgggcatcgttgtttccttttccaggaaattctgcatgaactttaccaggctatccatcttgggtggctccacttcgaccacttgaatattctgcggatttggcccgtactttattctgaccatggagcattgttcagtccttggctgaaactgaaacttttccttcttcccgttgatatggaaacggatacttctcgtttccacgtcaatgttggctcctgcggtgctaaggaacggacgccccaggatgagcggcgtctcttttccattgtccatatccagcaccacgaagtcaaccgggatgaagaaatcccatatcttgactagcatatcctccgcaatccccgtcgggtaacggactaacgagtcagccagttgtaggcgcatcggtgttggtgccaacaccgtgaagttgagcttgtcaaagacgttctttggcatgacgctgacactagctccgagatcacacaggacttggtcaaactgctgtgccccgatcgagcaggtgatcgtaggacaccccggatccttcttcttttctaggagcttgtggagtatgacgttgctgcactgctccgtcagcttaaccacctacattgttggatgcggtctcttgttgttgaggatatccttaagataacgggcatatgttagcacttgcatagcatccaacggcacgttgatgtgaatcttctggattacttcaacaaagcgagcgaactgctcgtccactgacggtttcctactccgttgatgaaacggcagcaatcgtgtgtcgcagtattcctgcggcacggccttttctggctgaacctctttgtcagccgagttactcgatggcgcttctctggcaacccgattagttcctgcagggttaggatatggcggatcacgagtggacttacctcctctcgtcgtgatcgccatgacattttcaatggaggagtcggtctgctccggaatcctcccagtttcagttgcagggactaaagaagccaattaagctagctgggtttttatcattttaatgaagctcagctggttttgaaaagtagaagcgaagccatctagcttaacattgatgttctctaggatcttgtcattggcagctagctttttgcttaaagcatcagtggttttagcttgcgcaaaaatgagatcctttaaggagggttggttagagaagttaccgttgttgtttcctccttaatagtatgggtgtgtctagttccacccttaacctcctcgtggacgattcccgttgttgttgttgcccatgtacatcgcatcctcacgagtttctaggcagtcgttcccagagtgacccgtgccgccacagacctcacacgtgacgtgtgagtccaaggccttgatggtgccttgtggccgtttgtcgtggtcgtccagtcgtttcatgaggaggtccagcttggcagcgagtagttccgtttcct

SEQ ID NO: 8647 - DNA, 10783 bp, Oryza sativa
cggctcgagtcgacggggtcggcggcgttccggcggtcggcgaccgaaacggaggggtggacgaggtcgtcgacggtgcgacgaagccggaggagacgacgccgaggtgggggacggtcccggcgagcagctaggcccagccagaggtcgatggcaacgtcgaagagagaggacgtcggcgcgagatcgattctgtcgagcagaagtgcgactagtgccggaaacgcacgaggtaagtccggggagggttcatatagggttggcagtaaaagagtgcggccgtcgggtgtcacgcccggaaattccctagtaatttccgaacttatttgtgcataaaaccctcgtctaggaatcagccgaggtacacaaactgacaattcaatatgcgaatccatgataataataacgttacatactcacaaaagaaaagaaaacagcagcggaataacggtctagcgatggcttcagctccactctcacaggcagctcaactggggtataagccaaacgtcttctccttctggatcctttttcttcaactgaggttgattgattattgcaagaatgagcatatgacatactcaacaagccacacagcaaatatgcaagtgcacaaggataccaaaggatggcataatataggctcatttgcaaaagcagcatttagcaaacatttaagagaagtaaaacagtagagtaattaatcatcaattttaatcaacactgaacagcaccccaatgctgcacaaactccaaaccaggagctaaacaaattattaccagttattgcatcaataactatttgtgagaggtttgagactaatcacgaaaaatattgctcaaccagcccataaccgcgggcacggctattcgaatagttttactctggccagaggtgtaccactgtacccacaagacacgattccacacatgttgccatgccccgaagtaccaccacggcactgcaaagggggaaatcgtgacaatacccttcgcacaacacaactcaccatagtgcaccattcctggattataatcaccccctcaaaaaccaaaggcatggactccccagcgacccccacggacttctcgccgcttctcagtctggcaccccgtaatgaaccatgctatacaaaagataaagccgttgcccacgctggcttgtggttggtacggttaatgtttcacaacagtagctcgcgaaccgatccttaattgtcatgagcacgaacttcaaaaccatgtgctcacaacccaccattgacaagttttaattatcaattaattatcataacacgattaaccatcgtaagctacatttaaatctaaccataagtaataatgtaatatgattcaccccattaatgagctaatgtttctaagcatggctaagcaattatatctatatagcatttagctgaaccaaaccaatatataaggttctagctaatcgaattctaacccataggaaaataaagtcatcttcggccaataattaattgggaaaggctcaccacccgatgacattcgaaaataatgcataagttgaaataaaacattagctttaaatgggttcaacatgctcaaagggtcgtttgggatctgtgtgacttgccttgagcttcatcaagcgcttctgaaccttcctcaacgaaaacgctctccttcagaacgtcggaaactaaagcgaaagaacaaaatcaacaaaacagtacaaaaacaagcataaacaatacatgtggatatttttaacatgtagatctcgattttagaaaaatttagcaacttgaaccactcaaatcggagttacgatgaattagttatgaatttctgaagttttaatctatttgcatctagaaaaaaaactggaaaaagaaaatatgacgtcatgctgacgtcatcatcgcgcaatttcacgggcaacgaccttgccggcgatagagaggtcggcagggctatctaaagtcatctacacgtagaggacgatgacgcgaactcaccggtactagcaaacgcgatggacgacgacgaatggtggccggcggcgagctctagcggcgacacggctcgggtcgtcggcggcggcggctctccggtgaccggcaacggcggcgagggggcagccgaggttccccgcctccgtgcgcacctaacggcgacgacgggaagcggcggcgactgctaacgcgatggcgtggcgcggctgaacgtcggccggcggcggcggcggcttggacggcgtggcggcggcgctacgggggacaagaaggctcgggagttggtgcaaacgaaagaggacgccaaggggatgctatttataggcttggattagagagatcggactccaaacgagaggatttgagccgaaaaatccgagggttagttggagagataaactcgaaaacgaattcgattccgcgttgatttcttcgggataaagtgcgattcttggggggaaggatagaggaggataagaggaatatttcccctcaactaattttgcaaacggagcacgggatgcggcggatttggtggaggaagcggcggctgcacaggtacaggacggcagctcgggcttctgtccaagcttgaagatgagcagtacaggggacgcaaattagactttcggctgggcttctacttccaaggactgattaaaggagggacaaaaagcagacgtcgggaaagagagcgaaaggactgcaggctgagaggagactgggccgagagtgagaggacttttcctaattcggcccgaaaaggaaaaggtgaattttaattacttttccaattaaattaatcactgaaatgatctttgaattgttaaaaatacttctattgctcaaataatttcaagaaaaatcttgaaaatacttggaccctcaaagtatttaacaaaattataatcagaccatttaatgattaatttaatatgtggataattactgaaatgttctttgtatgattaaaattaagaattcagctccgaaaaatccgagaaaattccagagagtataattaaccatggaggatttaataaaaattaaatccatccatgctttatatttaggaaattttatttcccacatttaacttcacttgtaaattaatgaacatttaatataaattctaataataatttattaaataatttataaatcctgaaacgaaaatcaggacgtgacagcgggggaggaaaccggcgcgggagacccggccgccattaatggcgccggcgggattagtggggggcttccatccgaaataaagagagagagaggggaaaatggggggaaagggagagggaatcaggggaaatatttcccccattcaattttgaacgggatcggcggagcacggcggagcacagcggagcgcggtggatttggcggcggcgggggcgctaggcgcgagcggagggagcggcgcatgcggcgggaggaaggggatgattggtgggccccacccgtcagcgagggtggcgggcgggcccgtccgtcagcggctgcacgtgcagggagaagccgagtggtccacggggaagaagagagaggaggagatgggccggattcggcccaagagagggaaggaggatttttagaggttttctttttataaaaccttttcaactttgtttatttcttgataattattatttgtgctctgaaaattccactaaaatttatttacacattttaggcttttaggaaatatacaaaaatcctccaagccttttttgacttttaactttgcacattttaatttttgaaggcttttcactaggattttaattattctaggcataatttaaaggatgtattttagggtcgttttggggcgtgacacatttgtacaaccggggtaaaagtatatcaaagatccgtctactccatgtttaagaatatgcccatgcactagatagttctcatcaatacagggacgagctgctgagatgaaagcgatttggtcactaacgacccctagcactttcgctatcctagtaatcagagaaatgcactcaataggagcagaaaatcttatactttctaaccattcccttatcatacatttcacaggagcaattttgatttttctaaccatagcaaacatgataattaattcatcccccctaatgggtctaagatcacctctaggaaacaaactcagagcaatccacttgtgcatgagcctaactataggattatggatatcatttgtcctaggtttcttgcaaattggagcaccagaaataccttcccaaaacctatttttctcgaacccagaaattcctttctagagatcgattttacaagaatcgtgaaagccaaaaagtgtactcaatcctttccatgtaagtgtatactctttatggaaaaagcgaaaagaaattccatcttctatttctttcaaagtgcacagaaattgcaaagtaaccaaacgagaaccaggctcatctaccacaagaaatctctgccaaccaacagctttccaaatagcacgaaaatcaacatccattcctatctttttcagcagctccggagagtattctcgcgtgtgagcatgctcccggtcgcttagcatgtagtaggcttgtctttcctgattgtcgacaaggtcaaggtcggcgtcgttcaggagacatcgcggagcttcggcatcttccatcgtgacatcagctgatgaacaagcgctagactcatcatgattgacttgacgaagagccggaccacttgaatagacgaggcagccgcctcctcattctgcacaatggagcaagaatggtctaactcggcgggggttagaatagcaagagtgtcacacgccggttagtttcaccaaagcaacatgtatatatgcagctaagtatttgaatttgagggaaacaatcaaagcttgaatgaacttgagagaaaactttggagagggaatgaaaatgtgctgaaatggggtggattcccctctcccggccggttggcttaagtagtgcacccacaacggtcaaaactgacatgtggggcccactagccattgcctcaaaaaagggaggcagccgatcgaacccctggtgggcccaaccggccccactttcggccgttgggttccaacggtcagtgtggtcgtggcacagtgaattttcgttgaaaattttattttggtttgtttttaaaaattcatttgaagaatttcctcaaaattctgaaaatcctaaatgcaattatgaaattcaaacatgtgatgatgcaaaaatttaaattattgaaaacaaatatgcggatacataccaatttatgtgttggtgaaggtcgcatcattttaagtccgacgtgcaagaccgtaccacgtgcaagaccgtatctcctttcagttcagtgcactgattttccacctgtctccggaggtaatggagtaggcgtctttgacttttctttccacaccttctttggttttggtgtggaagacggcttcgactgctctagcttcttggccagtgtacttaattttaccagtatcttccaataacggttcgtgggcatcgttgtttccttttccaggaaattctgcatgaactttaccaggctatccatcttgggtggctccacttcgaccacttgaatattctgcggatttggcccgtactttattctgaccatggagcattgttcagtccttggctgaaactgaaacttttccttcttcccgttgatatggaaacggatacttctcgtttccacgtcaatgttggctcctgcggtgctaaggaacggacgccccaggatgagcggcgtctcttttccattgtccatatccagcaccacgaagtcaaccgggatgaagaaatcccatatcttgactagcatatcctccgcaatccccgtcgggtaacggactaacgagtcagccagttgtaggcgcatcggtgttggtgccaacaccgtgaagttgagcttgtcaaagacgttctttggcatgacgctgacactagctccgagatcacacaggacttggtcaaactgctgtgccccgatcgagcaggtgatcgtaggacaccccggatccttcttcttttctaggagcttgtggagtatgacgttgctgcactgctccgtcagcttaaccacctacattgttggatgcggtctcttgttgttgaggatatccttaagataacgggcatatgttagcacttgcatagcatccaacggcacgttgatgtgaatcttctggattacttcaacaaagcgagcgaactgctcgtccactgacggtttcctactccgttgatgaaacggcagcaatcgtgtgtcgcagtattcctgcggcacggccttttctggctgaacctctttgtcagccgagttactcgatggcgcttctctggcaacccgattagttcctgcagggttaggatatggcggatcacgagtggacttacctcctctcgtcgtgatcgccatgacattttcaatggaggagtcggtctgctccggaatcctcccagtttcagttgcagggactaaagaagccaattaagctagctgggtttttatcattttaatgaagctcagctggttttgaaaagtagaagcgaagccatctagcttaacattgatgttctctaggatcttgtcattggcagctagctttttgcttaaagcatcagtggttttagcttgcgcaaaaatgagatcctttaaggagggttggttagagaagttaccgttgttgtttcctccttaatagtatgggtgtgtctagttccacccttaacctcctcgtggacgattcccgttgttgttgttgcccatgtacatcgcatcctcacgagtttctaggcagtcgttcccagagtgacccgtgccgccacagacctcacacgtgacgtgtgagtccaaggccttgatggtgccttgtggccgtttgtcgtggtcgtccagtcgtttcatgaggaggtccagcttggcagcgagtagttccgtttccttgacgaagcacatacctcgctgatgggtttggagtcgttcctcgctccaacccatattggagaccatcttctctattaaatcaccggctcctcgaaccaccttagagaagaacgatccttcagctgccgcgtccaggtggtcacgggacattggagtgagtccattatagaaattctgcagaatcagccagccgtccatcccatgatgaggacagacggccacatactcctgaagtcgttcccatgcttcaggaatggactcaacccttgtcagctggaaactagaaatccttccaccaagggcattggttttgcccatcggaaagaacttcgagaggaatgccgtagagcatttgtcccagatgttgacaacagcacggttggcataaaaccattgcttcgttttcccgagaaggaagaacaggaacagccgcagcctgacggcgtctggactgacaccctttataccctttatagtgtacgtgatacagatctctaggaactgctgtagatgagcattggcatcctcgttaggctcgccacagaatgggcaagcttgcgccatcatgatgaggctagacttcaagtcgaaatcaacgtctcccatgttgatctgcggcccaatggccacattgccagtagagggagcagcgaattcgcggagggtcttgtcagccatagtcttgaaagtctgtggcgctggtacggctggattttttgtcagtagagttttctgcggagcaatgaatcgcggcctgatgctccggaagaaagcttctggattttctttgaagttttccgccaagttgaaaccagtcatgcactaccctgttttcacaacaaaagtgaaaacaaccaaggttagcctgcaaagggcagtgattatacagaggtaaatataaagtattagttcatgtaatctctattatgaatcttccccagcaacggcgccagaaatacttgttggtatttctaaacgacagtactagaaatataattcccagcaatggcgcagaaatactcctggtatattatggttacagagttcatccgcaagcgcacagatataccattgtagcatttcacccgagagtattccaagggtattgtatttattttatcccgtgggaagatcatgtagagagaacttgactaataatttatatattacttgtgataatcatattctaagcaggggttaagataatcctagggtagagtgacacacaagcattatctacccattctcatgatatattatctaagctaagtggaaagaaaagagaaagaaaatctattcctatacttctagtatacatagtatacatacattctagttaaccgacatactagctaataccctctatccgatgccctcctagtactttgagaagccacccttgactgccgagttccttacgacagcccgtcatgaccatacaaccggggctaaatacggaggaataccctccctagggaatgaacttaggactatatacatgcgtggggaatacccgtactaagctgtcaccatcagcggcccacctctcatccgcagcatataaccccaaataatgatatccgtaatctagacaccacgtctaaactaccagatactactctaatatcatcgtcatgacatagagtaattgcataagcaaacattatacccgcaccaaagcatctcccagataagctagcagtatattcaatataacatgaacataatataaagtaggtattcatatactcggaaagtatttcaataccataaatgtatatagaagagtattctaaataaagtacaaagcttacaaaagagaggagaagagctcctagagccatacctgaactcttccgaaggcttccggactcctgatttctactctgttcctattccactagcttaagaatactaaactaacttgagagaatatgagagagctcttgcttgaggtgtgtgagtgaagtgagaagaggaagtccttttataggcaggtaatgacggttgtgatggttggaatggtcggtaataccctccaaccgtcattggggatcaatcccaaccgtccagaagaagccctgcatccaacggcgacgagggaggttcagccgaacccccttgttcggccgaaccaggggccggcccaaccagcccaagttttggctggcggcctcctccgttgcttcacttcatagactggtgaattttggcccaattcatcgtgtcaattctgagttcttggtccattcatgcataagtctgattcttgacatcgtccgattgatttatcatctgagttgatgtcgattctcctccactttatggttattctcttcaaaaggttagtaaacctaatactagtggaatattattattctaacttgtatatgcattgcaagcataactagttctcctttattttggtaatattgacggacgaaattgatcgataacgaccgtcaacacacctacagctagacaactcaactaccgagcgacgggacaaaacaacggctaggcaaagacgcacggcagaggcacgcagcgcaacggtgcggcagttggcagcgacggtggctcagcgcggcagcggctaggcggcggcagcggccacgacgacgattcggccaactacgacacaggaacaaaaccctaaaaacaggagggaggttctcagcagggagcaaaaccggcagggaacacgacgacgacggcggcgctagagaggacacaacgtgctaggttagacgtggaaacaattgacattgggttaaccaattcaattgagaggggaaaatagattaccggcgacgcgagggcgacgatggcggagacggcgacagcggcagaacaacgctagggcggtggcggcggctagcttgggcggcggtggcgcgacagctagggtagctagggcagaaaagaaagaaaaactgggggagggaacacttaaataggggaggactagattaggaaagggggagtcatagatggagtaggactaggacggaggggaggagactgactcgggcaaggggagggggagggcgcgcgcgccggaaggagagggggagggcgcggccggctggggagaggggaaggaaaaaggaaagtaggggattaggacttacccaaaaaggaaaaacaatgcggtgctgttttaggaaagaaaaggaaacggtcccgcgaactgacacgtatacggttcgtcatgcaaaacgaaaccgcggactgagaggcgagtgaattgggcacaattcacgaccaaaggcaaaggaagaaaaattaacttgacacttttaacttagcaacattgcctctggtaatctgatatttactctttaaatcctgttagtgattttcagagcaaagagaattagaaaaaaattctccctgacaattccaattattaaaagtactgttaactggggttttctcctggttaaccaaagcaaattcttgagatcatttattagtgatttggaacctaagggaagggaaaactccgggtgtgacagggtcgttcgacatcatcgacacctcgtcacacaaagctatcacacttcgtgacgacttagataatttgttcaaggtaaacggccaacatttaaaaattttccttgagtggaatgaagttttcgatgaagaagtagacgttattgaactaatcgatttcgagcctcaatgaactcatctaaaatttgcttaaattctgtaaaattgtatcatgtcttgcttgaattaatttagtgtagacgtgtgaaaaatttagaggccgactgagcccaccagggttc

SEQ ID NO: 8648 - DNA, 125258 bp, Oryza sativa
ggacgttttcattttcgtcatcattttacttcttccgtcgccgactggttatgctgtcgttgactggtgtttttatcttcacaactacgcgtcttcgctattggtttgcttctgttgccgctgactcgtgttcacttcatcacgactatgcaactctgtcaccatggtggagtgacttcatctttattatcttcggcaccggcaaactctattgcctctacttcgcaagctttgctgcttcaccgatcaccacgtctacaagaacctcgacatctcggcatgcatcaacaattatttcaccggcaattttggcttctccaaagtttctcaagtatcaagtccaagatttaatctaaatgtctgggagtttggagtcatcaaccaatcaactcagattcaatgagttgaacaacagtattttcctccaagtgaagatcttctacagctacaacaccaagttctaccgtcatcttgataaatcaagaggcgttgcatcaatctacattacgcacacgctagcatcaaggaaactacttgagctttgatatcttctcaacggtttgctggattactgtctctgacatcatcaccagtacctctaattcatcggctttgatgtctccgccgtcgctattgggagactatgtctttgtcttcggttgcttccgtcattgtccacttgttatttcgctttcacagttggcctactacgcatttactgaaggatgaccttgccgttatcatcggctgctacactgctattgactggatcattgacatcgtcatcttcataaacatcctgtcaagcctcttcggctatgcctactctgctgccgttggtgggcaacttcgtcatcataactggctgtctccgttgccaccaattgtcattatcgccgattgcgtttgctgtcggcaattgttttcttcttttgcatgattcatggatttcgccattgccattgataagcgtctacattttcaccatcggcttgactccgccgttgcccatggtgtcttcgctttcacggctgacttattatgccttaactgatgggcgtcttcgtcttcttcaccgggcgcctcgtttgttatcgactgattatttcgctgccatggctgcacaactctgttgctgttgctgggcgccttcgtctttactgctgactgacttgtctgctgccgactggtttcgtcgcctccatgggtatgcgacttcatcacctttaattggtgtcattgtctttaccaccagtaacatcttcgtcagctttgacgggtgatatcatcttcatgttggtcatttcgtctccatgccaactgtgtcagttgccttcaatggacaattttgactacaacagaaggacaagctacatcctcggtggcttattatctcaaacacaaggatcataccttcaatttggacttgtcacggatacatgcaacgtgaattcatgttcctgagactatttcctacgctcaaagactgaatcatttattatttcccgtgagggctatcacctaagtacttgtgccagtcgggattcaattatcacatctactttggtacaacccatgagggagaattactcaaattagaagccactcatatgagttacactcgatctacatcaaccgggaaatttatcactcgggatcatattaattggcgtgctctatttcttcatattttaagggtatcggtagacatatttgaggtctaggcctaatatgtctgcaacctatatttttaggtgtggcatgtcacgttcttttagggacttaggcattttttgcttaggcaaaagtgtgcgtgattatgtgcccaatacctcaaaatccttttataccgtagttactcaattttttaggagttggtataatgcattttaaaaggtgccgaatagtgaagtttttcattgctgcccctctgacttttttatatagtcaaagcgctgtttgggtttgtaaagcaattgattggacacaatatcattgttttttgccacgtatgtgtgcatttttattgaccaatattatggcttaggctaattatatattttggtctttttctaggcggttggtaaatgctttatgagtttatttactcgaattttacaccacatatgccgtatatttccaggtgtagtgaaaccatgtgtcttttagggacttaagcacatctgttaaagcaatgtgcgcatggtgtgtgtccaatacttttgaaatttctttattcacagcatataagcttctttatagctgttttgctatgtgaattttcaatgatgcacgcatcatattttacaaagcagtcggtatatcactcggatcatgttattcggagattcacaccgcatatactatatattgatatcaagtcactcggttgactataattatcaaaaccactcaattgggtggggtatgtactccttgactatatgctcagtttgttcaactaaccacatagttgggggctacacctattaggtgcatctagtcgatgcacctaagtttatatttaattattttttcagccctccacagtcttctgatttggtaaaaagtactcgtgagaccatggcaaagatgattgaagcactcggctttggagtaatctaattcaagagaagattatcttttcgactgtgaaggtctcagccgatgctagtagtgagcaaggggttggagcgggaggcgcggctgatgcagtacaaggagagcccaccggatgttgctctgccaaccagacctcgcagccgcgttgtccctttacactgacagcgcaccgtccctccacgccaaccggggagaagaagaaaaggaaagaaggaagaagcagcatgatgacgagaacgtgatggcgatgacaagtagacggcagtggcacgaatcgaattttagaaaatttcagtggcattcagccgatattgcaaatattaatgatatttttttaatttgacatatttatagtgggatggatcaaattaacccatcaaaatatggaaaattgctaagatttgggaaatctgtcggtttcctccacaggacaggtcagaacgcgtcctgagggctgtttagactagcggcatgtggccggtcagaccggcggagtctgagacaggctatgttttggttttcctttggttttgatctcgagttggacatggaggagggcctgtaaagggcaagaccaacccctatataagggataaggccatttgaaaccatgtaacatacaatctacacaatcaatcgaatcgttgttttcaatattacttctacttttcatatagcctagttttagttcatccatctttgtcaatttgtgtcataaatcgtccgccttcgttgcgagagtacgaattcctctgtaggtttgtcctgaaaaccttccatttgcccatgagacgggtagttatccatcgttctatctaaatcggctcagctagccggtttaatctatcaaaacccattttggtctagctttttgctagattggggtggttggagactctatatcaccgcaaggcgtttaggtgtcacgatcgtgcttgtctacttgccaaaaaagttgccaacacaatttttggcgactccgctggggacgtcttcatcatgaccaagccggaggttgatccatctaatgtcctccccatctcattggaggatctagatgaggagcaatgtcgggagattgaacaacacctcaaggagacgcaagaggcgcttttggcaaggtgctttatcaagactcgtcaaggagctattcgtcagaccagtttcacatcgaaaaacaccatcaatgtggtaagtggtgatgaggtatctcttccacttcaaaagctcgtagcaagttccatagattagactattaatactacttttaataataaacttgagcatgatatgagttcttattttgataagcgaattgatgcttttatgagttgcaaattcagttctaatatgaccgatttgccgcctaattctgttgcaagtactagtcaaggtcctgttcaccaaatatttagtaaaaccgatggggcgaccatgcaactgactaggggagaaaaccctaacttccccgccggtctgaccggcggttcctacaccggtgttggccggtccaactgcactgcctcacggtctgaccggcagccctatggccggtcagaccgcaccccctatactggtcaggccggtccgactacacctctgtctatcggtaagaccgggctctgggccagtcagacctacacaattcttccagtacaggaagttgatcctattttatatcatatttttttacatgatcctcgtgtagctactattaatcctcaagttcccccacatatacctaatgcttacaatgattctaataggggatatcctgaagatgttaggtatggccaatataacaatattgtgccaccgcaccacttattaggccaccaaacccaccaacgcctgaaaatatggaggaacgtcttaggaacatgattagagaagcctttggaattgagccaaggaatcgcactagggtttatcaaaagccgtatcctgattattttgataatatcccatatcctcgtggttttagggttcctgagtttactaagtttagtggtaaggataatatgactacatgggaatatataggccaattctcagcacaatggggtgaggctagtaacagggatgcttttaaattacgcttgttttctttatctttatctggtactgcttttacatggtttacttctttaccggtaaattctattcatacttgggctcaattagaacaaaaattccatgattacttttacactggtaaaactgagcttagattatgtcatttgacatcggttagacaaaagtataatgaatctgtaattgattacattaaaaggtttagggatgttagaaaccggtgttttagtttgaatataattgatagagatttggctaatcttgcttttaatggtttacttgctcctattatagaaatattagatggccaacaattgcttgatgttagtcacctcatgcaaaaagctctagctcaagaaagccgggttagggagagtaagaaattttttaggtccaatgacaaaaagcctaatgctagtattgttgattgccctgagtatagtgattctgataatgatgatggtgatcatgatatatatattgccgagtggtcatggactaacaagaataagccatttatatgttctacttaatgccgactcctcgtaaagatcggcaaagtgaggttaagtatagctttgatgtggccaagtgtgataagatttttgattatcttttgcaagaaaaacaaattagattacctaaaggccatgtcattccatctcaagaagatttgaaacgccgtgcttattgtaagtggcatgattctcattctcattctactaatgattgcaatgtgtttcgacgacaggttcaattggccatagaggaaggatgattgaaatttactgagggctccaagatgaagctatatcatgattcttttcttgtaatactattgatttcaatgacaagaaagtgttgattcggccggagcaagccgtatctactaaggggaaggaagtagtagttggagagcctagatcgaagatgattgtgccaacaaaaatcaagaagttggtgtatggaaggagaataaggatgaagcttcaagctctaagactccacggaagccaaggtgtcttttgatatgctcttgaacaagtatgagaagaaaagtgttgaacaaagttgtaacaagggcaaaaaagcaagatcaccttctagggagcgatttggtcattcaccaagaccattggagccgccttttactcatcatcctcaagtcatgccatggggaccttgtccaatgccactgccgggttatccttttccttacttcatgccatttggacatcaccaccaatgtatgatcatatgcctcctatgcaatttcatcaaagttggggagaaccaagaaggtcagcacatgagcgtttgtcttcaccaaacaaatgccggtttccatctagaaatcgggttgatgaaggaagcagggaagaaaagcgtgtcaaggtggaggcgaggacttcaaggtgattactattaaagtggagtctcatgatgtgccaataccttctgaagatggagccaaggtgattccaatcgatgaaatcgaagccgagaccagctgtgcgcaggtggccggtttgaccgaagccttaatgccggtttgaccgggcctactggccggtctgaccgacggccgcatgctggtctatctgggccgtctagccggtccgactaggctgcaatgctggtttgataagagatttgcaaggggtagttcaggggcttcgttgtcttcaagcaaaatcaataggggggcattatattcctcctggagcagagccaaaatcaaggtggatgcctaataatttaacggctacacaaaagagaaggttgcaacgtcttcgggctcaagaattaatagagagagaagccgaagagtagacagatagaagattcaatgagttgcgaccgccgccaatgaaggagtggatgcctaagcctatagagattgaggagccggttgttgttcaagcggagaaggaaaagcaagtagagaaggatgaacacgggttgttcaaggatgatttgctgccaaaggaagacatggacatcaacatggtgtgtatgttacctatggagttttgtgctatggatgaggttgaagttgctcaactttcactaggtccaagagatgcggtttttgagaaggccgatgaatctaatcgtcatatgaagtctctttatcttaatggtcatattgatgggaagccgatctcttgtatgttagtggatggtggtgccgccatgaatttgatgtcgtattcgttattgaagaagttgggcgtggagatgatgagttgaagaagaccaacatgactctcaacagctttaatggtgaaccaatggaggcgaaaggtatcttttcagtggagcttaccagggggaacaagacgttgccaactgctttcttcatcgtcgatgtgcaaggtaactatagtgttattctgggtcgttgttggattcatgccagttgttgtgttccctccaccttgcagcaatgtttaattcaatgggacggcgatgatattgagatttttcaagtggatatatcgtctgaggttgcaatggccgatgcttcaattgaatggcaacatgggaatattcaatgcttatcggggttagatctttctagctatgattacattagtgtctctaaggatggttttgtacttattttctataaattcggctagtttagtatagctaggcaatattactttgtatcatgagtaaagatgctaatctagagtagttacaaaagagggttgttggtaattcttatcctcacagataaaattcgcaagtgcacggaatataccgatgtagtacttcacccgggagtattctcaggttcgatttccacaaggaacatgtgtgtcagctcttcaccaagttcgtccaaggacacgaagctaaagtgatgtgaccatggctactacagatacaaccattgctcacatcatggatgaacaagatgacatcaagatcaagtcctccaagtgctagaatccgattcggccacctactacattgctgaattcaatcagccgccgaatctgcatacaacctccgtttttgacccgtgagtacttggtggaaagctcttggagtcctctttccagcggatccggcctcaactccaaattccatcccagtcgtccacaaatgaagaaacaaggtgttgcatcaccagtcatgggcctttgggcttgtaactttgtttgggaccccggcccaagtggggcccaaggggggctgcgccccaaacagagggaggacgcccttctgacctcctccatcccttaaatagctagtaacccctccaaggttagtcgggttttgtttagatgaaagtttagccattgctacttccttgcagcgtgtgtgtcggctagaccgtccgtctgcttttattcgaaaccccaacttatcgtgtgtattcattcctatttgcaattcagattgcttttatcttgttcttgcttgtttcttcgatttgcttgcaagaataaggttgatctgcatcggcaagatcaacaacccacggagaggtgtatcgatcactaaggcgcaacacaacgtctcgtacggttgtagccggatcgtcaacgtttctcccaaatcatagttacctacaactcaccgaaagatcgggccaacaatagccttgagtgtcgaggggaactcagggttcatcaggtggtatcagagctttcgttgctcggtgagtttttatctacctataaccagaaaatttcccaacaaaaaaaattgtatcctatacctagccatctttgtgcctttgcattgttcttttcagtttttacgttgttgagttttgtgttgcattgtcgagtcgtgttgctggtattagcgtctagttcgtttagagtttcgagttctggtcacgttttgtaccacagtcatcgccgcccccgtgtctctgttgttgtcgggacctacgaaaacagaatcggctcgctgccacagttctattttcgtagttttcagaagtttctgttggttagtatttgagttcttgagttgcatagcttctgtttggtggttgtgccgtgatggtgtgtgccgtgatggtgcgcctgtgcatgcgcgcgtgagaaagatgaaaggagaagattagattagattgactggtttggtttatatttagtgccaagtctgtttctatttatcacctggtacctttccaaaccaaggccgagtgggattccttcccttgcgtcatctcgtagccgagacttgtgagtccgactcacactccctcatgattgtttctgtccgagttggttaaaaacttcgatgaaattttattttggtgtcgattcaagatccgtttgcaaaaacggaaccgacataacttgagcattccatttttgtataatttttaattttggtttggacttctacagttgagtccctgtaattttcatatttacatttgagtccctttgaccttacattgaggtccttgagtcggtttttggtaaaaaatcaaaaaaaagagaaaaaaaaggcagaaaggtgctaaaaaaaagagagaaaacaaaagccgccccaaaaaaaagagaaaggaaaaataaagaaaataaagaaaaataaagaagaaaaagaaaagaaagaaagaaaagtgaaaaatcagttgaatcattgagatttcttttatatatcagagcatgcttgagttgtttctagtgctatcttgtggtatcgtttgtgtctaggctcgcgtctctagtacgttctagcctaggaccagcacggtacttgactttgaacaattattcaactttgtattctctgatttgagcatttgctattgctttgctacatatttaagcctacccagagctccacagatttgattgcagccgtacagcaagtgtttgccaaggcatcgatacatccaaactccattggggtgcttggttgagtcagtgtacattatcattccgcttgctttggtaagaacttataagagcttggtgaaaagcttgagtatgtgtaatatttcagctgccactacctagtagttgataggagcgtgcatattcttgtgtatgtttcttgtttgctactaaccatggcaggattacacaaggggaaacgagatggtcatgctcaacctcgacttcttcaccatcaacgagatatagcgacttcttcacgcattgcatatgaggtacatgataatgatcttgcaatggtagaatctaaattgccagtttttgatggtaagtatgattccgccgcttatgttaattgggagctagcagtaaacaaacaatttgatgagtatgatttctctaatgctcaaatgattaaggttgctagtaataaatgtaccggttctgcatctttttggtggtacattgttggcaacaagcttgaaacttgggatgaatgcaaaacaatgatgaggaaaaattttgtgttttcatattataaacgtactctcgttgagaaattagaacatctaaaacaaggtgacaaaaccgtgcaggagtactttcataactttaaaatttgtatcacttatagtggtttaaaagaaagcaatgagaacacaatgactagattttttagagggcttaattctgatattcaggctgggcttataaatgtgacatataatcatataggccacttgttcatgctttcttgcagcgttgagagcaatattttaaagaacccaagggagaaacaagctatgcttgtgcctcatattactgacattttgtagggagctcagaacattcaccatgaggagaagagcgatatgctcgagatgtcatctccatcgctcacgaaggaagaagagaagactgatgcacctacattatctgaagagggcataaaaggtaaattaaatggtgctgatattactcaaggtgagtgtgcttctgatgagtcacatttgtccactatccatgctaatctagagcaaattttggtggaaactacttttgatttgcctttgtcacaagttgatttacttgctattccttgtgataaagaagagttgtgtaataatgcttcacttatatccctaccacaactagtgaatgaacatgctatttctagtgtttcattgtgtgctgattttaagcatgatgttcacattgctaatgatgttgaggaacgtaaattgataacttctttaaatacttttagctatgttcaatttgatgatttttgtgagctcaataatttggaggagaaattagttgcttagtctgatttgccatgtccaactaatgctatttttcatatctttggcaaatataatgatagaggaatatatttggtgcatagagatttcagttgttcggattttgagaaacatgttattgctactcacacaacatcgagtttctctagttttgattggatgaaacaggttattttgaatggactatgtgacgagcaccgtatagaaaaatcgaggacggttttccgtgaagaaggggaggatgatgtgaccatggctactacggatacaaccattgctcacatcatggaagaacaagataacatcaagatcaagtcctccaagtgctggaatccgattcggccacctactacactgctaaattcaatcggccgccgaatctgcatacaacctccgtttttgacccgtgagtacttggtagaaagctctcggagtcctctttccagcagatctggcctcatatccaaattccatcccagtcatccacaaatgaagaaacaaggtgctgcatcgctagtcatgggcctttgggcttgtaactttgtttgggaccccggcccaagtggggcccaaggggggctgcgccccaaacagagggaggacacccttctgatctcctccatcccttaaatagctagtaatccctccaaggttagtcgggttttgtttagatgaaagtttagccattgctacttccttgcagcgctcgtgtcgactagaccgtctgtctgcttgtattcaaaaccccaacttatcgtgtgtattcattcctatttgcaattcagattgcttttatcttgttcttgcttgtttcttcaatttgcttgtaggaataaggttgatctgcatcggcaagatcaacaacccacggagaggtgtatcgatcactaaggcgcaacacaacatctcatacggttgtagtcagatcgtcatgtttctcccaaatcgtagttacctacaactcaccgaaagatcgggccaacaacagctcagggttcatcataaagataggctaaggattcaccggtgagaaacagtatctatggaaagcttaactttaatcctaacgcgatactttgggcactggttagctcgctgctcccagatatcgctttactacgcacccggacaggaagaacttcagtgatcttgagggttgtcaccacctcatacctactgtgggatgcggagaaaacaccggaaatcaactaccgagacactgcgtctaagcagttaataacatacttgaatgttagctacgcactaaagcaatccctatattttagtggattatagtgaacgatgatcccgtatgctaattaggaactaaccaagaaataaatctcaccaagcaaaactaaattactcaaaagatatttctattataattagagtaattaacatagcagaaaataagaagagttttaccgacaactctggcactcctctgacttcttctaatctactctatgatgaggacacgactagcctagttggatataaccatgactaccttatgtattaatgaaccaaaggcgcatatgttctacattagatttacttcttatatatttgaacaaacgttgctacacaatgagttttgtgtgttttcgtttgtctgaggtactttacttggatgaaggaaaagacgccgagcataacgaatgcatggaatatcaaagaagttgattgggaccaaaccaagatcttctccaagtcgacttcgagtgcaattcggaatccaggactagtctgcactaaaaggggcgcccgagtcgcatacgtgctcggattggggcgttctttatatggatggaaagctaacaaaataacctttccaatgcttttggtcccacatccaaattctttctgtgtaaacggaaattgaccaaacaagttgatatccggaatctgtcttggtgctgcgtcaccgtatttgggcccttgggccgtgtatcgtgttggaacccatcagggttgcgtcaaggattggttgcacgaccctaaactctatatatcagtaccccctgtcatctttagtgtttgggttttgcttagattattctgtcgagaacaatttcaccgttagatcggtttgtaagaccccaacttgtgagcttaatcattcatctgcaattttggtgtattctaccttgttcttgtttgtgttcttcgattggcaaatagggattagccttctcggcgaggtcatccactttttgacatgggtgataaccagaggtgacggtgtgctgcgattgcggggctcaagagcgtgttcgttcaagaagccggatcgatttgtgtcgcgactctgcccaaatcgttgtttatcagaaccttttagaagatcgggaaccctagtccacatcacaaagactttatcattgccaaggccatgcttgctcccatattgccagcttatcaaagatttccatggcgtccaaggagcttgtgccgctgttgcaatgatacatggcttggattataggagtggcaatattagcaacttcgtctctagccttctcagcaatttcaactttgtttatcaacaagtcgaattgcgcctttgttttccccatatgatctgcatataacatcattcaaggattcaagatataatgatagttgatcaagtttcattcacaaagaatcaaaagagttaccttcaaattccttgacaacaagatctctttccttggacagagcagctttgtcattctctaaggctttaattcgtctctccaaatcttcaattttggcaacttggactgctagacacagaaaaattatacaactgctggaattgaatatggaaagccaagcaggaataacattaacctttggaggagccgctcaattcgaagttggtatcctggaactcgacaatccgattcctgagttcatgttctgtcttcctggcttattctttggtttcatagagttttgctctggtttcttccaaagtgccaagatgaggaaccagcttctcaagggtagcggttttagcctcgttctgaaggtggattctctgcacaatatcgtattcaacttagtaaattcattggatgactaaacatgtgaggggcagtatacttacatttacaagacgagtagcctgattgagagtctttgctagcagaactacttcatcttcttccttctgccaatttatcacaatgccttgcggttgcatttcatcatcccaccatttgaccaggataggcggctaggagtcttcagctgatttagtacgaagaatttcttcttcgtcaccaaccattgggccttcatttatataagaacaatgagataacatgaattcactggagagagcattacctgtgataattataggcggtggccgagcaggtccttccaccttgtcaaaagtgctggcttcaggtccaacatctgtatcttggttcagaggaggactgctagcttgctcctccgtttcagggatattgcttcccccatccatatttggttactgggagtcttctttatcttcacccgactggtttccagtcaagggctcctggtttgtgctcgcttcagcggatgccgactggtttccagtcggtggttctttgttggcatcagcttcgcctgtcgttggcttttcgccagtcggggtttctactcggaaggtcccagtcccggttgcgggtgaagtttttccttcttcaattgctttcgagctagcgggtgggtcagtgctcttactagacggaccaatgtccggcggtttcctaagaaataaaaagatattgcaagatgatttcagcaaacacaattgtgaatgttaagaaaacaaaatggacaaatcttatacctagaagttcttcggatttttggcatcggacgactggttgttttcttcttcgacggagtagcctgtttaagctgtttgccgatcgattcatcatcgctgtcatcatcatcatctatgatcatcttcctcttccaagagcccgcttgtttagccagattagcactacttttctggccgccgggctggatctttggacccccggtagcttggccctggtgacgccgcaaagaacgacattgaacaatcggaggatcagatttcatcaaggcattttcctaaggataataattcaaggtttattttcaataacaacaagcataatagaaattcaagcgacttgtcacttactgctggaggtggattgaaggcattgaacggcacgaccgggagcagatgtgtgaagtcaaccacgatactagatgataaaatcttatacatcctctccttcatgattttgaattcgagggagtcgggatcctctcagttagggccggtcttcccatcatactcaaatgtcgtgcgtgatctttctttgattggagacagtcggcacattatgaaatgccgagtgatttgctccccttgaaggccctgttcctttatcttcaacattatattcagcagttcaagggcttgagacgctttctcacgcatgggaagggagttccagacatcccgatacttaggcggacagcacgagtactcaggcagggcagggtctgggttttggatataaaaccagttagcatgtcagcccttgttagaggttttgaagggatgagaaaaatatttcttgtgcagggttccatggagttggaagtcagatcccccaacaatgcaaggcttatttttgtcgggctggggttttaaaaaaaagattcggcgaaacaaggcaaagtgaggccgaatgccaagaaaagcttcgtagaggtggacaaaaatcgcaatatgaacaatggaattggggttgagatggtagatattaatcccataaaattcaagaattccccaaaagaatttagaggtttgaagtacaaagcctccataaaagaagtgggtgaataccacgatctcatgggtgtcaggagttggaaatggctcaccaaatacaggacgccacccgatgatctccttgcttggcagtaccccatgcgccaccatttccttgagagtttcttccttgacatcggaaggtgcccattggctctggaagttttctctattgagggcggaggttgcgtggagggtttcggttgaagggagacggtttggaagaggcggattgcggtgcagctgcgaaccctagcttttggcggcacaagtttgttactgtagcatgaaatggggaacgagcagctgttgcggcgaagaagacaaagtggtttccttcgacgtgattttatcgttgggtatcggaaaatgctaatgggcatgggcccatacagtgttttcagcccaaatataccttcggtgtggctgaatgtggtctcttgggacttaggcgtatttttgcttaggcaaaattgcccacacaaattaaagcctgataccgttaaaatccttttttcgcagttagtaaattccttggaattactacgatgcatacaaaaaggtgcccaactgtcaaaaacatcatgctatttttgttgactttctctataaggtcacaaagctgttagggtttaatcaagacgactagtttataaagttgttgttctattgatgcgaaaacacgaggccttgaagatctgcttaacttcagtgcaggtccaaaaatcttgcctttaggttcgtgagcgtgccagttaatttaatcctgcaatcaacaagaaataaagataaagaaaccgcggttaaatccataaatgattgccgatcgactagttgccgatgacatatcatttatctctgagccgatgtcatgtttgaatcgatcggcagatataaataagtaagaaaagactaaatctactcgatcagctgtagatattaacaacctataatctttatatcgatatatacttaaatcaagtgattgggatagatcggtcgccatgccgagacagtataaatcacttagattgaaatatatattaacaatgagattatagatgctcatagcattgccgatcagatagatctagcatgtatcggctaatactccgatactacaatatattaagatattaaagcaatcaaaaatatatcaaacggaagcctaacatactttgttgtactaagatcataatataaagggcagatctagcatgtcaattaaacatgaaatataaggctaaatcaggtaagatcggctgaaaccccgatactaccctaatcggcaaccaaaagcatgctagaggttgagattctaatcatgacttataaggtcaaactcaactgatgcagctataattatgaaaaggacaatatctagacaatcaagccgttgggtatttcatagatggtggatatcctgtacaatctaagccaacatagatatttaacctaatcggctgccttccaatgatagatgttatccgattgaaggttagataacaatattgtcaaagattatacagaatatatgataactcgacgaattacataaacaagattagactatcataaagatggaagcactaatcccgagaacgcaagccgccatagcaagttttacctctagttgaagatcgaaaccgatgcagctcaacccaaaagcaagaactcgtcgaaacaaaacgaaagtaaaagggtggcgatgcgccaagattgtattgaacgtgtgttagattgattacatgaggctcggggtctatttatacccgagattacaaaatatgtccgtgtcggacacgaaacaaactctaagacaccataaatctttgcggcagacttttgcccaaacatatctctaaggaaattacataaaataacctaattaatagatacaattgccttctcaggacccaatccgtgcgtggcaattctcatgaagcacattagctcaacccgacaacgtgtaccatgtcacattgtcggattcggctcaatcggctatccttgtccaactcggactctgccgatcacaatcgcagtcgattcggactttagccgatccttgccctgtttccgaaatgatttccaccttagactccgcctcagttttatctttgtcttcgatactgaaattactaaatttggttgttagcatgttccttctgagcatttatatgcttcattctcttaataacagactaaagttacggcttaggctgattaaacttgtaagtcgttatttatttagcggttaaactggtttttactcgaattttaatacaaatgatgtattatgccccaaaatagatgatagatctgtagagtgctcttatcactcggatctttatatatcatctatgtttcatagtgagctcaataatcttatttaagcagtcggcaaattcctcagatgaagtcgaatatgctttaatattaaattacttcggtagtaccattcataaaaccactcacctagttatttattttaaccttgactatatgtttagttttttccaactaatcacatagtcgggggctacacctattaggtgcatctagtcgatgcacctaaaattttttagcccttcacagcatttgattcaaccactagggaggccaaggcagagataattgaagcactcgggattttcgtttaatgactcgggagaagattatttcgtcgattgtttaggtctcaggggctactgtggagattatggataccccatacctacacgcatgtgtatccgactaggtatagggataccaaatatactgatagaatatatttagtaaaggactcagttgttatgttaacttatatatcaaggaaacatccgatagtcctagtcggttacgattataatttatctttacatgcctagtcgttaggaacatgggctgtatcttgtaattctggctcctccccctatataaggaggatccaggtgcctccaggggcataacctttctctctgattatacgatcaacaatacactcggcggatcaatccccggacaggagtagggtattacttctcattgagaagacctaaacctatataaacactacaggagttcagacttcttgtgtccaaaaaatgtgacgaagttttatttcaccactatttattacaattgtagtgaccaaaaaagttttcgccactgcgatactgatcattagtgagaatatgttaagtcgccacaatatatagcattagtgtcaaatctttagtgagaaattaatattttgccactgtcgttgtattattagtgggagaacactgtgtcagcacaagaggccttatcagtggcgaatttattgtggtgaaccatcctgttgccactgtttaatttttaattagtgaccaattgttatattgtcacaggagtccctagttgtagcaaactcattcgcaactaatatttttttattagtgggaaaccttcatatcgtcacaggatactataattgtgatgaatttgtaaaatatcatccatatctggtggcatactatttttttcatagaaattcaaattagcgaaaaaaatgtgttctcactattcatttataattgtttggatatgccatgtacaatttatctaaaatctattttttaaatttgtatttcttccaaaaattttattcaccgcatatactaactataataagtggcaaagcaacaaattttggacaaaactttttttacaaaggaattaaagagcaacataataatttattctccatatattttccatacatgttttttttaagcaccacactcacatgtagaaaatggaataaacatgtttactatccgctcaagaacagaataaaggaggtttagagggcttgtcggctgggaggccgaccaccgcgccgagtctgccatttaatttcgatggcaactagagaggtggtgaggacagaaaattaatgggtctgtttggttcttacagctgtagccacagccaaaaaatgctgtaccgaacaagccaaatgattttctacatataaattgtcactgggtggctgacaggtggtctactatcatataaatataaattgttccataagcatttgcatttaataaagaaaaaatacacgcttcgatcattctatgacccagatattctgacatttgtattacatttataaagtccatgggtccaaaagattgtttttagtatcacaaaaatttaatttatgcctccaaatggacacaatcgtgaacacgcgcacacccattttctatgagcactcaaatagcactaggtcataactctagtttgagcatcatcgtgatgtcggcttgctgctcatcatctgcatcggtttactcgcgcactaaggccctttttagatcccacccaaaatttttcaacatgtcacatcgaacgtttgaacacatgtatgaagtattaaacatagactaaaaaataactaatcgcacatattacgactaatttgcgagataaatcttttaagcctaattgcaccatgatttgataatgtggtgctacagtaaacatttgccaataacggattaattagacttaataaattcgactcgcgatttactgacggattctgtaattattttttttattgaactacgtttaatactttaaatgtgtgtccgtagatccgatgtgacacgcaaaactttttaccctggatctaaacacagcctaaaccattagtaattaattaattggccattatttttaatttaccgtcattacctatccattaaaatagtatgcgagattaaatttttgacactggcatggatgcaaaattaaattggacccatcggtcaatcaatggttttattatgctaaaacgtaatgtaactagcttgtattaatccaatatgtacactcgtactgttgcttaaaaaagtactatgtaggagtactactctttatatagtagctttgaactcctccttatcctcctgtctaggagtattaaagccagcagcatttagagcgtcctagaggcacctacagcagcaacctgcatattctcgatctggatctaggcagctgcttgcaaaattcgggtggcagcgtgaaaatttctcctgaggatttttgggttagcaccggccggtgagaagttcacgggatggccaggtatgagtcgttgaggtgcagagattttgttgggatattttctgtagtatggggatttctgtggtttcttgagatatttgctcattctcaagttcgttaggataacgcgtgttcttcttcggagggattgtttctgctactagcggactaataggcaaccaaaaccatggtgaggcaaaccggcctccttctccattgccgcagggtgtttagattgagaaccatcttcctaattcccttcaaagatttggcgtcaaattatttctcccgccaaaaacgatgggtctatatatacagcctcatttcccaaaccaatcttttcaacatccagagtcaaacagaaacagaaccttgaggtttctacggtaggtttcccggagagaagctgcaagcgaaggtaaagtgctaaacgattcaattcgatctgggaatactatttgttagtcagccttgcgcacaaacacaccaccatgtttgtccatcactgcctctattgctgcaatcgccgcaaacgatgacaccgccgctgccgatgtccatcgtgtccatttgttatgtcttcttctcaattatcattctttcggtttaatttgctattcatatctttttcgtcccctgctcttattgtctagacgcagtaaatatttcttttttcaatgttacagaaaaaatgagttcccggctgcgtcagggaaatcaacgagtggatactgcagatcaaccggccacacgtcaacgatctcgtcaagtggggactgtgggtgaacaaatggcatcgatcatgccattgatagaagcgaacaagacataggtaaaatttctattaaacacaagcactttgatgcattaggtgaaataattcgttagctagagcctgtacaatatatatctctacaactgaattatttatattgtggggataaatattgtttaaagtccatctgtactgttatgtctcaattcaacatgtgcattgccaaattcagatgatcagcaggcctctgatgttgccatggatgatgcagaacaaattgcctctacactgctaaactcaagatgtatgatttgtttcaaataatatttttgccatggtttaattgaactatttacattgaaatgtctattttgactgctcctgtttttactgacataggtcgtgctccaaggaggggggggggggggcgaaaagtcaccatcaataccaaacttgttaagaaaagggcaagaagagaaaggctagatatttcttttcctcaaccatttggaaaagtgtgtggaaagcatgcaaaattatttaaaagtgaggttaccgttattgtaagaaatcatgtgcctctgaaagccaaaaaatggaagaccattgaaaagcaacatcctggtacaatggctaatgtttggaagaagttgaaggttgttaaatattcttatgtcaacatattttacatatttattttttttagttgccaacatggaacttttgctgacaggatgcatttcctgagctacgcaacgaagatgaagattgtgctatgaagcaggttgaagagtagtatagtaatcgacgttatcgtctccactgcttgcaccataacaagaaaccaaggccaacccatgtttcaccagaagattgggcttggctgataaagcatgtgtggaccgatgaggattttcaggtgcttattttttttaatataattgtgccatgttccatgcataataattgatatgcctgaaattttattatatagaaaagaagcaaccagaatgcagctaacagggcaaagcaggagatgggctctaaagtgggaactaaatcaattgctcaaattgcacatgaactggtgagaacaatatagccatttgtctttcactttctccgtatttttgttaactgtacagctcattttctcatttacatgcagagaaacaaagagacaggtgaatggcctacaacaatgcaagtttggaaagcaacctatcaaaaggctgatggaacatggtctgttcctaatggtgaacgagttctggtatatatctttacttatgacaacttgtttttttagatttcagcctaaactatatgatatgtgtcaatgtaccttctgagtagtactattttaccattggaaacgcttccatctgccctatctgtatgattcttttgcttactgttgttttcacattacaaatgcttctattactctaaaatttcaccttaacaagtccacctcacaagaagtgcatactaaatgggctaggtgaactactgaactgtgttgttgctaaataatcagtaagtgatatcattcattttatattaggccctgtttgatctaatacttgcaaaaaaaactagaatagtaagtgattaaaaatcatatttgttgtaccttgaaaccttgtatgaggtgttagtttgtttatgcttatacattttctttttataatctgtgtcaacagtctaaactaaatgaagttgctcaatcacaacaagaaaatatatgttctgcagcagtaccactagtagagcattttgccttggtccttgggaaaaaagcgaaccattcacgtggtataggcttacgtgcaattaatagagtggctgaagaaaggctaaggtaacttgcacaagttgaggctgctgaaaagcatgcagctactgcccaggagcgtgttgatgctgcggaacagcgagcagtagctatggaagaccaagtccgcaaattggatgaaacaaatgcccagttgcaagtagagcaacaatctcaacgtgatgagttgaactcccagagaaggacagtagagggacaagctacagatgttgaaagaatggtacaacaaaaacttgatgagcaaatggccatatatttctcacgcttcgcttcttccaatggtgtttcatcctcacgatctccatcagatgtaagaaacaataaaatatgactaatgttttgtttttcatgcaatggctttttaagtactgaaagctaaaaatatatttgctcatatttacaggaccattagaatgcatgaagttgatctccagaagtctatttaatcaagctgaagacatcctaagtctatttcaccgaataatttagtattagtcccatttaagtttctactggttgctttagttctcatcatgatgtttatgtcagcatttcgtgagaaattttgagcttcttgttgagtgcaacatttgtttggttgtaagacttctgaataaatatttcaatatcattgttccttaatttggtttaattgagatgttattttttttaatggtgttcgatgcaaaataaaatttatatttcattaatacaattgtcacggtgaaaaatagtagtggtcctgggagtataagttcttgtgatgaaaaattgtcacacatcttacgtggcctcacaaaaaaaagattatttgtgataaaaaattaacacgaactattcatttgtggcgttaaacacatcactattaatcgtcctaatcaacggaaatggtatagaggtgagaagaaatttcaccacataaaacatcaaaagtgacagtaacgctgccacagatctaacggaagtagtggccatataaataatcacatttgtaaattacaatagtgacaattttatagtcataattatatactaaacgtggcaatttttggggccacaataaaaatcttaagtgatgaaactatcaccactattctaaacatatttgtggcggcgtatgtcgtctctgatgtaactattatcagtgataaattttaccatcactaatatttatgaatatttgtggcgaacacaaaatcatcactatgttatttgtgatgattaccagtggcgactagtgacaaacttcagaattggccacagtcgcttgcttgtgatgaataaaacattttgtgtcaaaattaatcatcacaaaaaccaatttctcttgtagtgaaaccttgtgtctcctagcccatccacttttccagcttgatagccctttttgtattgtcgaaatcttgttttgtcatgcccggaaattcactagtaatttccgaactaatttgtacataaaatcctcgtccaggaatcagccaaggtacacaaactgacaatttaatatacaaatccatcataataataacgttacatacttacaaaagaaaagaaaacagcagcggaattaacggtctagcgatggcttcagctccactcccacaggcagctcaactggtgtataagccaaatgtcttctccttttggatcatttttcttcaactaaggttgattgattattgcaagaatgagcatatgacatactcaacaagccacacagcaaatatgcaagtgcacaaggataccaaaggatggcataatataggctcatttgcaaaagcagcatttagcaaatatttaagaatagtaaaacagtagagtaatcatcaattttaatcaacactgaacagcacacccatgctgctcaggcccaaccattctgaacaaccaaacccggctgcacagatctaactccaaaccaggagctaaacaaattattaccaattatagcatcaataattattgtgagaggtttgagactaatcacgaaaaacattgctcaacccgcccatgaccgcgggcacggctattcgaatagttttactctggccagaggtgtaccactgtacccacaagacacagccttgacatcatgtctaacatgcgtcgcgatactggaaagtacccgaatagaggctgtgacaataccctctgcacaacacaactcaccagagtgcaccattcctggatcataatcaccccctctataaatataaccagaggcatggactccccagggacccccacggacttctcgccgcttctcagtctggcaccccgcaatgaatcatgctatacaaaaggtaaagccgttgcccacgctggcttgtggttgatacggttaatgtctcacaacagtagctagcgaaccggtccttaattgtcatgagcacgaccttcaaaaccatgtgctcacaacccaccattgtcaagttttaattatcaattaattatcataacacgattaaccatcgtgagctaccattaaatataacttttggtgtaccttgcctcctggtcgtcaccatctgaaaatcccacacagaaccagcaaacagagagagctgacaattaaagctaaccacccacgactaccataattcttgaatttattactgctattaaattggttcattaaggttcaagtttcttaagcaaataaaataaagacaggctccaacacagttataccacacaccggcataaccatgccccatacgactctagcagaaaaacaaacgagaagaacacacgtgcaagcctactaactgctcgtctactgctgcgatgagccagggcggaaggtgagcagcagcgcatcctccgtgctgccaacgccagaggctccctcctcctgaggaaccacgggggcgggctcggcacgaggggtctcgacgaagcaggtccacgctagggactgacgaacaagctcgggcctggaggtactcttgcgggcggtgatcttcaggctgtggcagacgcggcgacgcttggggcgacagacctctccctgggcgatcttgagctgacgcagctgcgcctccactgcgtctaggtccttcttcagctgcagattctcctgacgtagctccaggatcttcatgttgttctcaaccaaccctcgacgcatcatctgatggaagtcgatatgggccgcgtcgtacgcctccaccatgcgcgccaggtgcatgatggtagcgtcatcctccgagctagcatcccggaaggtggcgtagtcgcgggctcctccgcgacgagggtggtagcggtagggcgagtgctgcaactcgtccgggtagcgctggtgcagagtgccgatggcgaggagtgcggcgttctggcaagcggcggagaaggaatctccacccgcggtgactgccaacgaaatcctctcgggtgagccagtgaggatcactgcagtaacctcccaagcagcgtggggctctgcatcgtcaccctcctgctccgggagctgcttgccctggtagtccactccatgcagataccccaggacaacgcacatgccccgcagctccaaaacgaagccagtcaggtgcagaccatgacggttgatgctgccggccatctacaaacaaaaacaaaagagaaaagcaacattttaaaggtcagattttgacgataaatgaagcagcaggacagagagagactagaggattttcacaaataagaaaggatttttattttgaaaatattgctaaggcttgggatctacggctcgtcctagggtcaagggggctctgataccaacttgtcacgatcggaattaacccaacgggcgttccttacgtgcgtgtattattccttgtcccaggaggcaaggtacaccaaaagttgatacatttcagagtttataaagtggaagcgtaaatagttaatttattacatgggcggcgaagacccagcacacacaaaaacaaacggaaaacagcggaagactagggcgacgaccacaggcgcttgacggcaggcttttgtttataaccagactgagccacaaactaagccttacctactagacatgtggaagtacggtagtgctttgcaacagaggctcgaagaccggtccttatatggccgaggtgctactatcaaaaccatgcaccccgagcccagcctaaaaccattttgaggattttgaatagagggggaggtgtgaatccaatttccacaataatcaaaccattccatagtgtccaggtgatatgaatatcccaaagtctagagttgtaaaaccacctaatgttgcctaattaaccagcgaagcatctacctaaaatcatactagtggtaccatgagtagagtgtccactagttggggttttgtttattctagggtgaacaaggaaataataacaataacaataataaggtcataacaaaggtaaataggcatggctagataaaatagtgataacgcgagaatttaaataaagcgataatgcaataatttaaatcaacataattttataaactgggattcaatatgttcaaggatgatgtgacttcaacttccacgaagagcggatcttccgaagctgcagcgtctacacgaccaacggaaaagaaaaggcttttactctaataaactccatataacaagcaggaacaaagcacaaaaaaaggttcttgacttcttaaggaaaaattagagacttgaacggtctaattccgagttcgaatggccaagttatggccatttgaagtttatatgctctttaaatgaatatttgcgaatttcttcatttaaattttaattttaaaagggtttattacgtcagccgaggggagggggcgcgcggaccgggtccacgggagtggggcccacgcggcagcctcacggtccacggtggaccgggtgcactcaggctcacaccggccggcgccgtgggtcccacgcatgagccgcacccgagggcgcgggcggctgacggccgggccccacgcggcagccgctcggtgcgcccgaaggcggccacgtcggcgcggccggcgggaggcggcgcgcccgcgcccctatggtcgccggcggcggccatgggcacatcggagcggcggccgagagaggggagggaaagggggaaacgaggcggcggtccacggctcaccctaggtcgacggcgacgacgaaaaggcagccggagcggaggaaggcggctgcgcggctcgggtcgacggggacggcggcgctccggcggtcgacgagcgaaacggaggggtggacgaggtcggcgaggatgcggcgaagccgaaggaggcggcgctgaggtgggaggtggtctggggcgacgacggtggtggaccggagctcggcggcgacggcggagagaaagcgacgacgcgagctcgattccggcgaggaggaagggcggcgagaggcagaaacggacggaggaggtgcggggagggtttaaatagggttggaagggggggagagagcggccggcggggaaggaataggcccgggaggtccggccgccatcaatggcgccggcgagatttgcgggggcaaatccgcccgtttgaacgcgagagagagagggaaaaatggggggaaagggagaggggatcacggggagtgatttccccctctttattgcacgcggggacggcgggaggcggcgggattcacggcggcggcggcgctagggcgcgggagaggcggcgggaggaaggggatgacaggtgggccccacccgtcagcgagggtggcgggcgggcccgcccgtcagcggcgcgcgcgcggggagaggctggatgggccgcggggagaggagagggagggggagggagatgggccgagccggcccaagagggaaaggggactttttagagtttttgtttttataaaatcattttaactttgtttatttcttaataattattatttgtgctctgaaaattccactaaaattatttacgcattttaggcttttaggaaatatacaaaaatcctccaagccttatttgacttttaaatttgcacattttaattgttggaggctttcacacggattttaattattctaggcataatttagaggatgtattttagagtcgttttgggacgtgacattacttgaccattcaggggcccgaacctgtataaaatttctgtctcgatctgttttacctcaatctcgcatatatcctagtaccaacaatccccatactacgcaaatactggaattacgacatcaaatgtcgacaattgtagcatttcaccaggaaatattctaaggtatcatatttatttaatcccaagggaagatatgataagggagaactatgctaatcatttatatattacttgtatatatcaaggtctatgtaggggttaagtagttcaaagggtaggataaaggtgacacacggaagaaagaactaagatattctcactaaaatataacctaggctaactggggatatgaaaagaaaagaatcaatcctatacttctagtatgcaaacatccttagtttacactcgctggtatacaatcatggaaccaataccccctaacagtgctctcctggtgtttcgagagatcacccttgattgcggagttccatatgacaacctgtcatggccatccaaccggggctaaatacggaggagtaccctccctaggaatgtgccttaggaatatatactaacatggaggaatacccgtaccgagctatcgccatcagcggcccatctctattgtctgcagcatatatgcccagataataatacttaataatccaagcaccatgcttagattactaaatactactctacatccatgaatccgacatagagcaaccgagttctcggacattaaaccctcaccaatgcacctctctgataagttagttacacaactatatcgacagaagtataaaataaagtcggtactcagataatataaagggaataaaataccgaagatgtataaagaaaaatattctattaattaaataagtcttagaaaaaaagagaggaaagttactagagccatacccgaaatctcttgaagactcgaggactaagaaaactattatatttcctactccactagcagtagagctctactaaacttgagtgagctctttgatcttcttcttgagtgtgtgttgtgaagcgagaatgagagcttcttaaataggcaggtatgacggttgtagagcatgcgaattgtcagaaatgtcgcgcaactgccataggacgtcatccggagcgtccacgccaaaccccagcctgaacggctaagacgggggttcaaccgaaccatgggctggcccaatcggccaaaattttgctccttacttcagtgacgtggtgtcttgggatttttgagattgtttcactggatttgtaagcccatttacctataagtctaactctcgacgatgtttgattgattattcaattattttccattgattctcctacattttatgtagaagtgaaatggatattatttgcttgcagagcaatggcaagcagagtgcaagcaaataatatccaagtacaagtggaaatagattattctaaagcgaatatgcattgcaagcatagctagttctcctttattttagttatattgacggtagaaattggcctataacgactgtcaaaagttatacaacatacccattgcatagacccaaccaaaccacctgaactaaactagtttgtcaagtcaaattattatggtgaggcaaatcacggtgaatctggttgacctcccataaccgagggcacggctatttgaatagttttactctgatcagaggtgtacaactgtactcacaagacacaatctcacaacacgttaccgtgttccgacatgccaccacgacataccggattgtgactatgacaggacccttcgcacacccccctaaccaatcgaatcacaccgtaggtttcgcccccactcctcaacaggcagtgggcagcaccctctcgtgcctaggtaaatccgaaagcagcttagaccatcgcagggcccatccatactccatcacgcccacccttgcccgggtacgtcgactaggtcaaaccacactgcaagtccagccgttgcccacgctaacttgtagtaagtatgggtaattcttccagtgtttcccatgaaccggtactttatcgtcatgagcacgagtgcacgaccatcaagaccatgtgctcacaaccgaccattatcaaatttcagttgacaaattatttaattaaccaaacacgattggccatcgtgagctaccattaaatgtccatcattaagtaatagtgaagcattaaatatcccaatagtgtgctaatgtttctaatcatgactaagcaattatatctaatatctagctgaaccaatatataaggcctaagctagtcaaattataacccataggaaaatataggaaaaagactcacaccacccaataacattcgaaaataaatgcacatttgaaataaatagagaatttaaatataggatcaacatgctcaaaggattgtggttgggatatatgtgacttgccttgcaaacaagcatcttcaattcgtctttaggaacttcccacgaacgagcaatccttcaaaacgactacaaactaaacctagaacacaaaatgaggaagaacactaataaaaccaaataaacagtataattaaaagtagagatgaatttagatgaattatgatacttgaacgacctcattccgagttcatatgaattagttatgaattaatgaagttttaatcaattaaaacctataaagaaaacaacctaaatgatttatggcatcatatagaattatttttgtactgataaaggaggaatatgacatcagcgaggagtgagaatggactgatgttgctgacaagcgggacccgcatgtcatagagacaagcggtagaccgggtctaatacgaactcggttcacagagaggtccacgggtccacgggatggatggctaggatttcattgatcagactttgatcatgatccgacggatgagatcgatccgatctagggttttgaggtggacgccacgcgagacaggcgatgaagtggctctgacgtggcatgccacgcgggatggacgccggcggctctagatgttggcgacagctgcgacttcagcgcggcggcagacacagagggcacggcgaggaagaggagaccgaggtaaaccttaccagcacttacgcgacattgaacggagaagtacggcgactggcgacgagcttcgagcggcagtgagatcgagatgatggtggcggcgccaccccagtgaacaccggcagaagagaaggggtggacggccttcccaaggtccttgcgaaaccaacggaggagacagcaaggtccggcgatgacgggtggtgaagcggcaaggcttcgccggagatcaaaacaaggcggcgagctcggccttcatggtgagggtggcttgcggggttcggcgcaggggagcgaatgtcaggggtggagcttggccttgcggagccgagggaggtggcggcgcaggttggtgacggccgaggcgacggcgaacgacggctggagttggtggcggcgacggagagagacggagctcgcttggagaggtggctaaggcatgggaggctcgggtaaaagagggaaaagggagaggaggtccggggctagcaatttatagcctcaggaagaaaagatcggatcgggtttgagaggaatcaatgatggaaaagctatggttcaccggataaacgatgctcgaaatcgtgtagaatccacgcaattttattcgggaatcaaggtggtttcttggggataaggtacagcagatcaagacgattccattctcgcaaccaacttgtgaaaaagagtaatggggaggctggatttgacggaggacgcggcgtcggctagagtacacgggcactgcacgggctctgtccaagctggaaaacgacactgtagcaggagggaatgagtttaaacttttctttctttcttggaccggatgaaagagggaggccaattggactttggccgagagatggagagggctgcaggctcggattgggccggcgggagagagaggaaggagaagaggattttctttactttttaatttataagtaaatgctgaaatgattttttattccgggaaaaatccagaaaatacttggaaactcatagtatttataagaattttatctagcccaatttgatgctcaaatatttcatagattttattcaaacacttactttaattattacataatttgtaaaatttcctttctcacaacaatttataatttagcaatttttagggtgtgacatgcacctcctatgtctattactctttgcctggtgatctccccctctccctgcgatcatctcactcaaccatacttcagtgattgaacctaggattataaactctaactccaactcgaacccaggattctaaactctaactccaactctttgtaggggtcattggagcaggagaagaagatgtcactggagctagagaagaacgaatcgcgaagcaaatcctaaagttctaagggtgtgtttagttcacgctaaaattagaagtttaattgaaattgaaacaatgtgacggaaaagttgaaagttatgtgtgtagaaaagttttgatgtaatagaaaagttggaagtctgaagaaaaagttagaaaataaaccaggcctaaatcctctcgtgtttctcttgtggaaccaagtactacctccgtctcaatttaagtgcattgctaagtttccgcgtccaatgtttgatcgtctgtcttatttgaaaattttataaaaaaattaaaaataattagtcacacataaaatactatttatattttatcatctaacaacaataaaaatactaatcataaaaatttttcaaataaaacggacggtcaaacgttgaacatgaacagtacaaaactacactctctcttttttaggatgggtagcaacatatactccacgtcgcattcaaccgtatttaattcacaaacggatgggcagtagttgttgttgtcatgaatactcggagaaaacaagccatcacaatcacgaattgaagaaagtccttcatttcacatcaacttcttgctaataccttagctcttaagcaacgcggtcctttaaaagactttggccatctatccaggaatcatcaacacaaataatacaagcaatcatcagaagatatctgcataaaaatggtggcactagacttgagaaatcctccctccgccgccacgaccgtcaaggaggaccagcagttcaccatcttcatcgacggcgtggagacagccctccacgagggtgtgatccagtggaacggcggcacggtcactttggtcagcacgggtgtcctcgcggtcgaccgtctccagcacgtcctggtgcgcggcgggggcagtggtgacgtgagcttcacccggtgcggcttcgcggccgcggaggcctgcggggtcgcgtcgttccatcggtgcgacgccgtgcgggcggacggggcgcgggaggtggccgtgcgccgatgcaggtccgcggacgtggagcgcgccggcgtggtggccatccgccggtgcaagggcgccgcgcgcgtgcgcggcgcgggggaacttcacgtcgggcggtgccacgaggccaacgtgggcgggtgcgcggacgtcgcggtaggccggtgtcgcgccgcgcgcgccgactggtgcggcgcgatcggcatcgagcggtgcgggtcggcggacgtgagtcggtgcggcgccgtccgcgtggatcgatgccgcgccgcgtccgtgtcgggctgcggcagcgtagcggtgcgccgtggcaaggtgaacgtgatcgaacagccgccggtttgtcaagagaagccgatgtaccacctcgtccacgctgagccagtctacgcgatccctttggaaatatcgagcgagattaaattgcagtagaccgggcagtgccagcgggctaaaggtctgatatgctgatgatatatatgcgtgtcggtgtgataagtatacgtaatatactattgtaatataatgtgtggtttgtacggagtatatatgcacaaggattatacttttaaataaagggacaacgttgacaaatgtaagggtggattgaaaaatgaacgaatcgaaaagaccaagaccaccgaaactgaaaagacaagatcgataaatttggtcgggcattttgttcgtcaattcggttagtcttctcggttaaccgaaaagatctaattaaaaaaaattcaaatgcaaccaacaatccactaagtttaatagaattaaaacctaatattcacatcctactccttttagccataaaacccaataaaagtctttactaagacgtgcttgcgaattctttttgtgtgatttttgtgttaaaatttttttatgatttctttgcatatactacctccgttttttataatatggcaccgctaactttttgttaaacgtttaactattcgtcttattcaattttttttgcgcaaatataaaaaatttgaagtcatgcttaaaacaacatttgatgataaaataaatataatgaatggttaaatgtattttgaaaagtcaatggcgtcatatagtaaaaaacggatgtagtgtttaactttttgtttaatctcggtttggaccgagaccgaatttaccgatcctgatatttttcaattaaaattcggtcctcactttttaatgactgaactgagaggaagactgaagaccaggaccaaaattttcagtctgaccgaatgcccatccatagacaaatagaatacagataaaaaaaaacaaagtcatctattaactttgagttcttctgtcaatttgcatacgtaacatttgctgcaactcttttacaacaatggtcaaaattaatttcgctcactaaaagaatcgcaaaagaaatgtgatgaggactgaagtcccgatcgtccattatgtactgataagtccattgtggagactgaaccaagatgaccgaaccactcacaatcacaaccccaccccttcgttggttatcaactgtgccaaagcgcggtcgacctcaccgataaagctatctcctacaaatgaatcgagaacaaaaacaagagagaagaagaaataatataaatatattgcatatatacaatgaagctcacaaattggggttccacaaaccgaactaagcggcgaaactgcaacagcagaataatctaagcaaaaccgcactctaaataatgatagttattgaataaatatgattagggttagctgtagggcatccacccctcgtgcttaagatgtgaccatggatgctattgagacaaccgctgctcacatcaagaacaaattaaacaagttctggaatccaattcaactgcctgcaacaatgttgatttcaaacgactgccagatgtgcatacgaccttcgttttgggtccattagtacttagtggaaagctttcggagtccgctttccaacggattcagcctcatctttgaattccgtctcgtttggccggaatcataggaacaaggtgacgcatcacctataataggcctatgggtttgtaactttgtctgggaccccggcccaagtagggcccatgtggggtgcaccccaaccaggtggagcacaaccctagggacaccaaggtcgtccttccaccttcttgaataactaggtacccgttaaggttttcttgggttttgtttagattgaagtttagccattgctacttgcttgtagcgcgcgtactaaactgtctgtctgcatgtctttggaacccaacttatcttgtgtattcaattcctatttgcaatatcggattactttgatcttgttcttacttgtttctcgatttgcttgcaataataaggttgacctacactggtgtcgacgtttgatatcgcgactacgtatttagatggtatggggattgttggtaccaggctatatgcgagattgaggtaaaagagatggagacagggatttttatacaggttcgagcctcttatcttacaggtaatagccctacatcctgttggccgaagccgatgttgctctttattcatctggatcacacaaataaaatatttgggataacatatctggctgtcgtcgacttgacggatagataaccaagtcgtagtcgacgatagggtagtctatctcctcgaatttgtactcggcgggatcagagatggcgctagatccctcttgccagcttccgtaggcaccggatggggtatggctaggctaatctttgatgtcgatatccggcgacgtgtgttggcttgtggctttgtggctttgtggctttgtggcctatcccctctcctcctagggggtttgtatttatacccatagataaccccttgtccaagtaagtatagggagataaatatggatatgatctgagtagtccttgtcgttttcatgtagaactcttcttgtccttccttatcccgaactccttctatatacgaggtttgtttccgtataagacatggtatgtggtgggccttgccgagcttagtcgattactattgggtatgtggtatccataaccctgacagtagccccgacttcaatgcaaatgaacgagttcatgttctcaaccgaagactttggaataactgttgtcatgctcgcttgaccgttctcggtgagatcagagatagtgctagattcctcttattggcctttgtaggcactatattggttttgtctaggttaatctctgatgtcgtccgagaagatacggaacatgcgactaagtctcccgtcgtgctgtaatcgagaatttggattgaagtcaagaaattccatctcggcgagtacacctttgcttcattccatattccttgtcgaactccagtagtcgttctcggataatcgagaaggtgcaaagtctgcgacaaagccttgaaatctgacttgactattctgatgtctgacttccctaatcaacattcgtcgtactcgcttaatcgatcccgctgtaagaccgtagagacatggagtcctcaacagcgttgaatggaattatcttgaaatcaattctcaaaacaaaatattaaatagagatagccctcaagcgaacgctcaagggtaacatgttctaatatgtatggaaaaattgaaaatcaattgaatctacgtgtaacaataaaagagtatgctggctagagttgccctcagcaaacggagtttggtactcctcctagcccctagccctatcctcggggaagtctgttctcggaggggaaggcccaatgacacgtaacttgcctagctgaaaatgcaattacctagcccccagccgtgaagttggaaaaaccaatttccaattacacggcttggttaatacgcattatggagcactcttacatgaccaggttttacatggtcgtttggctctttaggatctgacaagagcttatctgctctgggtgtccccagccgaaattcccttaggtttctcggaggcttgtcagactggcgtaaagggacaataatttcgatgtcaagagtaggtgttatcgtggttagggatctctggacaaatattgcacatataaacacttacagaagatgacgtagatgatgagataaccaccacactaggcaaagcccaggcgtatagttgtacccaataaatcgcataggtagtgggagaatcgctacatcgttggcagaaaaccagttgtagtcatatctcgaccactacgacctactggttcaagaaccaggagtaggagtctctcaaccgtttgaaattgaggtgcgaggactactacgctactggtcgaggaccagttatagtcgtaactcgacctttggaagtcgtggtacgaggaccgctacgctgccgatcgaagaccagtcgtagtcgtacatcgaccatcagaagtcgtggtgcgaggaccgctacgttgccgatcgaagactagtcgtagtcgtacctcgaccataagaagtcatggtgggaggaccgcaacgttgctggtcaaagactagtcgtaatcgtaccttgaccaccagaagtcgtggtgcgaggacctctacattgccggtcaaagactagtcgtagtcgtacctcgaccatcagaagtcgtggttcgaggaccgctacgttgccgattaaagactagtcgtagtcgtacctcgaccatttgaagggaatcagagtaatgtatggacgacattcccgtgacttgcgagaacaacctcctgatgaagacgaagacaatgaggaattatcgtagtcggaggttcggctcctgtacctactacctcatcctcggaccctctagaagtctggggatctcgagtttcgtcgtcgtcgtgtgatgtagttaaccgtgtccgttgtcgtcctgatgtcattagtcctcgacattgtcgtcctagtgacaacggcgatctagtcagtcttggttgtcgttatcacgacaatgctgattgtcccgttagatgtcgagagcttgctaaccgattagtcgaggaccaggagtaggcgtatcttgatcacctgaatatgaatttttaggtggtgagagatcgctacgatctactggccaaggaccaggcgaaggcgtatctcgatcacctaaagacgaattttcaggtggtgagaaatcgctacgatctactggtcgagaaccaggtgtatgcatatctcgatcaccttaagacgagattttaggtggtgagagatcgctacgatctactggtcgagaaccaggtgtaagcgtatctcggtcacccgaagacgaagttttaggtggtgagagattgctacgatctactggtcgagaaccaggtgtaggcatatctcgttcacccgaagacgaatttttaggtggtgagagatcgctacaatctactggtcgaggaccaggtgtaggcgtatctcgatcacctggagacaaattttcaggtggtgagagatcgctacaatctaccggtcgagaaccaagtgtaggcatatctcgatcacctggagttttaggtggtgagagatcgctacgatctaccggtcgataaccaggtgtaggcgtatctcgatcacctggagatgaatttttaggtggtgagagatcactacgatctactggtcgagaaccaggtgtaggcatatctcgatcaccaggagttttaggtggtgagagatcgctacgatctaccggtcgagaaccaggtgtaggcgtatctcgatcacttggagttttaggtggtgagagatcgctacgatctaccggtcgagaaccaggtgtaggcatatgtcgatcacctatgaatttttaggtggtgagaggtcgctacgatctactggtcaagaaccaggtgtaagcgtatctcgatcacctatgaatttttaggtggtaagagatcgctacgatcgactagtcgagaactaagtgtaggcatatctcgatcacctggaggggcgctagagttggtgattacatgcatctcatgtggccagcatgactcacatacccaacatatagcatatccggatgtctatttgcaatcatgtcgggtgatcaaaccgacgttatttgtgagggattatccgttaacgacatattctccaatagtccgggcgtggccggcgctatacatgagataagtcgtcagtcttcgttggtaggttgggtacgacgacttagcctttatcgagaaagttctcgacaatggggtgtactcgaccacaacctactcgagtgctcaattgtttctgaaaaatattttctagaagacaagatatataacagagaatatcgagtatgtactcaaaaaaactgcatgactcttctagtattattaggatataacgagcagattaaatattaggtattacgtaaaccgtaaacaagtatgatttatactaaagaaaatagagcgagccccagcattaaaccgtagttggccaatcatcggaaacattcgcacaatagatatgtataaaaaacatgctctaggtaaatataataaattattggtctcaatattatatgatctgatcgtggatagatgtgatttatctgaatagtcaacgcattgcactttaggcagccatattggtcttctctgcaggtacacgtgcacgcctgggcacgtactgagtccatgcatatgcacgtgtacatgtcaggagtaagcacgttgactcgttgtcttgttgttcagtagattacgccgtggtgattttgggcagcaatatatccggcctgagtagattaacacatggtttcctatcacgtggagtgacaggcacctgtcattcacctatccgtccggcctgttattgtgtccgaccaaagcacgcgttagccaggaaatcgatcagtgtagtagtcaattccggtctcccatggtgtcagcaacatcctcgagatcaccgatggtcgataatactgaacagatgtcttcagctgcggcgacgatggttccgatctcgtcggaagacatacttcggtcggattagatctccccagtcccccataaccgaagttgtcgagtagtttggtgttagagaatccatctcttgaaccaatttcatcgaaaccttgaagcaccaaactccccctacctggcgcgccactatcgatgtttgatatcgcgactacggtatttagatggtatagggatcactccacctacctggcgcgccactgtcgacatttgatatcgcgattacggtatttagatggtatagggatcgttggtaccagggtatatgcgagattgaggtaaaagagatggagacagggatttttatacaggttcgggcccttatcttacaggtaatagccctacatcctgttggccgaagccggtgttgctctttattcatctggatcacacagatacaatatttaggataatatatctagctgtcgtcgacttgacggatagatcaccaactcgtagtcgacgatagggtagtcttccttattgaatctatactcgacgagatcagagatggcgctagatccctcttgtcggcttccgtaggcaccaaatggggtatggctaggctaatctttgatgtcaatatccgacgacttgtgttggtgtcgtaggctctccagaccttccattataattaagagatgaagtgaataattcaagtcattaaacaagcataatgaagtagccgacgcctcgagaaaggaatattgaagacattgctgggctttaagcctgccagtgaacttcagtctgagtcaacttcagtctgagatgtgcccgtcaaaccactcgaaggcggtgacaagatgtgttacacattcaggagacttgataaaaatggctaaatatctacaacatctcaaatattctgaactcatactcatgtgaatctagttctgaggatgtgcactagattcacactttcatcttaagcatggacatacatagcaaacacaaataagatgaaagcgattaaaattacatctaacttagagatacataggccgaccgaccaaataaatatatagaacagcggaagcttatctacccaatccataaacacaccgactaggggtttaccccattaagttcaaatcctagaagaagcagtcgattacccgcatcactcaaatattaaatctaaaacctgcaagcaaaaggttaattcaatggcaagagtcagtacattattagaaataatgcactggcaagtaccaagacaaacctaacaccctacttgcaaggcatataatcaaggatggttctttttagcataaagcaagttttatttgcataaaacacattcaaatcagattttctttcaaataaatttcagcaagctagtacttaacatatgggcatcaaagtaggcattaatcatgtataaatatgcacctcattgccatccatggcagcaaggagatcattctgaaatctcaacataatttgaaggtaaattcaacatttagaagaataaacacaagtctatactcaatacatatccacacgctgttcatgaccgcgagcacggctaatcgattagtttttactctgcagagtttgtacactttacccacatgatgcgaaataataatcatgcaagagcatggcacgcgattcataagtatccgatttattactcacaacaaagcttttccaaaattcatgatttagccttacaccaacacgatacgtgttactccatcctaagccatacacgttatatgacctagaaccgttaagtggtgggcccacatcttaaacttaacaccgtggtggcggacataacgggaacccacccacgtggcacaatatggttgtattggatagacttagtcacctaaactaccacgtcggggtaaataggaagtttctctgagttatccgaactcatacacaccggcctactagaatgtaaggctgaaccataaataatttactaagcttgggctatcccatactagcacatgtggttgtactgtatacgaaatgaactgacattgagtgaagcccttaggtcggtttgggcacactctccccctatcggtactcaactaatcaccatatgtgcaccacttgaggcccaaacctaaaatccatgttttccatcattttatttatcaaaatcacaagtattaaagttctgtccagattatttaaaaatcaattttcatgtttgtaatgagcccataatgacaaggaagaccattctaagcatggctaagcattatagtaatctagtgactccaaaactcatatataaagtggtatagtcatattgttccaaaggttacgaatgagggatatggttatatgtggagttaaggtgataatgcaactagtaggggtttgtctaacaagtttaacaagattttagtttattagtgtacaatcgacatgcaagattttcaaacattttcaataacctccaaaacataggttcaatgtgatcaaagagagggaggtgggacttgccttgtaactggaaaatgtcagcacctaattcacttcttcaccgtttgagcaatcatctatacaaagtacacgttatgtaattaaacaccgaaatatgtgaaaaattcaaaatgctctaaaatgcatgatttgtgcacagtaaataggtactggtctaaaatgaatttaggtgaaagaatttctattttatctcatttcatttgagagttatgaattttagaagttttcgtcggtatagtataggatttacttaggtactattgtgaaatgctcttgtaaggtgattcttattaagtttatgtttgctagggtgaagatatatgttttctaagactaacacatttgatttcacaatttttagagttaatgtgaattctttatgtattttacaggttataacgtgttataggtgtatataggtgtatagtgttatataggttcatggctttagaggtttaggtccataacttgcctcatctagctagtgatgtacaaaatgagtattttagttaactaatctaaccttagttcataagcttatggtctttattatcatggttcatattcttataaactaggggagctctagtctatgctagcaatatattatatcaatctagaaattattatagaaattattatatgagctaagttcttctaagttatggtggatggggatggaactatggatccactggtcctaacaagttttatttggaattatttggagctaccatgcatatatatacttattgatatgtattgtttaaccactattatgtgttaagtacctatactaccaaattaaggtttagagctatggtatgaacagagggtgccatattccactctactaggttgaagtacattactttctggtcctatagaaatttggttcacttcatttaaaataaagatgaattttctacaaattttacaaattaaaggttgctctacgttggttattaattacataaatatttagaggcttttattacaaagtaagtatatgattttattttacaaattagaagtatatgttttggtgactctacataagttgggtttactcaaaaacgatctaacatgaattttatataaacttctaaagttcagcttatatatctaaaactattcattttaaagataatagttttagaggcattaggtacaaagtaagtatattattttatttcactttacagtggacaacaaattgatgattccgtgaaatgtgaatttaccctaaaatgagttgagatgaattttgtatgcattttataagtttgtgcatgctttatgtatattttttcttaaataaattttagaggtgaaatttgtactgcaagtgtaagttttcatttcataacattaaagttcatccttatatgagttcacagaaacttgaatcatctcaaaatgagttatatttgattttatatggatttttacaagttttaggtacttttcttatataatctcagattttgtttctaggggtccgctaacagtcatacggccaatatgcaaaaaagcccttgagatttctagaaaccaacccgcagtcttaggcccatatgtcagtgtttagtatgttttcatattgaaccttatgtttgtttaaattctcaacacgaagtcctgcgacctggacagaacagagcgccatggccgagctcgatctcgagctcgccggcgacaaacgatggctcgtttgggggtgcgaccaatacacaaaatgaagatcatgttattgcgatttcattcctatacatttctcagatagcggacattgaagcagcgccagcggtgagtccgagcagaggatgttttcgggtggtggtgcatgtcgtgctatcgactggatgtgttagtgatatgccctagaggcaatcatagagatgattgtatcacatactatgtttacatatttattcgatattattccttaaaatagataactcattattggttaatgaatatgtgattctttcatgacactatttatgttgtttgttactatttttaaaggatccctgatcaaatatcatatatggaacaaatatgtttatatgatcagcacatgtattaattgatgatcatgtctcatggatcatggtatagagataccaaattaataatgtggacacatgttgctgaacatgttgttggatagacccaacatgagacactggaagagccatatgtgttgtgtcatcagtgatctcatttagtgttggtgttgaatttttagacctgagattatcatggttcccaacatgtatagtagcttacttagggactgctaaacgctactccgtaattgggtaattataaaagtagtttccgggtatgctatgaaacatgtagtgggatatgaataatcaagatgggatttgctcctcctatggagagatatctctggacccctcgatgttgtagattatggaagtgcatggccatgccaaagatgattgaggagtcaatcacaagttatataatctatcaacaggttcgaatgaatgattgagctattagaggatggcacatatctagccttaagcttaatccatatcgtgaggcaaaggggttcatacaagtatacactagaggttcagccgatatgatctttatttatacccggtgggtcaatacgttctgctaggggccgctgttgacgcgtggaccgaaaaggagttttcgggttaaagccgagtatatatgaacctacagagttgcacgcttaatgggccggaataaggggattggatggagatccaatatgtgcttaattcggatagggatccgaataggagtcctacgggccttggaggcccgagtgatggatcctatatattcgtgaggggtgtgaccggcggaggcattgcatcacgtgagaaaccctagccgtcacttccctccccgagcaaaaccctagccgcgcgctagtgctagcacatctgcgcgtggcgttccgtccctgtacgtgtggataccggtagaggcgccgctggtttgcggtgctgatcggcgtgggagtacggcgaggagaacgcacgaggaggagaaggtcgagccggtgcgatcgactactttctctacatcgacgcgctaattcgcgagaattccttcgacttctcagcgtcttttccgctgtgcagcgcatcgaatggtaacgatctatgatctaatacctgcatggttcctggtttacgcgatagaaaattttgatttatgctatcgtagcctacgcgtatcccaataggatgtacccaaagggatgcatgcatgtatgttctataggctgcaggttgctcaccgaagctcggatgcgctacgggtaggcctggacagcgacgatgatgtagaggatgtcccggcggcggcggaaatcagcatagcaacggtgacaaccaccatccgaactccgggttgccaaaaaaaagagtggaacggctcaaagaccaactaaagatgctacacgagtcaggaattgcgccgaagctcacccgggatcaaggaatcgaagatcgacgccggcggccggagttggagaagatgacgccgatctccctcctcgattcaccgatccatgaggttctaggagtatcttgaagaggacgtctaggcgattctggtggcgcaagggttcggcttggggtggttcagtttggtcggaacgacgacaagaacccgacagcggtcatcgttgtgcgctccaaggcgtttgtgggcacggtggcattcccgctcaaccactgcatagaatgggatgaaattagatgaaatagagatggcattgagagtaggttttggaacgcaaaagaagaggaaacgaccgcggctcattaacgaatgtggctatcgtcttcttcgcggccggcgatggagaaacggtggagaagggcagcaaggatgctctccctcggttggatctgccctggaatggtgggtgaagagtggcgacgcgtctgggagaggcagagatggagctcggcgtttttagggcgtcgacacgtcgtggccacgcatcgaacgtgcccgagggctgtcggctcggtctctttctcagttctggtcggctagagaagttgcacagaggaagggcaagccaaggaggctgtcaggtgggtccaggtcggtgtaagctaggtgggggtgtgagggatgggtagataattgggtgcaagcgattttggacaaattttcaggattatttctcttacccatctttgttaattcatatattaatttgtggtacagatcaattcatgtggattttactgaagtagatgaatgtacctagtttccattttctttgattgcactcacgaattatggatagattgcacacagaaattaaaagaagataggctcaatggaaactgtttgaattttcaggagacataaacagagaagataaattctggaaaaattatatatattcataataaatggcctagtatttgaataaattgtttcccctatacactcccatgaagttaaatgcacttttaaacaaagtatggttttagccaattaggaattttaattagtctattatttaactgggttgacttatttatttgatgtaccaaatttagttattaaatcttaccaaaattacaatgagttgtatatgttaaatagagccttcatgaattttcccatggttttatcttgcacgaattattttagataattagcaagacttatctcttatatgtgtttccctttcctaaatgcatctaaatgtttataaaagttatatttggactcttcttaacctgaggtgatgttgatatgttagaattgcagtttaccttacatatgtcacaaactccttaccaatttatgtataagtttactttagtattaaattaagagaatgcttatcgagatgattaagatagaatataccctatatgagttaatttatttgttcacttccatgtacatgacttgtcttcagatggatgaccaaattagttttgtggggcttgacattggccttgttgatatattttaaggtgtatggtttctattttaacttcctctagctagcactaggccttaatggtttggttgtttatctagatcttagttatcattcatgagatctattatgaaatgcaaaacaaacatccaaatgcataagaaggacttaagtcaaaacatgatgtaagcgagtatgcatgctttcacttgtttttgcatctatggtataggttaaagatgaaaatgttttaatttgttctcaaattttacttcagtataagttagatcaacttcacctaggttttaaaatggaaatttttggttcacaaaattgaagaactttcctttcaactagttttgaagaaaattccttaatcctagaatttgggtatgttacagttggcttgtggctttgtggctttgtggctttgtgcccttgtggcctctcccctatcctcctagggtggcttgtatttatacccatagataaccccttgtccaagtaagaatacggagataaatatggatatgatctgagtagtccttgtcgtttccatgtagaactcttcttgtccttccttattcggaactccttctatatacgaggtttgtttccgtataagacatggtatgtggtgagccttgccgagcttagtcgattactattggtatgtggtatccataaccctgacaaccgtcaatatcaacaacccacgaagaggtgtatcgatctctaaggcgcaacaaaacaacgtcttgtacggttttagtcggatcatcaacatttacccaaatcgtagttatcaccaactcactgaatgatcaggccaatcatagccatgagtgtcttgagtggaactcatggtttatcaagtggtatttgcttggtgagttttttttatccacctataaccagaatatagccataaaaaatattggatccattacctagccatctttgtgcccgctgcattgttttttttagtttttgctttgttgagttttgtgttgcatcgtcgtgtcatgtttgttggtatttcttaacgctcacggataaaatctacaagcgcatggagatactgatgtagcacttcacccgggagtattccaaggtatcgatttctaaagctaatgtgtgtgcttaactcttctctagtttcatccaaggacacaaggcagatataggaaaagggtagagaggatttcctattgaggaacatggtctatacttcaggcactggcttactcactactgttggctgctgttaaatgccaattctatgccgccaatacctagataaaacatagttaataagacatccaacatagtggtagggtttaattctaacatattccatgagtgttgatacatatttggatgaaatccaaagttgggatgaaatcaagacttaagtgaaggaagaattgtcacgaccggaattaaccaaacgggcgttccttacgtgcgtgtattattccttgtcccaggaggcaaggtacaccaaaagttgatacatttcagagtttatcaagtggaagcgtaaatagttaatttattacatgggcggcgaaggcccagcacacacaaagacaaacgggaaacagcggaagactagggcgacgaccacaggcgcttgacggcaggcacgagctagacaccaaagccttcatcttccaggggctcctcttctgagtttgggaaaaattgagcaagactgagtacaaccaccgtactcaacaagacacacccacaagtgcaggataaatgcaagggagtacaaggggattataatataaagggttagagtttgtagtaaacagcattaaaagacacttagttgctcaaagctattttgtaaacacgattccagagctatacaatattattagtcaaggccgtgaacccacacgaacctaccttaacccaaggcctacgatgattcagaccgaactggcaacccgaccctgggtcccagctcgtcccaagccaacccaggccaaccattccacattttagttgttaagcatgttttaagaattaaaacactaacttgggtacattgctcggcttgcccataaccgagggcgcggctattcgaatagattatactctgatcagaggtgtacatctttacccacaagacacatcttcctcacgtgtaaccacgtgccacataccaccacggtatacggacggaagacatgacatagtttccaacccatcctagccatagacaagagtaccgacccaaccccacctatggccggaacccccgggacaggtaggcaggactgagcccctagcagcaggacaccggccctgtgccatgacatctcgactaccgggccgcagctcgtgtagccttcatttgtcctagagatgtccatcgaccaccgacttcgtccatctccatccgtgtacttttgtttataaccagactgagccacaaactaagccttacccactagacatgtggaagtacggtagtgctttgcaacagaggcccgaagaccggtccttatatggccgaggtgctactatcaaaaccatgcaccccgagcccagcctaaaactattttgaggattttgaatagagggggaggtgtgaatccaatttccacaataatcaaaccattccatagtgtccaggtgatatgaatatcccaaagtctagagttgtaaaaccacccaatgttgcctaattaaccagcgaagcatctacctaaaatcatactagtggtaccatgagtagagtgtccactagttggggttttgtttattctagggtgaacaaggaaataataacaataacaataataaggtcataacaaaggtaaataggcatggctagataaaacagtgataacgcgggaatttaaataaagcgataatgcaataatttaaatcaacataattttataaactgggattcaatatgtttaaggatgatgtgacttgccttgctcgctttcccaaacgtcggcttcaacttcaacgaagagcggatcttctgaagctgcagcgtctacacgaccaacgaaaaagaaaaggcttttactctaataaactccatataacaagcaggaacaaagcacaaaaatgggttcttgacttcttaaggaaaaattagagacttgaacggtccaattccgagttcaaatggccaagttatggccatttgaagtttatatgctctttaaatgaatatttgcgaatttcttcatttaaattttaattttaaaagggtttattgcgtcagccgaggggagggggcgcgcggaccgggtccacgggagtggggcccacgcggcagcctcacggtccacggtggaccgggtgcactcaggctcacaccggccggcgccgtgggtcccacgcgtcagccgcacccgagggcgcgggcggttgacggccgggccccacgcggcagccgctcggtgcgcccgaaggcggccacgtcggcgcggccggcgggaggcggcgcgcccgcgcccctatggtcgccggcggcggccatgggcacatcggagcggcggccgagagaggggagggaaagggggaaacgaggcggcggtccacggctcaccctaggtcgacggcgaggacgaaaaggcagccggagcggaggaaggcggctgcgcggctcgggtcgacggggacggcggcgctccggcggtcgacgagcgaaacggaggggtggacgaggtcggcgaggatgcggcgaagccgaaggaggcggcgctgaggtgggaggtggtctggggcgacgacggcggcggaccggagctcggcggcgacggcggagagaaagcgacggcgcgagctcgattccggcgaggaggaaggtcggcgagaggcggaaatggacggaggaggtgcggggagggtttaaatagggttggaagggggagagagcggccggtggggaaggaataggcgcgggaggtccggccgccatcaatggcgccggcgagatttgcgggggcaaatccgcccgtttgaacgcgagagagagagggaaaaatggggagaaagggagaggggatcacggggagtgatttcccccctctttattgcacgcggggacggcgggaggcggcgggattcgcggcggcggcggcgctagggcgcgggcgaggtggcgggagcggcgggaggaaggggatgacgggtgggccccacccgtcagcgagggtggcgggcgggcccgcccgtcagcggcgcgcgcgcggggagaggccggatgggccgcggggaaaggagagggagagggagggaaaggggactttttagagtttttctttttataaaatcattttaactttgtttatttcttaataattattatttgtgctctgaaaattccactaaaatttatttacgcattttaggcttttaggaaatatacaaaaatcctccaagccttatttgacttttaactttgcacattttaattgttggaggctttcacatggattttaattattctaggcataatttagaggatgtattttagagtcgttttgggacgtgacaaacctaccccccttaaacggaatctcgaccccgagattcggaagaactggcgaagagatcgggatgggctgctttcatctcgtcttcacgctcccaagtagcttcttcctcagcgtggttgctccattggaccttgcaaaaacggattacctggttcctggtcctgcgctccatggtgtccaggattttcactggcctctccacgtaggtcaagtcttcgcgaacttcaatttgctctgaatcggcctgctcggatggcactcgaagacatttcttgagttgcgacacatggaacacatcatgcacgttgcccaaggaggcgggcagctccaactggtaagcgacttccccgcgtcgagcaatgatacggaaaggacccacaaaccaaggtgcgagcttccctttcgtctgaaacctgtgtacacctcgcaatggcgtgacccgaaggtacacaaaatcgtccactgcgaattccagattacggcgtcggttatctgcataactcttctgccgggactgtgccacctttagattatcctgaatggttctgactttagcttcagcttctgtcaggatatcagtcccgaacacttggctttccccaacttggtcccacaatagcggtgtccggcatttgcgtccatacaacgcttcatagggtgccatttgtatgctggcttggtagctgttattgtaggagaactcggcataggggagactcttatcccaggtcttcccgaaatctaggacacatgcgcgaagcacatcttctaggatctgatttagacgctcggtctgtccatctgtctgcgggtgatacgcggtgctgaaatttaatcgggtacccagctcttcttggagcttcttccaaaagtgagaagtgaattggcttcccctatcagatacaattttcttaggaacgccatggagactcacgatcctagcgaagtagagctcggctagtttgttccctccataggtggtcttcacaggaataaaccgagctaccttggttagtcggtccacaattacccatatagaatcatatccgccttgggtttttggaagtccggtgatgaaatccatcccaatttcatcccatttccattctggtacttggagaggttggagaagaccggccggtcgttggtgctctgccttgacacgctggcacacatcacaaagggccacgaactctgcaatttcccgcttcatactaacccaccagtatttctctttcaagtctaagtacatcttcgtactgccagggtggatggaataagggctttcgtgagcttcctgaagtatcaactgtttaagttctctgtcgtctagaaggcatacccgatttccgttccatagggttccgtgttcatcctctgtgaaaccagcggctttaccctgtttcatattcttgaggagtccacgcatatccggatcattcttctgagcctcgcagatttgatcgagcaaggtaggcttggcttccagcgtagccaagaatccacgactaactatgcttaggttcagggcttccatctgttgattaagttcgggtggaatgccacggacgtcaagagtgttgcaatggctctttcgacttagagcgtcggcgaccacgttggccttaccaggatgatagtgaattcccacatcataatccttgatgagttctaaccatctcctctgccgaagattcagatccgactgagtgaagatgtatttaaaactcttatgatcagtatatatttcgcagcgattcccaatgagataatgccgccagatttttagagcatgaaccacagcggctaactccaaatcatgggtagggtagttgccttcatgaggccgaagctgccgggaggcataggctaccacatgaccttcctgcatgagcacacaccccaatccttggcgcgaagcgtcacagtacaccaggaagtccttgcgagtattcggtaagattaacactggcgaggaaaccagcttttctttgagagtttggaacgctttctcacattgcgggctccacacaaatttttcttccttcttcagcaactgcgtcatgggtctggcaattttggagaaattctcgatgaatcttcggtagtacccggccaaacccaaaaagctgcgaatttgagtgactgtcttgggttgcttccaatcagtgacggcggtcactgtttcggggtccacagcgactcctttagcagatatcacgtgccctaagaatttgacttcggaaaaccagaactcacacttgctaagcttggcatacaattgatgttcccgcaactttcccaacaccagacggagatggtgctgatggtcttcctctgattgtgagtacaccagaatgtcgtcaatgaaaaccacaacaaacttatccaagtattccatgaacactttgttcattaagttcatgaagaaggcaggagcattggttaaaccgaacgacatcaccgtgaattcatacagtccgtatcgcgtggtgaatgcggtcttagggatatcttcttcacgaatacgtaattggtgatatccggaacgaagatcaatattggagaatacagtggcacctttaagctgatcgaacagatcatcgatccagggaagagggtacttgtttttgatggtaacttcattgagagctctgtagtcaatgcacatcctctttgtcttgtctttcttctccacaaaaatcacaggagcaccctagggggaagtactcggccgtatataccccttttctttcaactcttccaactgtttcttgacttcggccagttcatttgatgccatacggtagggtcgcttgtacaggggagtggttcctggagcaagatctatccggaactcaatctctcgcttcggcgtcataccgggtagttcttccggaaacacgtctccgaactctctgacgatggggatttctgacagtcctatctgatgaagttctgaactaccgacagaggttgggggagcaaagaaaacaaccggttgttccggccctcggtaccgagtgacagtgcgtcttgcacaatccactactccttggaattgagccaaccaattcatcccaaggatcacatccaagttcttggtgtctagaagaatcagatccgagggaaaaggaattccctgaatttctataggaacggcagggctataatactttgctgtcataacccctccaggggtggtgatgagcagagggttcctaagcctttctacccccaactgatttctccccacgaatggcacagatataaacgagtgggaagctccagagtcgaacaaaatggtagcagggatggaatgaatgaggaacgtgccaacgatgacgtctggagttgtcagcacatcctcggccgtcacgtggttcacccgaccccgaatgacatccttaccaccgttgttggggcggggaggcgcttggccttgctggcgcctcggctttgggcatttatccgcaaagtgcccatgctcgaagaagttgaagcacagacgctgctgaccttgaacgtccttgcggccttgaccaggctgcacggctggcgtaggaggatggggcgcacgagtcccttgctgactctgctgttgctgcggctgtgggacgcgcaccacgaattgaggtcggggcgcggagcgaggttgctgctgctgttgctgctgcgaggacgatccccctggatagggattggtgtagcggaccctttggttaggcccctgttgattgcggaaattcgccaagcgacgcttgtgcgactccagttccttgtgcttggcttccaagcggatgctcttgtcaaccaaacgctggaaatccggatagtccccggagaccagacgcacggacagctcagggtccattcctgccaagaacttctcttgcttctcctcatcttcacgaacatcctccggggcgtatcgggccaggttgttaaactcatgcaaatactccatcacagagcggttgccttgtttcaactctcggaattcccttttcttaagggccatgactccggcgggcacatgggttctccggaaagcggcggtgaagcgggcccaagtaataggctgcccttctggctgcgtagcctggaaatggtcccaccatagagatacgggcccctgcagttggtgagcggcaaagatgactttctcctcatcgttgcactgcacggtgtctaactttttccccacagcatgcaaccaatccaaagcatccacggggttattggagctagagaaggtaggcggacggatgcggaggaactcggcgagtttagagagttgtgggggcggtggtggagcattatattgtggcggattttggatgtggaggaaagcagccatcatgttggcctgctgggcgaggatttgggtggggatggcgttggtgtctcgtggtggtggtggaggcggaggaggaggtggaggtgggctgccatggttgttgtggttgctaccttcgggttggttgccatcaccggtattagcacttctcctggtcgtcaccatctgaaaatcccacacagaaccagcaaacagagagagctgacaattaaagctaaccacccacgactaccataattcttgaatttattactgctattaaattggttcattaaggttcaagttgcttaagcaaataaaataaagacaggctccgacacagttataccacacaccggcataaccatgccccatacgactctagcagaaaaacaaacgagaagaacacacgcgcaagcctactaactgctcgatcacccatcccaaattgctccaggccaagcacgcttaaccctagagttctttggagattggcttccggaaaagaaattgcagcttgttgatatgagtattctattaatcctattaagccctaggccaggatgttacaccctcacccccttaagagagatcgacgcccccgtcgatcaaccctaggccaggaacgtcctctcttggccacgtccatgtgtccagtgctagcgcatgtgccatgctgtgtaaccactcccggtctacaccagccatgcgcaccatgcctgcgcaactgcgacacacgtgcccgtgaaaccgcgagaaatacatcctctaaattatgcctagaataattaaaatccgtgtgaaagcctccaacaattaaaatgtgcaaagttaaaagtcaaataaggcttgtgcaaagttaaaagtcaaataaggcttggaggatttttgtatatttcctaaaagcctaaaatgcgtaaataaattttagtggaattttcagagcacaaataataattattaagaaataaacaaagttaaaatgattttataaaaagaaaaactctaaaaagtcccctttccctccctctccctcttgggccggctcggcccatctccctctcctctccccgcggcccatccggcctctccccgcgcgcgcgccgctgacgggcgggcccgcccgccaccctcgctgacgggtggggcccacctgtcatccccttcctcccgccgcctctcccgcgccctagcgccgccgccgccgccgcgaatcccgccacctcccgccgtccccgcgtgcaataaagagggggaaatcactccccgtgatcccctctccctttccccccatttttccctctctctctcgcgttcaaacgggcggatttgcccccgcaaatctcgccggcgccattgatggcggccggacctcccgcgcctattccttccccgcgggccgctctctcccccccttccaaccctatttaaaccctccccgcacctcctccgtccatttccgcctctcgccgcccttcctcctcgccggaatcgagctcgcgccgtcgctctctctccgccgtcgccgccgagctccggtccaccaccgtcgtcgccccagaccacctcccacctcggcgccgcctccttcggcttcgccgcatcctcgctgacctcgtccacccctccgtttcgctcgtcgaccaccggagcgccgccgtccccatcgacccgagccgcgccgccgccttcctccgctccggctgccttttcgtcgtcgccgtcgacctagggtgagccgtggaccaccgcctcgtttccccctttccctcccctctctcggccgccgctccgatgtgcccatggccaccgccggcgaccataggggcgcgggcgcgccgcctcccgccggccgcgccgacgtggccgccttcgggcgcaccgagcggctgccgcgtggggcccggccgtcagccgcccgcgccctcgggtgcggctcatgcgtgggacccacggcgccggccggtgtgagcccgagtgcacccggtccaccgtggaccgtgaggctgccgcgtgggccccactcccgtggacccggtccgcgcgccccctcccctcggctgacgtaataaacccttttaaaattaaaatttaaatgaagaaattcgcaaatattcatttaaagagcatataaacttcaaatggccataacttggccattcgaactcggaattagaccgttcaagtctctaatttttccttaagaagtcaagaacctttttttgtgctttgttcctgcttgttatatggagtttattagagtaaaagccttttcttttccgttggtcgtgtagacgctgcagcttcggaagatccgctcttcgtggaagttgaagtcacatcatccttgaacatattgaatcccagtttataaaattatgttgatttaaattattgcattatcgctttatttaaattcccgcgttatcactattttatctagccatgcctatttacctttgttatgaccttattattgttattgttattatttccttgttcaccctagaataaacaaaaccccaattagtggacactctactcatggtaccactactatgattttaggtagatgcttcgctggttaattaggcaatattaggtggttttacaactctagactttgggatattcgtatcacctagacactatggaatggtttgattattgtggaaattggattcacacctccccctctattcaaaatcctcaaaatggttttaggctgggctcggggtgcatggttttgatagtagcacctcggccatataaggaccggtcttcgggcctctgttgcaaagcactaccgtacttccacatgtctagtgggtaaggcttagtttgtggctcagtctggttataaacaaaagtacacggatggagatggacgaagtcgggggtcgatggacatctctaggacaaatgaaggctacacgagctgcggcccggtagtcgagatgtcatggcacagggccggtgtcctgctgctaggggctcagtcctgccgtaggtggggttgggtcggtactcttgtctatggctaggatgggttggaaactatgtcacgtcttccgtccgtatactgtggtggtatgtggcacgtggttacacgtgaggaagatgtgtcttgtgggtaaagatgtacacctctgatcagagtataatctatttgaatagccgcgccctcggttatgggcaagccgagcaatgtacccaagttagtgttttaattcttaaaacatgcttaacaactaaaatgtggaatggttggcctgggtttgcttgggacgagctgggacccagggtcgggttgctagttcggtctgaatcatcgtaggccttgggttaaggcaggttcgtgtgggttcacggccttgactaataatattgtatagctctggaatcgtgtttacaaaatagctttgagcaactaagtgtcttttaatgctgtttactacaaaccctaaccctttatattataatccccttgtactcccttgcatttatcctgcacttgtgggtgtgtcttgttgagtacggtggttgtactcagtcttgctcaatttttcccaaacccagaagaggagcccctagaagatgaaggctttggtgtctagctcgtgcctaccgtcaagcgcctgtggtcgtcgccctagtattccgctgtttcccgtttgtctttgtgtgtgctgggccttcgccgcccatgtaataaattaactatttacgcttccacttgataaactctgaaatgtatcaacttttggtgtaccttgcctcctgggacaaggaataatacacgcacgtaaggaacgcccgttgggttaattccggtcatgacaagaattctatccatacaagagtgggccttaaacttcatcgaaacatcagaaaataggcccaactacctgagaaatggataaggcaagctgagagagagaacaggccaagttctggtcctgttgggcccagccagggttcggccggactccaatctcgaccgttcagtctagggttttcatggacgctccagatgctctccggatggtggttgcgggacattttcaataattcgcatagcagtaaccgccatacttgcctataaaaggagttaatcacttcacttctcagacacactccaagcttgagctgagttataagaggttctattgtactatattgtatactagaattagggagagagtaaagtagaagaagttggcggaattccggagttgtcggtaatcctctcttatttcttatactttgttaattactctgttttaatagaattatcattctgagtaattaagatttactcggtgagaattaattcttggttagtttctaattagcgtgcgggatcattgttcactatagtcctttaaaatatagtgattgctttagtgtttagctagcgctaaagtaattaattgtgtagacgtggtgccagggtaattaatttccggtggttgcttcgtatcccacagtaggtttgaggtgggtgtagaggtggtgacatccctcaattacactaaagtcctccttgtccgggtacgcagtagagtgacatctaggagcagcgagctggccagtgcctgaagtactaggattaaactgagctttctgtagacactatttctcactagtaaatcctctctatcctttgcttacctttgcttcgtgtccttggatgaacctgacaaggagctgagcacacacgttccctagggaaatcgataccttggaatacttccaggtgaagtgctacatcggtatcttccgtgtgcttgcggattttatctatgacgttaaaaaataccaacaaacatttctggcgccgttgccggggaatggttgatgttcatctccgaaccttgttcatcttcgtatcatttttacttttcattcttcaaccttcacccctgctatccccaataagtattcttgtaaaactcttctcacccatggagccacaatctatctttcaactatctgctccacggggcaaatcttttgagccacctccttcatcggggccaatttttacaactggctatgaaagtcgccccgaattaataaggagtctgcattctatctaggcatcactaccggaggatcattcatgcaataaactccatctgaaggaaaagtaagtctagatcggattctagaaaatacttccttcatggatcaatgtaatgaactcctcccggaagcatcagtgtctaggattgaggaacctccgacacccgaatcttagtctgaaccatctacctcaaccgattcggccgaggaaccttccgccgagccattgcctgttgagaacgaagaaattcaaactccgggatgtgctccaacgttcagggatgatctttatgaagattatggaaacaccttgaactattttagtaaaaagaaaccacctattcccttgccacctcctgatccgatagaatatcaatatctgaaagaaacggttcgggagctgacatccatcatgagtgacgaatggttaaaggaggaaaatgttgatgcaaaaaacacacactagcctaggagatctgcttagctccagtgcaggtcctaagaattgctttagggttttgagcatgccagctggtttgatcatgcaaccaacaagaaataaaagaagaacaattaagtccgcaaatgatagccgatcggctgtgttgccgatgatgtttcatttgatatcaggccgatgtgatgtgaaccagatcggcaataaaatactaaacaagatagaattaaatctacttgattggctgcagatatcaatgatatataatctttttctaaaaatatgtctaaactaagcgattgggatagatcggacagtgagccgagacagtataaatcacttatgtttaaaagtactttaagacaaagattatatatatttatagcttagccaatgaggtaaatctaagatatatcggctaatactctgataccatctatactaagatattaaaacagacaaaatataccaaacaacaagcttaatatatttctaagcaataagatcttaatataaagggcaagtttagcatgtcaaacaaataaaacaactaaaccaggtaagatcggctgaaaccccgatactatctctatcaataatcatagaacaagttagatattataattctagatattacttaatagatcgaacctaaccgatgcagcattaagtacaaaaagaagcataagatctagacaaaccgatgaaaatctctttgagatggtagatatactatataaactagatcaacgttgatatctaaccctatcggccgccttcttattaatagatattaaccgatctagggttagatagcaatattgattgagattttatagcgtatatgataactcgacgattcacataaacaagattagagtatcatgaagatgtaagcactaatcccgagaacgcaagccgccatgacaagttttacctctcatcggagatcgaaaccgatgcagcccaactcgaaagcaagaactcgtcgaaatagtgaaagtagaaaagggtggcaatgcgccgaaagtgttattgaattgtttttgtcattatacatggtcttgggttatatttacacccaaaatacataatgtatccttgccggacacgactctaaatctgttacaaccgtaagatacggacaagtcttttaggcagactcttgccggtaaatatctctaaggaaactacccacaatatcctaattaatagatacaattgcctatccgtgagctcatctcaatcatggcaatacttgtgcagcacgtcgatcaatcccaaagatgattgtagagccaccttagcgagatcggctccatcggctatcctctatctgattgtcacgcccagaaattcccgaatagaattccaagcaaaatgtacattaaaatccccgtccaggaccagccggggtacacaaacgacaatgttgacattcagatccacgtcttacaaacatcataaaagtcttacataaatgcagcggaaagaaagaaagacaacaggagctaagccttgacttgaactgcagcgggaacaccactccacaggcatcctcgacggcacggacaaagcctactcctcggagaaaccttcatctgacccgaactcgaaatctggggttgggaaaagtagagcaagactgagtactacccactgtactcagcaagtcataccggaataggggtatgatgcagggaatcatcaaagaagagctgaagtggttcatttgcataaagcgagcatttataaacagaaagtgaaagatttaaacagttgtaataattaattaacatcaactatccactgtccaacgctaacccatgttgcgacaggcccaaccatccacctaaactatccaaattaaaagattgcactaaggtgagactaatcacggtgaatctggttgaccgcccataaccgcgggcacggctattcgaatagttttactctgatcagaggtgtacaactgtacccacaagacacagccccacaacacgtttccgtgcgccgacatgccaccacgacatatcggaaagaggccgtgacaggaccctttgcataaccccctctagcaaagcacaccacacctcaggtttcacccccgtccccagcgggcaacgggcagtcccctctcgtgcctaggtgaatccggaagcgacagaggtcgtcgcagggcccgccccgctccatcacgcccacccttgcctggatgcgtcgactagaggaaagatacactacaagtccagccgttgcccacgctggcttgtggtaagtacgataagttcttccagggcatcccgcgaaccggtccttaactgccatgggtgcgaccagcaaaaccatgcacccacagcccaccatgtggtttattttaattaaccaacaccaaaacggtgtcactaatccaacaacaccattggaaccaacagtctaaacattaatatgattttccccgttgtgaactagttgaactaagcatggctaagcaattcctagtccaaactctaatcatgttataaccccaagctaacaaaggagcatggtatccgaaaagcatggctgtaacaataggtaaccatcccatagtaatattataaaacaatgcaatatttgaaagaaaacaatagagcatttgcaatatatgatcaatatgttcaagtgacaagcatgacttgccttgctctgctgctggaggaacctcggcgactatctcgaagtaccccggagcgtcggaggaatcggaatctagcgacatacaaagcaaacattgcaaacaggctataagactactgaaacagggaacaaaaccatttttaatggattctgcacagttttcttgatttactgagacttgaatgggcttaaacggagctcggatgaattagttatggattttagaagattcactgtgtttattactataacagaaatccttaaataatttattgcgcaatattttccagggctgacgtcagcacaggggaagcggcgccgacatgcggggcccaccggtcagcggctcgggagagggaggaaagggcaccggcacgcgggcccactggtcagcggctcgggaggaaaggggcggcggcacccggctcggcttggctcaaggccggccgaccggccgcggcgacggcgacggcgcgcgcgcgaacgcgttgccggcgacggcaaccggcggcgaaggcgacggcgcaaaaggcgacgcgaaggcggctgcgctaagtggcggctaggaaggggagggaacgggcggcgataaaggcggccgccggctcggctcggcatcaaagccgacctgccggccaggtctagcggcgacggcatgcggccgacgacggcggcgaccggcggcacggaaggcgccggtgacggccgaaggcgacggtgcgcaacttgaagcggcggcgcggcactaggaggagaggaaggggaaaagaggggagggatgcctcaccgagggtggccggcgcggaggaagacgatggcgaacggcgacggcaagccacgggaggatacggcaaccggcggacgagcttccgggtgccctaaggaaggagaagagagggattagatagagggagatgaaccacggcgaccggtattcacggccgaaagcggcggtagcggttgaactcaccgcagcgcgaggggaggcgaatttcggcgacgaaactcgacggggaaggggcggccggggtggagcttagccttgcgaacccgacggcgaagacggcgtggtgcggcggcgaccctagcggcggctaatggcggccggagtagcggaaacagcggcggcaagaggttgcacggcgcgggagcgatgggaggctcgggagaggtcggcgaaatggggaaaaagcgagagggggcgacggagaagattaaattgggagagagagaaccggacgtggccgggagaggcgggaatcgccggccgacgtggggagtgggggaggagagagaggcgggattcgaaaatcgaatcccggccatctcggacgcgggcgcgggcgggagagagaggggagtgggcgcgggagacgcggcgcaagcgcggacgtggtcgacgtggcccgaaggaggcggagacgtgggcgcggcagcggttgcgggcgcggtggcgcgccgggagcggcgggaggtgggggaaggacccgacaggtgggccccacctgtcggcgaccccgagagaggagggcggcggggcggcctggctgggcctcggcctgcggccggcccagcagggagggggggagaaaggagagaatgggccggcggcccattcgggaaaaaaaagaggaaaagagaggaaaaagaaaagaaaaaaaaagaaaaaggaaaaaggattttccctagaattaaaatattgcttgctcaattttaattggttaaaattatttctagagctctgaaaattccactaaaaatcctgttaatgaatttcgacatgtataactcaagaaaaattccacatgtcaaatccgattattatttgcattactttcttagggttttctcttgatttctcctgcattttcttggggtcgttttaaaaattaaattttaggcttgggaggagaacttcggggtgtgacaaacctaccccccctttaaacggaatctcggccccgagattcggaggagctgctgaagaggtgcggatgggcggctttcaactcatcttccctttcccaggttgcttcctcttctgaatgatgactccactgaactcggcaaaacctggtgaccttatttctggttcttctttcgctggtatcaagtatacgaaccggcttctccacatatgttaggtcctcctggatatcaatgtgctccgaatcagcctgttcttcaggtacccttaagcacttctttaattgggacacatggaacacgtcatgggtgccgatcatattggatggaagttctaactgataagcaacttctccccttcgttccaagattttgtatagtcccacgaagcgtggtgccaacttgcctttcgtctgaaaccagtgtactccccggagcggagtgacacgaagatacacgtaatctcctgcctcaaaagtgagctcccttcgacggttatccgcgtagctcttctgtcgagactgagcaatcctcaatctttccctgatgattctgactttctcttctgcttccgctaatacttctgttccgaacagttgacgttcgcctgtctgatcccagaagagaggtgtgcgacacttccggccgtataaagcttcaaacggtgccatctgtagactggcctggtagctgttgttgtacgagaattccgcatatggcaagcttttgtcccaagctccaccaaaatcaagagcacaagctctcaacatatcttccaagatttgattgactcgctcggtctgaccatcagtttgcgggtgataggccgtgctgaaatttaaacgggtccccagttcttcctgtagcttctgccagaattttgaggtgaactgactccctcggtcagatacaatctttttgggtactccatgtaggcacatgattctcgaaaggtaaagctccgccaaccttttgcccgtatatgtggtatgtactggtatgaagtgagcaaccttagtgagtcgatccacaactacccagatcgattcgtgacccgatgatgtccggggcagtcctgttataaagtccattccaatctcctcccatttccattccgggatttgaagaggttgaagtaaacctgctggtctttggtgctctgccttcactcgttggcaaacatcgcagagtgcgacgaattcagctatttctctcctcatgctgacccaccaaaacttttctttgaggtcttgatacattttagtgctgcctgggtgaatggagtactgggtctgatgagcctcggtgagtatcagatccttcagttccttgtcgtcaggtacacacaatctttctcccaaccagattgtgccatgctcatcttcgtggaaatcccgggcttttccgacactcatgttctttttcagctctgctatttcagaatcatttgcttgagcgtaggccgtgcctccagagcggctacgaacccgagttcaacaattcccacgttgagatgctcaaactcctgccgcaattcctcacacatgccctcgatgcatagggcagtgcagtaacttttccggcttaaagcgtctgccaccacattggctttacccgggtggtagtgaatactcatgtcatagtctttgattagttccaaccatcttcgttgtcggagatttaggtccggttgggtgaagatgtatttcagactcttatggtccgtatatacttcgcagcggttgccaatcagatagtgcctccagatcttcaaagcatgaaccactgctgccaattccaagtcatgagttggataattcccttcgtgtggacgcaactgccgtgaggcatacgcaaccactctgccctcttgcattaggacacatccaagtccgtgacgggatgcatcacaatagacttggaagtctttcatcgggtcgggcagaatcaaaacgggtgcggatactaatttcttcttgagctcctcgaagctcttatcgcactcggctgtccatttaaacttctcatccttcttaagcaactgagtcatgggtcgggcgattctggagaaattttcgatgaatcgacggtaataaccttcaagtccaagaaaacttcgaatctacgacacggtcttcggtggggtccatttggtaactgactccacgttcgatgggtcgactgccacaccctgagctgtaatgacatggcccaaaaatttgacttccgtcaaccagaagtcacacttgctgaacttggcatatagctggtgctccctcaacttctcgagtaccagacggaaatgttgttcatgtttttcttcggactttgaatagataagaatgtcgtcgatgaacaccacaacaaacttgtccagaaattccatgaacactttgttcatcagattcatgaagaatgcgggtgcgttggtgagtccgaaagacataaccgtgcactcatatagcccgtaccgagtggtgaaggccgtcttcggaatatcctcttcccgaattctcaactggtggtagcctgatcgcaggtctatcttagaaaacactttagctcctttcagttgatcaaacaaatcatcgattcgcggcaaaggatatttgttcttgattgtgacctcgttgagtgcgtggtaatcaacgcacatcctcttcgtcttatcctttttctccacaaaaatgaccggagcacccaaaggtgaagtacttggtcgaatgtaccctttctgcagctgctcatcaacctgtttcttgacctctgctagttcgttggccgccatcctgtatggtctcttatagattggagcagttcccggtgccaagtcaatccggaattcaatctctctcttgggtggcatggtagtgaggtcttcggggaacacttctggatactcgcagactatgggtatatcttccaattttctcgagttcttctctacggtgtccactgggatttccgcttcaatctgattcaaagagacccctttctttggcgagactagagatttgtacaccacggtttctcccttctcgttgatcaaggtgactgtgcgattcgcacaatcgatgacccccttaaacttggtcagccaatccatcccaagaatgacatctaggtctttggattcgagaagaatgaggttggctagaaatggtgatctttgaatttctattgttatagaagggctgaattgaaccgaagtggagctattccctggggtatgaacccgcattggtgtgctaagttcctctcttattaacagatgcatcccgacaaatttctttgaaatgaaagaatgcgtcgcaccagaatcaaaaagtactgttgcagggattgagttaacagggaacgtacccagtacgacctctggtgctgcttgtgcctcctccgcagatgcgtggttgacacgagcctggataaaccttggcccggcacgcctaggcttcgggcatttgtcagcgaagtggccaagctcgccacagttgaagcaggaccctggttttgctccagtctccttcttggcttgcgcgggcgggcctgactgtgccggtgccattggtgggcgtgaagctgcaccgcggttggactgacctccatggtggttctgactgccactggcgccctggggaaagttgctagggttgaacgggcggtgctgacgaacgatcatggtggtaggtccaccctgctgcccaggagcgaagcgcggcctctggtgacttccctgaggtgccctgaactgtgcggccttcctcttcctgtccatcttgttgcgttgatcctcctggcggattgccttgtcaaccaacctctcaaagtcagcgtagtccccggatatcagttggttggtcagctcatcatccagacccgccatgaacttctcctgcttctcggcgtcggtgcggacatcctctggtgcatatcgcgcgaggcgattgaactcgtggaggtactctgtcacagtcctgttgccctgatggagtgcccggaattccctcttcttttgtgccacgaccccgtctggcacctgcgccttccagaagctacggcagaactctgcccatgtgacttcagtacctggtgggcgggtggccatgtgattgtcccaccaagctgacgcgggaccctgaagctggtgtgtggcgaaagcgaccttctcctgatcattgcactgcaggcgattcagcttcttctctatggcatggagccagtcattcgcctccatggggttggtggtgcttgagaaggtgggtggcctgacgcgtagaaactctggcaacttggactgagggggagggggaccaaactgctggtgctgctgttcgacgtgctgcatcatcctctggtgcatctgctggtgctgctgctgcatctgctgcatcatggctgccatcatctgagtctgatgtgccataacttgggcaagggtcggattctcgggaagtggtggcggaccattgccggaatcactgctggggtgcacaccatcagcgcgttcttcgccgttgctgccctcgcctgttgcgcggctaccattcctggtgtagaccatctggagggaaaagcagacggggaaaagaagaaaaacagatgctcaggaactaagctttattacaaaggaattaaaactgcaattgttctgatctgaattaaaacacttaaagagcaagcaaaaatccttattaagacagccatatcataggcacatgatatcgactgtcgactaaccccaaacaagcaacctaaacacacaaattaacaagcagaagctagacagtcgataaactaatggaaaacgagcctaatgctcggaacggctcctgcggtcggtggagtcgaagacgtcctcctgctcgtcaccaagtccctctgagcgactcccggagcctggcagataagtctcgccactgcctgactctgagccactgggagtagcagacaaccaacctccattgccactggctggacccctggcggctgatgcgggagcgaaggagagagcggacgcaggagctggagctgcaggaactgccggagctgcgggcggaactggaggtgctgcgggagctgcggatggaggtgggttcctgggcgcaagctggatgcgcacgggtgccgtcgtcgtcttgcggggcgtagtgcggatccggactcctcctggcgctggaagaccctttagctgagcgttctccctcttcaggcgcgctatcttgtccttcagagcgacgatcctcatgagcttcccatcgttcaaggccttggtcgccttgtgcaggtctgagtgcatcctgtccaatcccctcatcacagcacacatgtgaccaaaggtggtgtcgttctcgccagctgtcggatggaaggagctgacgtcatcaccgttggctcgacgggggtggaagcggtacgccgtgtcgtggaagatgtagttgtggcactcccgtagtctggccatcatcaagtaggctgcctcctgacaggcgtgatctgctgtgcctccagatgcctcgaccaccatgttagctaggcaggtacccacgtagccgtggacctccaagcgaacacggtgaggaagctcgccactgagcggtggaatcgtcgtatactctggcgcgttggggtagcccaccaccaatgtcatgcgtgccaactctgccacaaagtcgatcatgccttctccgcggtggttgggtgggtggccggccatctagagaagacagaggagtaggatcaatgcatgctcaaatccaagtttaaataaagcaataaaagactcaaataagagaatcgaatgaaagcgaaatttttatgcatagatcattttgcatgagagcgaataaataagacagactcacataacgataaaataatgagaaattagatacatactaataataacaaataaagcataaataccttgcaacccatgttcctgagctaggacctaatgcatttcacccatcaaatcccaactgactgacgaataaatctcaacagttttactaaaaccctggactgacttgttttgacaaatctcactttaaacgagcgaccaagatttttcccttgaaccacaaaaactgatcccaattttcccggaataaaatccaattgcaaggaacatatgcaatgaaaaggattcagagggctcttaggtttttccatttggcttgtcctacggtcaatgtcggatctgataccaacttgtcacgcccagaaattcccgaatagaattccaagcaaaatgtgcattaaaatccccgtccaggaccagccggggtacacaaacgacaatgttgacattcagatccacgtcttacaaacatcataaaagtcttacataaatgcagcggaaagaaagaaagacaacaggagctaagccttgacttgaactgcagcgggaacaccactccacaggcatcctcgacggcacggacaaagcctactcctcggagaaaccttcatctgacccgaactcgaaatctggggttgggaaaagtagagcaagactgagtactacccactgtactcagcaagtcataccggaataggggtatgatgcagggaatcatcaaagaagagctgaagtggttcatttgcataaagcgagcatttataaacagaaagtgaaagatttaaacagttgtaataattaattaacatcaactatccactgtccaacgctaacccatgttgcgacaggcccaaccatccacctaaactatccaaattaaaagattacactaaggtgagactaatcacggtgaatctggttgaccgcccataaccgcgggcacggctattcgaatagttttactctgatcagaggtgtacaactgtacccacaagacacagccccacaacacgtttccgtgcgccgacatgccaccacgacatatcggaaagaggccgtgacaggaccctttgcataaccccctctagccaagcacaccacacctcaggtttcacccccgtccccagcgggcaacgggcagtcccctctcgtgcctaggtgaatccggaagcgacagaggccgtcgcagggcccgccccgctccatcacgcccacccttgcctggatgcgtcgactagaggaaagatacactacaagtccagccgttgcccacgctggcttgtggtaagtacgataagttcttccagggcatcccgcgaaccggtccttaactgccatgggtgcgaccagcaaaaccatgcacccacagcccaccatgtggtttattttaattaaccaacaccaaaacggtgtcactaatccaacaacaccattggaaccaatagtctaaacattaatatgattttccccgttgtgaactagttgaactaagcatggctaagcaattcctagtccaaactctaatcatgttataaccccaagctaacaaaggagcatggtatccgaaaagcatggctgtaacaataggtaaccatcccatagtaatattataaaacaatgcaatatttgaaagaaaacaatagagcatttgcaatataggatcaacatgttcaagtgacaagcatgacttgccttgctctgctgctggaggaacctcggcgactatctcgaagtaccccggagcgtcggaggaatcggaatctagcgacatacaaagcaaacattgcaaacaggctataagactactgaaacagggaacaaaaccatttttaatggattctgcacagttttcttgatttactgagacttgaatgggcttaaacggagctcggatgaattagttatggattttagaagattcactgtgtttattactataacagaaatccttaaataatttattgcgcaatattttccagggctgacgtcagcacaggggaagcggcgccgacatgcggggcccaccggtcagcggctcgggagagggaggaaagggcaccggcacgcgggcccactggtcagcggctcgggaggaaaggggcggcggcacccggctcggcttggctcaaggccggccgaccggccgcggcgacggcgacggcgcgcgcgcgaacgcgttgccggcgacggcaaccggcggcgaaggcgacggcgcaaaaggcgacgcgaaggcggctgcgctaagtggcggctaggaaggggagggaacgggcggcgataaaggcggccgccggctcggctcggcatcaaagccgacctgccggccaggtctagcggcgacggcatgcggccgacgacggcggcgaccggcggcacgggaggcggcggtggcggccgaaggcgacggtgcgcaacttgaagcggcggcgcggcactaggaggagaggaaggggaaaagaggggagggatgcctcaccgagggtggccggcgcggaggaagacgatggcgaacggcgacggcaagccacgggaggatacggcaaccggcggacgagcttccgggtgccctaaggaaggagaagagagggattagatagagggagatgaaccacggcgaccggtattcacggccgaaagcggcggtagcggttgaactcaccgcagcgcgaggggaggcgaatttcggcgacgaaactcgacggggaaggggcggccggggtggagcttagccttgcgaacccgacggcgaagacggcgtggtgcggcggcgaccctagcggcggctaatggcggccggagtagcggaaacagcggcggcaagaggttgcacggcgcgggagcgatgggaggctcgggagaggtcggcgaaatggggaaaaagcgagagggggcgacggagaagattaaatagggagagagaaccggacgtggccgggagaggtgggaatcgccggccgacgtggggagtgggggaggagagagaggcgggattcgaaaatcgaatcccggccatctcggacgcgggcgcgggcgggagagagaggggagtgggcgcgggagacgcggcgcaagcgcggacgtggtcgacgtggcccgaaggaggcggagacgtgggcgcggcggcggttgcgggcgcggtggcgcgccgggagcggcgggaggtgggggaaggacccgacaggtgggccccacctgtcggcgaccccgagagaggagggcggcggggcggcctggctgggcctcggcctgcggccggcccagcagggaggggggagaaaggagagaatgggccggcggcccattcgggaaaaaaaagaggaaaagagaggaaaaagaaaagaaaaaaaaagaaaaaggaaaaaggattttccctggaattaaaatattgcttgctaaattttaattggtgaaaattatttctagagctctgaaaattccactaaaaatcctgttaatgaatttcgacatgtagaactcaagaaaaattccacatgtcaaatccgattattatttgcattactttcttagggttttctcttgatttcacctgcattttcttggggtcgttttaaaaattaaattttaggcttgggaggagaacttcggggtgtgacactgatccatcattagccgatgcagtcacttagctgatgcctttcgtagctgatgcgtactctgtttctgagaaacgatcctccgccaaatccgattcgattttgatgcatgtcctaccaaatttggtcatcaacagcagagctttcttccagagtaattcggatcattaccactcctcgaaccattccatgttgccacgtcgggtcttttaactgaaatgcatcaatccacaatactagtacctgctctacaatctcagtggttaatgatgcatgtcagtatgatgttactaagctatgcgactcttttgtgcggatccttattatccgccgctcttctaatgattagatttcgaaagaatttagatttcttttcgaaaaagaagaaaaatgttttgcttaaaacatttttctttaatgagattgaatatttctatgcaaaaagaagtgctttaaaaagcaccttttttcctttatttccaaattattacaaatatcaattaattgagcgtttggattcttggagttatcgtgtcattagtctagggtttacccttttaaccataggtattctttgtggagcagtatgggctaatgaggcgtggggatcctactggaattgggatcctaaagaaacttgggcatttattacttggaccatatacatatacatatacatatacatacatatatatgtataatgtatataaattccagaaccctttgcgatcacttacctgagcgacaagacaattacaccgactaacaaattcttcaagcatcccaacgggaatcttattgaaggatttgagattgtccaggatgtgcccatcattcatgacgacaaagaggcaatcttgaaatcatgtctttgaaatccatgaaattgatgttctaatcaggcatcccatcgagaaacttcttatcaacaccctcgattaggcagcctcaaattctctttaggagggaatgagttttcaatcccattcaagcaatcaaggttcgccttgactgactccattcctgaagatgaatatgcggaggaagtaacggttgttctaccatctgagtcccctgaaccatgtcttgagaatgatgtcccagacttctgttgatgcgaaaaacacacactggcctgagaaatttgctttactctagtgcaggttcaaagatttgctttcgggtttaggtcgtgccagttggtttgatcctgcaaccaacaagaaacaaagaatccaaagttaaatctataaacgatagccgatcggctggattgccgatgacgtatcgtttaacactggaccaatgtaacatggatcagatcagcagtgaaatatataataatgaaagaattagatctactcgatcggctgtagatatcaataatatataatcaatgcttcgaaaatatatttaaactaagtgattgggatagatcggacagcatgccgagacagtataaatcacttatgtctaaaactacttcagagcaaagattatatatattcatagcatagccgataggataaatctaatatgtatcggctagtactctgataccactttgtactaagatatcaatatagattcaatataccaaacagaaatcaatctaacatcgggataacttaaaaggttgataacaagtttaatatattttatccaagtgagatcttaatataaatggtagatttagtatagcaagttaacatatatgaaacaaaataactaaatcaggtaagatcggctgaaaccctgatactatctctattgaaaatcataaaacaagtgtaacataccaggaatttcacctagggaaaattttttgtggaaaatttaaaactttctgaattctaaagttttcggtgaacatagaagcatactagagcatataactcccttaaataaaataaacacatagtctagttgggaaaaatcaaaccaaagaccaaaataaaagtttacaaatcttgtggtaataaatttcaaaataaaatattttgctttgaccttaaactggaaacctaatcttcttggttttgaattgctaacctaactaaaaataattaagtcatatataaaacaaatggaaaggtaggtttcaaaataagcacatctgaattgagataaaatgaacttgcttggttgtgcatattattgttttaagattgtttttggatcttcttggtgcatctcataatagattgcatatgcatgtcatgtctaaagaaaattcttaaaaatagatgaatcaacaattaatcccacaaaaattctcataaatactacacaacaccctaatctcccagtaattttagtttgaatttatcacatcaactagtaccacaaataaattcttcaactcagcaataaatctgaaaccagcataccaattagcctactttgcataatcatcaaattttaaccataacttatttatcaaagccccttgtcagaatgttaattatacattactctacaacctgatgcaatggcttcgtctaattcgaaatataaccaaaggaattgagagccaaaagttaggtaaacagtattctaaaatgcaatcaacaatccacctagtcaactttactaaattactatggtaaaagcaaaagtaattaaatcttggaacttggcacatttgatacatcacatacttgtctagctttctgtctccttgtcccccccttaattaaaaattgaatggatgggaggatgagagtaatctagtaaaatgaaatagtgccaacacttgggaaaatttagagcttctagttctctctttctacatctctcccttacatgtgggaccaagtccttgcggggcccactcatcatacaatcacagccaacacatcatctactcttcactcttttaaatcttcttttttttctcaaaaggtgagagaagggtttaaaatcaattttcacttaaagtaccaccttacgtctcgtacatttctaggaaatcacttcatagggcccaattgtcatttacatcacagccacaacatctcttcacctctctttgtttatgtgattaaataccatgaagggggagaaaagtagtccgaaggagtagttgctaatttctatttgatggtagtttaccctagttttctagggtttcttttttcctcaggcggcgcccccgtctgagttctatcgttcaaaacaatctggtgtaaggtgttttctccttctcgcgaagtgagagatcgttaaacccttcgctgagaaagttttctcggggatcaaggtagtatggcagatactcgatcatctgccgaggatgaaaccaagcgccctacggaggaggagactgggcgtgatggagagatgggatccgaaccaaatctggaagagagattgaagaggttgaatatgcatggggaggaggaaactgacctagatttctcggaggaattggaagggctgatcaaggacgtacgctggctcgctctttttagggtttatactacaaaaccctttagccactcagcgctgttgaatgctatgagaaacgcctggtcttcggcacaggatatctcgtttaaggtaatggattcaaatctctttatggtacaatttcaatgccttggtgattggaacagagtcatggaaggaggtccatggatctttagaggagctcctgtagtccttaaagaatatgatggcttcactaatgtgtttgattataagttggataaaattccagtttggacgcgcattcatggggtgcctgatgggttgatgaagaagagagaactagcagagagggttgctaagaaggttggtgaacaaccattcacagttatagtagatgaggggagaatcaatcctgttaaatacctcagagctagggttttcttagatttgagtaaacccctcgtgcggtttgtcccaatcacgatcaaggaaagaatattgtatccagtaacttatgaaaggatgccaacgttctgttacttctgtggaatgattggatgagcaaaaagagattttgttacgcattgaactcattctagagcaagaggaaatctactggattcagagagcgagagcaaattggttgaaacatggtgaccgtaacaccagtttctttcaacaatttgctgcacagagaagaagaagaaagaaaattaagggacttattgatgagaatggatgttttcaaaccgatgaagacagaatgagtaacatagtttatgggtacttccaaaatctcttctcggctgaggttacacaaatagatggatcttctttgctggatgtacagagaaaagtaacgggagatatgaattttggattactagcaccgtatacagctgaagaggtgaaaaatgctctgttcagtataggtgatctgaaagctccgggaccagatgggctgcacgctgttttctataaaagattctgggatatgttggagagtgatctggttaaagaagttcttgatgcaataaatacaatgaaaattccagatggatggaatgacacaactgttgtcatgattccaaaggttgataaaccagacagagtaactcaatttagacccattagcttatgtaatgtggtctataaaataatttctaagatgttagcaaaccggctaaagtgtcttctccctgaaataataagtgatcagcagagtgcttttgtcccgggcaggttgatcacggataatgttttggtagcttatgagtgcttacacacaatgaaaaagaagaaaggaagaaaaggtctgtgtgcagtgaagctagatatgcacaaagcatatgatcgggttgaatggatgtacctggaacaaatcatgttgaaattaggctttgatagccgctgggttcagttaataatgtcttgtgtttcttcagttcagtacagggtgaatttcaatggtgtattgacagaggttattaagccttctcgaggcttaaggcagggggatcccttatccccatacctttttttgcttgttgctgagggtctatcgagtatgctgcaaggagctgaaaatagaggagacttagtgggaatcagagtgtgtcgtgaagcaccgatgatatcacacttgttatttgcggatgattctctaatattgatgcaagcagacaagaataatgctgatcatctgaaagcaattttggatatttactgtcaaaattctggacagaaaatcagtgaagcgaagtcgagtattttcttcagtagaaatactgcagtcgaagataaagctgctgtctgtggatctctagatattatgactgaagctttaaacgacaaatatcttggactcccagcgatgataggtgttgataagagtgattgttttcgacacctgattgatagagtcaacaaccggataaatggacggaaggagaagatgttgagtacaggggggaaggaagtgcttataaaatcaatcgctcaggctataccagtttttgcgatgtctgttttcaggataccgaaaaaaatatgtgactgtatctctgaagcaatcgcgcgattctggtggggtgatgatgaaaatcacagaagaatacattggaaggcttggtggaggatgtgcattccaaaacaaagaggtggtctgggttttagggacttatattgttttaatcgagcgatgcttgctaaacagatatggagattcctgtgtgatcctgactcactgtgtgcaagggtaatgcgatgcaaatactatccggatggaaatattttgagggcaagaccgaaaaagggtagttcttatgcttggcaaagcattctatctggttcggaatgctttaaaggctacatatggagaattggagatggatcccaagttaatatatgggaagatagtttgataccttcaagcagtaatgggaaggttttaacacctcgaggaaggaacattatcacaaaagttgaagaactgatcaatccagtaagtggtggatgggatgaagacctgatagataccttgttctggcctattgatgctaaccgaattctacaaatccctatttcagccgggagagaggattttgttgcttggcatcacactcggtcaggaattttttcagttcggtctgcttaccattgtcagtggaatgcaaagtttgggagcaaggagagactgcctgatggtgcaagtagctcgagcaggccggtctgggacaacctgtggaaactggaaattccacccaagataaaaatctttgcatggagaatgttgcatggtgtgattccctgtaaaggcatcttagctgacaaacacattgcagtccaaggtggttgtccggtttgttcttcaggagttgaagatatcaagcatatggtttttacttgtagaagagcaaagttgatttggaagcagctaggcatatggagcagaatacaaccgattctgggtttcgaccggtcaggatcagttctggtggaggagatgataaggaagggtgggaaggtttcgcatctgaatgctattggaatgacggaattgatcttaacgggagcttggtatatttggtgggagagaagacagttggtgcagggggaacgaatacagaaccctgctcggtcggcaatgtctattgctaccttaaccacaaactatatgttgtcaaataagaaaggtaaaacaaaaattcagaacggttggaagaaacctcctgaaggaatgctaatgatcaatgttgatgctgccttcgattttgattcaggaagtggaggtattggggtggtgttgagagatcacttgggagcttgtgttgcggcttcgcaagcttttcttccacatgtccttgatgcaccgatggcagaggcttttgcgctgagagatgggctgtccctggcacaacacattggtgctaaaaatgttatagtacaaactgattgtatgcaggtggtttcaacgatgatggatggaggattttctgctacagcggctatgtctgtgtttgatgattgcaagctgatgtgggatgggtttggtacaatttctattgagcactgtaatagaaactccaatcaggtggctcatgaactggccaggttagcgtttaggacaaaaaattcttgtacttgggtcgatgaaccccctggctgtgttctgaaccatctggtaaatgatgtaacaattttatcctatcaataaagctagccgaatggcattcccccaaaaaaaaatataccatgaagggggagagagagggaaaaaaggttccaatatccatttctcacccaattcctccctccaccctatctttcatctaggaaacatctccatggaccacttgacagccattatagctagtttgggtgatgtaggtgaggttgcaacgccctaaactcagccaccatcttaaaaacgtgtatattccatattgacacctagcatgtcattgtcttcactttcaccatttagtgagccacttcgccactgaattcatctatcatcctaatcttgttccatagaaataaacttcaagaactcccatgtattgccaagaatgttctcttctttctttccatcgaagatgtttgatcggtcgcaaatcttctctggtgagcttcgccgcattccaaccatggaaatgtgattcaattcccctacctgatcaatcatgtctcttaacaccttgtgccaagctcgacgccgctctcagtgtccagagcgccgccgtcggccacttcgccgttccggtcgactcgagcctccgctgaccaagccattgcgccaccgacgtcgcctaggtccctggagaaggacgcgtaaagaagatcgagctaaaacgccgccgttgaggagatcgaactcttcttccccaagtccggccgccggccatcgtcgtcaattccccgctcccgggtgagcttcggcgctattcctcgcatatgaagcatccttaggtgatctttgatccatttcccttctcttcttggcagcccaaagaccggaggaagccgacgccgtcgtaccgccgttttccgccgccaccggagcgttcctcggttcaccgtcgtcgtccaagcttcgtcggtgtacgtgcgactcaagtgagtcttcaggagtcccgtagaggcacatgcatgcacacatttggcacaaatcgagccgtagctctaaatggcgcatcaccccgaagcacaccgccgctcgcgctgccgccgtcgttgactccagccaccacagcccgcgataccaccgccattagtttcgccatcttccactctacattttctcttttggctgcatcgtgaggacggccaccgttcgtcgccggcgccggcgagaagctcgccggggcgccacagccctgtcctcctccacctagtgtcactgacaagcgggacccacttcattgggtgctaagaatttgattagtatgagtttaaatcttgtaggattttatttctaaatgttctctgcatgacatgttgacccaggacctattagtaaaagtataaaacttggagcactctttatgaagatagtattaaacatgtgataaggacttcggcctatattcctagaaacctcagggacttttctgcatatttactctcactcaccagtggaccccattttttaaaatctggaaaataataaaagaaatacccaaacaaatatatgtttaacagaaaaatgcacaaacttggcacatgtagtacaattttgaggtaattccagttgctatagattcacaaagatatgaaatttaatataaaaacctaaaacttggcacacgtagtacaatttttgcctctaaaattcatctaatataaatcacacataaagcttgctcaaacttagaaaattcatataaacttcattttaactcattttggagtgaacaaagttccagtgtgctcataaaaccatactcttaattttcatgaactaaaacttaataccttctgtaataaaaacatcaccaaataattaattagtaaaataactggtatagtgcaaactagaaactacaaaatccataagtaatttgttttaactccaattgagacaaactaaaatttcttagtttgataaaagaatgtatattagttctgtaaacaaatctatagaagaatccatatccgaaaacattactaaaatttgaataatgaattaatattaagaaacttctaaaaattcatatcaaatttaatacaactccaaatgaggtgatttcagatttgttagattagcaaaatcttggacattagtttttataaaataaaatatagcacttacagtacccaaaacatatctaaaatgcgaaataactaataactactatagtatatcacttagcttgtaaaatttataataaaaacattctaactctacaaattgtgaaaccaattttgttgaaatcctgagaatatccttttcactgcagtaacccagcatttcataaaacttagacctaaaatgcatctatgtactattagagcttaattaatctagtgctagtattaaactttgaaaattaataactcccaaatgcaaagtgataaaatataaattccttcaccacaaatcttacccacacagcacctaatcacactagtaaactcatgcattttagagcattttgaattattgcatgttttggtatttatcgttacttttatttcttttagacggcgaaatcgttaccggtgaaggagatggattatagctaaactcagttaggtcatatatattctaaggcaagttttgcccttccttgaatcctatgttttcgggctaaatgctttgattataaagctgcacgtgtatttttgattataaacatgcatgaaaccccttttgaaaatcaccccttgctgttttgaaccttaggatttatgagagtactttaattgtgctcatataagtatactatacttttacaaaatgcaaatgcttagcctagcttagtaataaataaaaacatggttatggatcacttattatacttttgaaaacccttttgaactttatggacagaggtgattctctgattatttgtgaaataaaatgagataaaatatgattttagacttgggcgggaagtggtatgcatatgtgatgtgaccatggctactatggatacaaccaccactcacatcatggatgaacaacaaaatatcaagatcaagtcctccaagtgctggaatccgattcgtacaactgctacactgctgacttcaaacggccaccgaatctgtatacgacctccgtttttgccccgtgagtacttgatggaaagctctcggagtcctctttccaatggatccagcctcattaccaaattccatctcagtcggcagcaattgaagaaacaagttggtgcgacacctgtaatgggcctatgggcttgtaacttcatataggacgccggcccaagtgatgcccatctggggtgcaccccaatctagtggagcacgaccctaggagcctcttggtcgtcctcccacctctttaaattgctaggtaccccttcagggtttctcgggttttgttagattaaagtttaaccattgctacttgcttgtagcgtgcatgtcggctacaccgtccgtctgcttgttcttcagaatcccatcttatcatttgtattcaattactatttgcaatatcagattgcttttatcttgttctttcttgtttcttcgatttgcttgcaggaatagggttgatttgcaccggcaagatcaacaacccacggagaggtgtatcgatcactaaagcgcaacgcaacgtcttgtatggttgtagtcgggtcgtcaacttttctcccaaatcgtagttatctcaactcaccaaaagatcgggccaacaacagccataagtgtcgagtggaactcagggttcatcaggtggtatcagagctttcgttgcccggtgagtttttatctacctataaccggaaaattgccatacaaaaaaaattgcatcctgtacctagctatatttgtgccatttcattgttctttcagtttttgctttgttgagttttgtgttgcatcgttgcgttgagttgctggtcttagcgtctagttcgtttagagtttcgagttcttggcaggtctactaccactgtcgtcgcttgccgccgtcatctttgttgtcgtcgggacctacgaaaacggaatcgtctttccgtcaaggttctatttttgtagttttcaaaagtttctactcatcggttttggagttgttgagttgcaattagggattgccagcttggccatgtttctattttggccgtgcttgtgtcgcgcacgagaggaggaaggtgaattaccaaatctgattttggaagtagtcaagtttgttttggaaagatatagtagattggattggctggaaatcagtttcccttttagattgcaccaaatccgaactctaattgcggccgtatccatctactccatctaaccaccgtaccttccacctcctcacggttgtaccggagttgctacacaccttgatgaaaattttttcggtgtcagattcaagatctgtttgcataaacagcactggcataaattcaacattccattttttttttgtataatttcaatttttaggttcggacttttacatttgagtccctgtaattttatctttacatttgaatccctataatgttgcatccgggtccttgagtcggtttttgttaaaaaaaatcagaaaaaaggagagaagaaaagacagaaaggtgcataaaaaaagaaaaagaaaagccgcaccaaaaaaagaaaagaaagaaagaaagaaaagaaaaaaaaagaaagaaagaaagaaagaagggaaactaaaaaaatcagttgtatctttgagtttggtttcatatatcagagtgtgcttaagttgtttctggtgttatcttgtggtatcgtttgtgtctaggctcgcgtctctagtacgttctagcctaggaccagcactgtagttgatttattcaactttgcattctctgatttgagtatttgctattcctttgctacatatttaagcctaccccgagctccacagatttgattgcagccgtacagcaagtgtttgccaaggcatcgatacatctaacctccattggggtgcttggttgtgtcggtgtatgtcgccaccattctgcttgcattggtaagatcttgtaagagcttggttaaatgtttgagtgtgtgtgatatttaagcttccactacctagtagtttaataggaacatgtatatttttgtgtatgtttcttgctttctactaacaatggcagggatacgcaagaaaacttgggataattgtgctgaacatgaacatcttcgtcgagtgatgaggaatgatcaacatgaccaatatgaggtaagtgatgttgttctaggtaagatcaaatctgcactaccttattttgaaggaaattatgatcctcgtgcttacattgattgggagctagcggttgatagagaatttaggaagcatgaattgtctgagaaacatatggttatgtatgcctctagtgttttaattaatcaagcttctaatgattggaaacatctttgtaggcataataaaataccacaatcttgtaaagacctgaaacgatatatgagagatgtttatgttcccatgtattatgctgacattttgctcaataaactggaatgtttaaaacaagataatagaactgttacttcatactatcatgatatggatgcttgtttattacgttgtggttgagatgaatgcgaagaagttatagaatcgaggtttttacgtgggcttaaaaaaaattcaggatatgctggcttgtcaaagatatagaactctttctcatttgttacaacttgcttgcaatgctgaaagtaaactagaggaggacatgaaaaagcaacacgatatctttttgcctcctattactaactatttgcaagaagtgcataatcacggaaaagaagagagagacatgaaaaagccgtcgttcccattgttcacactcaaattcgatgcacctccgtcatcagaagagcgaatcacaggtaatctaaatggtgccgtaattaatcaaggtgagtgtgccgttaatgaattgaatatgtctacttttcatgctatagtagagcaaccattattggaaccaattgttgaaatgcctttgtcacaagttgatttactggctgttccttgtgataaagaagagttgtgtgataatgtttcacttatattcgtgccacaactagtgaatgaacatgctatttctaatgtcagttctaatgaagtagtggaacgtaaattgacatcttctttaaatactttgggctatattcagtgtgatgatttttgtgagctcgatagtttgaaggagaaattatttgctaaataatatttgccctgtccaactaatgctatttttcatatctttggtgaatataatgatagagaaatatatttggtgcatagaggttatatatgttcggatttagtacctcctgtacatgtggataaaatttgcaagctagagagacatgttatttctaatcatattacttcgagtttctcttcttttgattggatgaaacaggttgttttaaatcgaccacgcgatgagcaccatatggaaaaaccgatgacagttttccatgaagaaggggaggatgatgtgaccatggctactacggatacaaccattgctcatatcatggatgaacaacaagatatcaagattaagtcctccaagtgctggaatccgattcggccacctgctacactactgactttaaacagccaccaaatctgcgtacgaccttcgtttttggcctgtgagtacttgatggaaagctctcgaagtcctctttccaatggatccagcctcattaccaaattgcatctccgtcggcagcaattgaagaaacaaggtggtgcgacacctgtaatgggtctatgggcttgtaactttgtctgggacccaggcccatgtggggtgctccccaatctagtggagcacgaccctaggagcctcttggtcgtcctcccacctctttaaattacaaggtaccccttcagggtttctcgggttttgttagattaaagttttgccattgctacttgcttgcagcgcgcgtgttggctacaccgtcagtctacttgttcttcggaaccccaacttatcatttgtattcaattcctatttgtaatatcagattgcttttatcttgttcttgcttgtttcttcgatttgcttgcaggattaggcttgatttgcaccggcaagatcaccaacccacggagaggtgtatcgatcgctaaggcgcaacgtaacgtcttgtatggttattgtcaggtcgtcaatgtttctcccaaatcgtagttatctcaactcaccgaaagatagggccaacaacaaccttgagtgtcgagtggaactcagggtttgtcaatatgatagtagttgcataccaatagggggagtgttcgcctaagtcgattaaggaccaaacttcatatcatccattatgtttaccgtacatccacatgcgttttgatgggggaaccttggcctattaagttaagtatttgcctaatcttgcattcgggaggccgttgtagtataggtaggggccacgagtatactatgggctacctagaggaactacccatgtgtgtgttgaattttaggacgagtgtactgttcctaagtgtgtgatttccgtgaggggacgagtgtaatgttccgccttacagcatgggcgtctaagtctgtccaatacaacgatattgtgccacgtggagggttcgcgttgtgttcgccacctcggtgttatgtttaaggcgtgagcccgccacttaatggttctaggtcatataacgtatatggcctaggatggaggaacacgtatcgtgctcatgcaaggttagacaacgcttaatgtaaaagccttgttatgagctctaaaacgcactcaatgtgtagagtgtggtagtgctttggccagcacaagtcaaactagagtgttcatatcatgtaggtaaagctgtacaaactctgcagagttctaaaaactaatcgattagccatgctcacagtcatgagcgacatgatgatgtgctatgggtataatcttgtgttttctaaatgcttttgaaactaaattttttgagatgatgatgagattggtatatatgatatgattgccttacttcccattgagttttaagggaatgatgtctatctacttatgttgaccatgccatgattgttatgctttacattttactaacatgttttgcttaaattacgttgcaaatggtttgtgaactaaaatttgctttatgctaaaaattgagatcacaaaaagccttcatttgacttagagctttcatgtatgtaggtttgatagtgctcttgccagtacattaatttgattaatgtattgagtcatgccatattttgtctaatttatgttttgcagggaatagacttagtttaatttgagtgatgcgggtttcgattgcttcttctaggatttgaacttaatggggtaaacccctagtctgttcttgtgtttgggtagtcaagcttccgctgttatctgatataattatatttggccagttggcccttgtaactattaataattgtaatttcaaattattttgctatgtatctccatgcttaagatgaaagtgtgaatctagtgcacatcctgggaactagaattcacatgagtatgagttaaaaatatttgagatgttgttgatctttagtcattttgtcaagtctcctgaatgtgtaacacatttggtcgccgcctttgagtgatttgacggcacatctcaggctgaagttgactggcaggctaaagacccagcaatgtctccaatatttttctctctaggtgtcggatatttcattatgtttgtttgatgacttgaattatttagttcatccttcaaatataatgagtggtccggagagcttacgacaacaagctagatatttgttgatatgaaaaacacacactggccagggagatctgcttagctccagtgcaggtccaaaggttgatgatatgcgagcgtgccagctagtttgatcctgcaactagcaagatatgtaaacaacagatcaaatagccaatcggctgtcaagccgatggagtaattctagccgatagccgatattagccgatgccagcccgatgccgatagggttttgagcaatcggctaaatcggctgatgacaataaaatgtagtaataatataatccaatagataccaatcgtctaataataatatgataggatatgtacaaattcgaaggttaaagtatacatcgactgaaggtccgatgccataaaatccaaacgattagataaacagtgaaacctttgttgcaatcggctaaatccaacttgtatgtaatccttgtaagacgatgcgatgtctagataatttatcagctagcaccccaataaaacattagcgtgaacctatcgccttaacaagatttatattatcaacaacaatctagaaggtagaacctaaccgatgctgcacgagattgtatatgatagtctaatactcgatgagccgatagatctgtctaatgtgatagatataacaaatctatctagaacaacattgtgattatagagatatatcggctaggacagaagatcagacctaaccgagacagtcccaactaaaccgatgcgtctctaaacacaatgcaattagagatagaattgagatatcaggtaggcaaatatatcaaccaaaccagagcgatccaagagattgaagcgatgcagccttgaacaacaccaacgtagtcgatagatatacgagggccggcggaacgtaggacttaccccttcgtcggagatcgaacttaccccttcctaggtgccgaattccgccagatgataagtaaaaacttcgggaaagagggtggcgatgcgtaaagagtagtattcatcgagagatattttacaatgaccccgggtgtacatatttatacccatgggtagatactagtccttgtaggacaagaaaaaaaattttcttaagagaaaaggaaaacataaagtccttataggacataaacacactttcctaaagataaaagtaaacaaacaaactattcctaattaatagataacttgtcatgctgcatccctcttgaattcggtcacatttggataagcttcatttaatagattaatttccttaaccgattatagcaggaatccgactattggcgacgtgataattctcataggggcttaccaaatttcaccgttaacaatattatggttctagatattacttagtagatcaaattaacttaactgatacagcattaagtataaagagaaacataagaactaaacaagtcattgagagtcttcttgagatggtagatatactatataatttaattcaattatcagtatctaatcctattggctgttttcgatgatagaggctagccgatgatgttagatagcaagatcggtctagattatatagtatatatgataactcgacaatttacaaagacatgattagagtgccataaagatgtaagcattaatcccaagaatgcaaaccgccataacaagctttaacttttcgtcggagatcgaacccgatgcagcccaactcgaaagcaacaactcgtcgaaacaatgaaaatagaaaagggtggtgatacgctgaaagtgttattgaactaaagttaattgtttacaaggtatcgggtcatatttatacccaaaatacataatgtgtccttgccggacacgactccacttctattacaactcttaggcggactcttactgaaaatatctataaagaaactactaaaatatcctaatagataacaattgccttcctcggactcaatccatgcttggcaatacttgtgcaacaccccagtcaatcccgacaatgattctagaatcatcttgccgaaatcggctccatcgacttctccctaaccgattcggtattagccgatacagatggtagtcgatgtaaactttagccggcgcttaactttaatcctaatgaggtacttcaggcactagccagctccctactcccagatatcgctctactgcgcacccggacagggaggacttcagtgtcttgagggctgtcaccacctttacctagacaccacacctaagcagattaattacttactttaatgttagctacacactaaagcaatcactatattttatttgattattgtgaacgacgatccagcactctaaataggaactaactaagagataattctcaccgagcaaaactaaattgctcaaaagataactctattataatcagagtaattaatagagtaggaataaagagggagaggattaccgacaactccggaattcctccgacttcttctactctactcttttcctattctagtatacaatataatataatagagcctcttataattcagctcaagcttggagtgtgtgtgaagtgaaaaggcgaggtctttatataggggcaggcatgacggtcatagaacgcgaaaagtccattttgcccaacaaccgccattcaggagcttatccagaccgtccacgcaaaacccttgatcggacggctgcaggggtggttcggccaaacccatggctggcccaacaggcttcaactttggcctgttgctcctccatttctacgagtggaaggcccatttgaagatgttttctcgtagtttctggcccactcattatatggataggaattctccttcacttaagtctatattccatccaactttggtggtttattatctgcattcaaatatacaccaacacttgtggaatatgttagaattaaaccctattactatgttggacgttttatttctttgatttatgcaggtattggcggcataaaatttgtcattaacagccaccaacaaaccccccacacttagctctttactcgtcccgaataaaggttagagctaaagttgagaataaaattctccgagatatagtacaagcacataatttattcaagaccagtctcatacctatgaacttcatcggtggctaacttaccatcttgggcgattgaaagaaggaatagtcttgaatctggtccttctcaaactccatctcagacttttggggttttataaattttcgcaaatcagctttatctcctcataatgactcatcctcgatcactcaaatattttgtgctgtttgtgcatcctcaccaaggcatatgctgccgaaattattccctaatctaaaggctgtatatgtggagtttgctagggataactcgggacatacatgcatcatatatattgcaaaaccaaatatatggactcaagaagataatcgatcatactctcggatcaaggattgcataattttttgggtggaaagtgtatgatatgtgtagaaaagatcggaaataaagaaaatgcttctcctttgtctatacattcttctccagttttctcctttataattgtagagggggcatggctattttttttctttttctctctgtttttttttttcaaattgctccacattttagaaaagtattatattttttatagccacgcctttccctacttttatttttctttttcaaggatttttcttaggagaagaaggcataaactaaatggagaatttattcatcaactatatttttcttttttcggtggtagtggaaatggatgaaatgatgctaagttccagagtagaaacttagcataatggttgtgcaaccttgattgagagagcatgagagacatctaacacgagtcactataatttggtaaagctcaatataatgaaaggcagtcatacacattgtcgacgggggatacccgtagaccggatatagagggtattggggttcgttggtacgaggatctacatagtacgatatcaagcaaacaaaagacaagggtcatactagtttaggccccttagtaggtaatagccctaatccagttgatatgggattatatgatggaaaccacagattacaaagggaataacagaacttaatgataccgatgagaccgtagttgagttggttcgactagatcttccggcgacttggctcctgtaggctccgacttcgtaggctgtggtggatgtgtaggcggtaatattcgatgccttaggtcctacccggggggtcccttatataccgcgggccagttgatctccaggtgggactcggagatatcggacccctcgcgatatggaaaagacccagtattatccgagtagaacttcttccgtctatagataccatatctaccacgtgacatatttccttaatgtatacggaaactatccgtatacgcgtgggtacaccgtgtcagtatacaacgaacatccaaggatagagggtataccttatccgtaaccctgacagtagcccccgacttctgcttaaatgaactcatgttatcgatcacgacttctgatgtcggaattgttgtcgctctcatctggtcgatctcggtgtgaaaaccgtagagacaaaagccatcgacaacaccgcgtgaagttcaacggtcatgagtgaatttaaattgaagtctgaaaactaccgcgcgcaacggacccagaattttccggcggcaaactctctcctttccttggaatacgcgccgtcggtagtgcgcttatttgaagggattttgggaattcatttaaagtccgtttgccagaaaacactcttgccttctagcgcccttcgtcttctccgctctctgcaaagaaaaccctagcttccttctttcctcttgttctccggcgatcctctggcggcgatggatcttgagaagtctacctcaaccaccgggtccttgaagaagctgcaagacgacggtgccctccctggtcgcaggaccatgcagagggaggcatgaggttaagaacctaaacccatcttgggccgcatggttgtagtcgaggattacatttcttgcggttttctttcttcgcctttcaagtttcttcttcttggcctgaatttctatggcctttctttgccccacttgaaccccaactctatcggctttctgagtgccttctctcacctttgcgaggcctacattggggtagagccctttcttgacctcttctgtttttactatgagctgcttgatggaatctagcagggtatctggatgtgttggattctgacttcgggatagcttgaagtcgcgttacatccccttccagtgcccctcttctcgcagcaagtggtggacgagatggttctaccttcaaatagagaactcggatcccgtccttgttgtccctgaaggtcagccagaaaaaatcccggagtaggccgccaaacccgccctaactcccgtcctttatcgccctcatccatcatctccgagaacgggggttgtcggggtacgaagtcgctgccgacttcataggtaggtggattcaaccgctgtaggcccacaaaggggggattattcagagcaggctcaatggacaatggggatggaatagctgttggatggttaggacatcctatctttagagataaagaagggcgcgaactttttgtacgccgtatgcctacttttttttgaaacatttccggttgttttggtagatgaagagggaattgtgagagcggacgttccttttatgggagaagttgatcgttgaaatgataatagacagggtacaggtagaagctatcaattctttttcgaacttggaattattaaaagaagtctatggactgatatggattctacccattttgaccctcttactgggaatcacaatagaagtactcgtaattgtgtggttagaaagagaaatatccgcatcgatacaacaatgtattggtcctgaatatgctggccccctgggactgcttcaagctatagcagatggaactaagctactttttaaagaggatatcttgccatcccgaggggatattcccttatttagcattggaccgtctatagcagtcatatcaattttattaagttttttagttattcctttgggatatcgctttgttttagcggatcttagtattggtgtttttttatggattgccatttcaagtattgctcctattggtcttcttatggcaggatatagctcaaataaaaaattttgtcgttgtttagtaatagcttctttttcactccacaaggatcaagatcaaatgaatacttattccttttctgttgacggaaggtatatctttggcctctcgatggctgatgatgaggtaagacatagactgttggatacttttggtaaaaaagatagggaaattcttgattattcaatgccggatcgaatcatgtccaatggtcattggaattttgtctatccttctattcttcaaaataatttggatttgttagcaaaaaagcgaagaaataggttcgccattccattatagtatcatcaagaacaagagaaagaaccaatatcctgttttgggatttcgattgaaataccctttatgggtgttttacgtagaaatactatagttgcttattttgacgacccacgatacaaaaaagataaaaatggttcaggaattgttaaatttagatataggaccctagaggacgaatatagactcgagagaaagactcagagaacgaatacgggagcccagaaaacgaatataggaccagagaggaagaatgtaaaaccctagaagacgaatataggactcgagaggaggagtaaaccctagaagatgaatatgggatcccagagaacgaatatgaaaccctagaagatgaatatggaatcctagaggacgaatataggactcgagaggaggaatccgaggacgaatatgggagtccagagaacaaatataggcaccgagaggataaatatggcactttagaggaagactcaaaggacgaacatgggactttagaggaagactcagagaacgaatatgggaacccggaggaagattccgtcttaaaaaagggggttttgattaagcatcgaggaacaaaagaatttagtctaaaataccaaaaagaagtagatcggttttttttcattctccaagaactgcatatcttgccgagatcctcatccctaaaggtacttgacaatagtattattggagtggatacacaactcacaaaaaacacaagaagtcggctgggtggattggttcgagtgaagagaaaaaaaagccacgcccatccggcctttgattactctgggccagaggacacgaccagggtctctcctcggggtattttttctcgcatttctatttttgttctgagcgcatctgtttctcctgacgtatcgagttcgtattctcgatttacaggtctggacagtgacaccgtgggacgccgcgttggtcagataatgatcagcgtgcccacgaaggcgggcgatatccccatcgcactctgtgataaggatgtgactgagcgcgccgccgtgattaatgtaagtgtagtcgataatacctttatatcttccttgtctagattgcgccgtgacttcacgttatgcaggccctccctctgacggacgtcatcgggccgctcatggaccaccaggcggcagcgtcgttgaaagagagcgttgccaaggagccatctaacgttgttgctgccaccacgagtggtagcaacatcccaaagagggaaaggaaattctcctccgtactcgggacccgtcggaaagcgccgacctccgcggtaagcttctctctcgttttttagcgcgtagtcggaagaacttctcctcacaccatttcatcctactcaggactcgaacacgtctcctccgcctcagcgaaggcaaaggttggtgacgatcggcgagaagtaagtaaacgttcttgatgtcttttcattttcaaagttctgatcacctcgcctcatggggaagaggaaaatctttgcagggtggcgtgggaaaaggtggcgcaaggtggggctgatgccgcatccagcgcgtcccctgcagcgacctcgtcgggagtcttagtcactgctaaggaccaggaggcagcaccgagtggccctgccgttagccccgtgcctacccggggcccgtccaccgatgccctcacctggggggaggtccaagcggagatggagcgcattctccaggccggtgctcatggcgtaggtcgcgagatcgaagaggccagggcggcagcgttgtcggcaaaccagtgtgccgaccagctggcgcgcgacctagcggaggcccgcgaggacctcctaaagatgagggagctggtggccggcaacgagatgcaacggcgcggactcaagcaccggatgtcggagctcgagggtcacatgatcaacatctgtggttcgctgtgaacatcgttcaccagcctgcaccaactcgccggggagtgtggtgtcacgactaccatcccggcgcaccccgatgagttctcgctgacgtcgtcgcttgcggaattggctacggcgatggaggagatcccctccaagcacgcggccaggatcggcgaggagacgtccaatggcatctacaccggggagtgccatgtccttgcgtgcatgaggctggcatatcccgatctggaccttaagaaggctttggatcagggggccaccgatgacgcgcgcaaggctatgatggaagaagtcggtgacttgggggagtccgtcctccccctttttgaacagtaggatatttgttttcccttgcaccccttagccttcatgctgtaaaacttttctgtggatctgaattgctcttatctgaatagctgtctccctagtttccttagcatgtgattctgagtactttgttgttgttgtagatatgttgatgtcgaggacgtccagcagcgcgggcagcccgatatgccggtgatcgttccggcgctcacactcgagccgttcgtgctgcgggaggaaactagtcaaagcctgtctgcggaggcgagcgtggcgatgacgtcactaggtttgtatcttgctctccttcactccttgtgttccgtttgacttaattagctatgttctcggaagagaagaatagcttgacttagtcttttccgtgtcgggtagattttgagaacatgttggctgactaagatcgtcgaatgcgatattggaagacgaaactcgaggtggccaaactcgaaaaaaccatggtggaggtgaagaaggaccaggccgtggaagctctccggggtcgcgaggtgtggttcaactcgtacctcaagagctgctgcatggcgatggcgagggtttgcaaggagctccgagttccccgcggagatcccgaggagtcggcggctggttatatctcgtggttgaatggggcctgcgcacagctcgaagggattgccagcgcatcgacgatgtcctgaagcaggagtgtcgtcgagcgagccgctacgctagaggacatgtgctagcctgcatccgagatcaccgtccgcagctgcacctcgagaagaatatgtgacctcgttttatttctaggctagagaaattagtttctcagtaaaagtccatatggggtccctctattttctcactagacccaatattttgatcctctgtagaagtccgtttaggatccttcacctttggaccgagcccattatcatcgtccctctacttccctttacttccttacacaaaggcccaagaaccctctccaatacaaggaagtctgtagttacttcctctattttctcagcccaacccgaaggaccaattcccataagtctgcactagctcccttccctcgttcaggccaagcccaacaaatattgtgcattccccagataagtctgtactacctccctctatctttctagataactctatgctgcctcccccctactcctccctataagtctgtactgcctcctccaccaagcttcgggctgaaacccatagacgatgtccccctccttccaaagtttcattcatacccctctttaatctggtgtcgatcaagaagaataatcaccgacacgtagacactctgaaccagctgcaataagaagcttcgatcataaggaacgaggacccccaaattaggggtgtaagtggctaacccgcgaaacctacttataagctaaaataagccgcggacccgcttattttgacctataagtgggttcgcggctgacccacttacacccttaccccaaatcgtacccgaccgtgcgaggactccagaaaatccggaaaccactgtgtgctaacaacacacttaggagcatgacaggaaccctgacagacaggccctataggaactctgaccgataggatctacagccacgcactatccaccaccaataattgagaccgaccataccctgagacgcgcacgtactaaagccccagtgtctggtgcctataaaaaggaaccccgagcgctctcaagcaagcgcaccagccatccctgaccccgcggtaacatgggttgaacccccttgggaaatctctcaaaagctccctgaagggtatgcccggtagctggaacagctactccgacagctcgttggctttgccgagctgatgcatcgtgtcgagcagattttcagggatcccagaagtgctggaaggcgaaactcctcctttccttccctagagagaaagagcacgagatgatctctttcgaaacccgccatccccggatcaccatggaggctgccttccaagacgtattccgcaaagctctgtaccggctttgcaagctctctgccccgttgggcatagaccatgactatggcttgcacccataccgcactgatgaagacaatcggtaccacctccgtatggccggattgcccaaaggatgtcggtgcacgctcctctctaagatggcctgctctgccaagaacgcctacgagcaggcacttgaggagctggacgaacttcgtgatcggtacaccaacttagaagcccgttaccagcagctgccccacaagaacacctccgctctgctcgtgcaggcacgcgcgacgaccaacatgatctaggcccccaacttagaaggactcgcaggaagcctccattaccgatcaatccactttcacctccaccatctctctaagtaggattaggagtgtgagcccctgttgggcgttgcattgttagttggtagtcccgttctccccttttggaatgtatctttcagtgcccgatgtaatatggaatgaagctagttagtccgccatatctctatgtttttggagctgagtatttttattcacacctaaaccaaattgtctccctttggaaagcccttttgcgccggtagaaattattttggaattaatcgataacccctcgtagtaagaaggttatgccgacacacgcccaagttttggatttatcatgcctctgacatagaagcaaaagtctcaaaaataaacccacaggatccatacaactaaggatacatgccttgatctgacaagcaagacaccgactatctagcttacagagtatccatataattaagaaagaccacgggtgccaacagaatgaggagaaggatcgccacccagagatgatcatcatggccatcgtctgtaagctcaagcaataaaccccatagaaaaaccatatgatacactacccaagtcaacacagtacaaatgactattccaaaggaccacaccttgacccacacccatcgccaagcggcgactatcctcgccaaaaagttgccaatgcggttcccttgctccggctccaccgccacccggacgccaccctcgacgatggcatcgtccgccacatgcgccggctggatagctggccgctgtaccaagagcccggcagccgccaacgccgaccatcggcaaaggccatcctcggccgaggcaccttgcgccgcagcaccatgcctcacgccgttgccagcaccacggccggctgtgcctcgctcgccgccatcttcgtcgcctcctccgccgattcaccgctccatcccctcccttcgagctacaccaccctccacttacccaccgctcgtggtgtcacatcctgattttcgttttaggatttataaattatctaataaattattattagaatttatattaaatgttcattaatatacaagtgaagttaaatgtgggaaataaaatttcctaaatataaatcatggatggatttaatttttattaaattctccatggttaattatactctctggaattttctcggatttttcggagctcaactcttaattttaatcatacaaacaacatttcagtaattatccacatattaaattaatcattaaatggtctggttttaatatttttaaatactttgagtgtccaagtatgttcaagatttttcttggaattatttgagcataggaaatatttttaacaattcaaagatcatttcagtgattaatttaattggtaaagtaataaaaatcctcctcctcagcttgggcccttttcagaccattccctcttcgctctcctttccttagccgcagtagcccactctccttctttctcttggctcaagtccatttcaggtccctccttcagtcgggctggagaaaaaggaagcccagccaaagtctactttacttcgccggtattgttcatcttccagctccagacagcccgagccagccatcccgagattgtgcagcgccgttttctcctccaaatccggtctcctctctcgtgttatttcaaaattagttgaggggaaatattcctcttatcctcctctatcctttccccccaagaatcggactttatcccgaagaaatcaacgcggaattgagcttgattcgtgtttatctctccaccaaaccctaggttttcccggcgcgattccttgcgttccaagcccgatctctctctcccatggctataaatagagtcccctccctctcctctttcggccaccacctctccctctctcccccgtcgcttgtagcgccgtcgccgcgttcgtcttctctctcgctgccggcagccgctccagccgccgtttgccgccgcctcggccgtcgccctcctgtgccgccacctctctcggctccgcaaggtcaagagcaagcccggcagcccgttcccttgcgccgaagaccccgggaagcccatcgtcgccatcaacccgaagctcgccgtcgtgttttgatctccggcgaggctctgctgctcctcccgtcatcgccaagcttcgccgccgcctccattggattcgcagctgcgaagtggacagtacctcgccgccatctcgatctcgtcgtcggccgtcttccgtcgctgtctgtcatcacgtcgtaagtgttggtaagaatcgccgtcgccttctctacctcccggtgccctccgtttgcattgttgtgtcgtggttcgccggtaaccgccgctcctatgtcgttcaccggtgtagtttatccctagggtcttaattcaatataatctaattcgtgattggtctagcgttgtcatctccgtgtgttgctgtcggaacattgtcatcatcccttcctctccgatcgctttggttcggtgagacttctatccgttctctcttttcaatggcatattatttctttttaatatatgtcatctaccaaatataatctaatcttttctggaggttgtttaatcttttctctcagttataaatcatttgtaaatggtttaattaatttggaatagtcttttctttaataggtttaattggaattaaatcttgtaaaattcatatctaattcatatgaagtcggaatgaggccgttcaagtctctaaattcatctaaaatcatgatctacatgtttgtttactttttatgtactgtttatttggtttttattagtctttttctctattttgcgtgttagcttgtcgtttttgttgttgcgaaggttcgcgagtgcgttggaagtggttctgaagactaattgaagactgattattgcaaggcaagtcacacagatcccaaacacgattcctttgagcatgttgatcctatatttaaattctctatttatttcaactgtgcatttattttcgaatgtcaccgggtggtgttatcctattcttttgttatggccaatttgcattgaatgccctattccttgataccttggataataaattgattagcttgaactcgggatggcaatcgggcgcgacgggcacgggtagtgcctacccatacccatgcccgtgagattatttgtgcccgtgggtatacccattactacatgacgggtaagaatggttgcccatgcccattgcccgcgggcgccttatgcccgcgggcgtgcccgtttacccgccacaacaaaagcagtggaacaaaaagtctacaagctactaagttcgaatcgaacttaaaacatcaaatattctccgcctcggtgtcgtgtctctcctctggcggcgatagagtaagaggagagaaataataagggaaataaaagggaaaccgtagaaaacaaagaacgtggcttatgtattctagtggattttgctcctagcctacatgtaagttagatttcgcgggtaaacgggcaaagcgggcatgtgtagtgattacccatacccatgcccattatccatcgggcatagcttttgacccaataagatatccatgggtataaaatggagaacaaacccaaccctaatagggtttttacccgcgggtaaatgggcaaacgggcacaattgccatccctagcttgaaccttatatattggtttggttcagctaaatgctatatatataattgtttagccatgcctagaaacattagttcattaatgggatgaatcatactacattattatttgtggttatatttaatgctagctcacgatgattaatcgtgttatgataattaattgataattaaaacttgataatggtgggttgtgagcacatggttttgaaggttgtgctcatgacaattaagggccgattcgctagctactgttgtgagacattaaccgtgccaaccacaagccagcgtgggcaacggctttaccttttgtatagcatggttcattgcggggcaccagactgtgaagcggcgagaagtccgtgggggtcgctggggagtccatgcctctggttattgaggggatgattatgatccagggacggtgcgctgtggtggattgtgttgtgcaaggggtactgtcacagttcctatccgagatatcgtggtggtattgaggcgcatggtaacatgtcgtggagctgtgtcttgtgagtacagtggtacatctctagctagagtaaaactattcgaatagccgtgcccgcggttatgggcaagttgagcaatgtttttcgtgattaatctcataataattatggatgctataactagtaataatttatttagctcctggtttggagtttgatctgtatagccgggtatggttgttcagaatggttgggcctgagcagcatgggcgtgttgttcagagttgattaaaattaatgattaaattactctactgtttcactactcttaaatctttgctaaatgctgctattgcaaatgagcctatattatgccatgctttggtatccttgtgcacttgtatatttgctgtgtggcatgttgagtatgtcatatgctcattcttgtcataatcaatcagcctcagttgaagaaaaatgatacagaaggagaagatgtttgacttataccccagttgagctgcctgtgggggtggagccggagcttcgctagattttatttttccgctgcagttttcttcgttgtgaggactaagtgcctcttcagtaagtattaattgctttagttattttgatggatttctatattaaattgtcagttatgtacctcggctgattactggacggggattttatgcacaaataagttcgaaaattactagtgaatttctgggcgtgacacgtggcaaccgcacggagaagacacaaagcagtccccccccctctcctccgcccttttttttcgaaagcggctcgcccgcaaaataaaatgattacctaagtgcacaagggaaaagagatattttcgaaaatcagtgtattttgaaacaagccgttgcttatcaccacccgcggattgcctcggtcaaacggctataaaccccgcagaggacacaaggttccactacgacatccgaccgtcgcacgccatagctgtggcctggcacgcgtgcctacaaaaggatgtcaaaagacatgcaagccgtccacctaaaaaggagacaagatattccaagctgtgcactgagccatgcattttggaaaccagcgtgccttatcttctttgtttcttcaagtatcttcctaaatctgtttctaaaatctcccacctcataagggcatgtataaaagtagagtcagatatgagctctacattatctagagactagtatcctacaacagttagagataatatggtctctaatcattaatgtatcaaaatattttttcttacttttctttcctttctttcaccaccatgcaataaaatttgctctaataaatgctaacagtcgactctgagccgttgtcatgcataacaaccatactcctttctctttcttccatatcatcaaatttacttgcatagcaatagagagagaccaccaataaaaaccgttgtacatgccctaaggagcccgatggaagcaaggagaactcccgaactgcagtatctctctccctttatctgacccttactaatctcgaggacgagattattgttaagggggtaggttcgtaacatcctgaaaatttcgattctaaaatacggaattaaaaattcagaataatctttttaaacctttttgcatgctaggatttattgttcattcatgtgtgtttaggttgtgtgccaaaggtcttgattaaatcttatctcctaaagggacgccctctatccaacatcatttcattcccttattttcacggtctgatttattaagtgcttcgatactaaacaaaccacagacctgaatatgtaactcaaaaatgtttctttatgtcacaatgcgacatatctttctcaattcttaccctacggttattttaaaccattctattaattccactcgatcattccctcgaatatctacaaatgatcgacgtatttatttatcgtgcgtcgattcaatatttgattctattcccaccgcgacaattggattcgtatgccacgcgtcgtccctaaaatcacttcttcgtttccgtcattcgttcgtacgagcactctcaaaataatcctacgacaaccgatgaattcgttgttgagattataggcatataatgatttaatatattccataaataaatcatagcattgcagatgtataccagcattaacgcatcattagatctacacatgtaaactaagcagtaaaacatgaaaagatcaaatatgcgcaacatattgaacacgtaccgaggtggtagaaagaccggctgctcggcaggaacttttcgcaattgcagatgtttacgaaggcgcgcagcacgcgagcgaagaggaagacgagccgtcgcggacgaacagggaacagtcgcgctaagcgcttcccaaaaaccttattgccgccttctcccggtgcaggacgtcgaaggcataggttccggagacctgctctcccgatcgccggtgcacgccggcgaacgggatggagtaatctacgagcgacggcgcagcacagagtaggaggcaaaccctagattgatttttcgtgtgttgcgtgaagacggcgagtcggtttatatagagaagggtcgcttgatcagggcgcccgcacgatctccactgcgcgtaaccaaaccggataagtcgcgcgtaacttatccggactccacgccgttttcacgcactggatttttcggaacatttccaaaacaaaaacgaatccgaatttgcagcaaaacaaaactgtaaaaggagactgcatctgcgcaaggtgaggactaatttttggcagaccattcgacgcgtacgtcgtgcacacgcgccgcctgcccggcaaggcgagcaagcgcgcgcgtgttccccctcttctctccaccacacatgtttcaagtggctaggagggcatcctcccttttaaggaggtccccctctcctagaataagcaaggtggtactaaactccacatgcatgccatcccatgaggtgggcttttatgattttccaaagaattaatcttcgagtgggctaagccccatccattaattccaacattcgtttgtcaggcgttaagcctaaactcctatttggcaacacggtgcatccatccaaacaaacaagtctcatattgcaatccatttattccgccctcgtgcatcctcgaaagatctataccaacccaaatatagttattgtccaagttacagtttgccacatacacaacccaatgtacggaccaattacagttcgtgcacatatgtcagtccagaccacaagtcccatttataccatcccatttccaaagcactgcccaaatcacatcgtcccatcccaaatacaaagtcccattacagtccattgtacagtccaaattatacagctcaatttgtaaatacactgtcaatatacaactccaaatacaaataccgctctatattcaaatccctgcaaattacaaaagctcctattacacttgggccattcttctctctgccaacacagcccatttcacacccaagtccattttaacccctccgcattgatttagaaacgttttatgcaaataaaacttgctttatgctaaaaagaaccatattatgccttccttgattatatgccttgcaagtagggtgttaggcttgtgttggtgcttgccagtacattatttctaataatgtactgactcttgctattgaattaatcttttgcttgcaggttttagacttagtctttgagtgatgtgggtaatcgactgtttcttctaggactagaacttaatggggtaaacccctagtcggtgtgcttgtggattgggtagacaagcttctgctgttctatatatttatttggccggtcagccaatgtaactaaagtagatgtagtttataatcgctttcatcttatttgtgtttgctatgtataatcatgcttgagatgaaagtgtgaatctagtgcacatcctgggaactagattcacatgagtatgagttaagaatgtttgagatgttgtagatctttagccatttttgtcaagcctcctcaatgtgtaacacatctggtcgccgccttcgagtggttttgacggcacatctcaagctgaagttgactggcaggctaaaggcctagcaatgtctccaatattcttctctcgaggcgtcggatgtttcattatgtttgtttgatgacttgaattattcacttcatccctcaaatataatggaaggtccggaaagcctacgacacgcgcgcggctagggttttgctcaaggagggaagtgacagctagagtttctcacgtgatgcaatatctccggcggtcatacccctcacgaatatataggatccatcactcgagcctccaaggcccgtaggactcctattcggatccctatccgaattaagctcatattggatctccatccaatctccttattctggcccattaagtgtgcgaccctgtaggttcatgtatactcggctgtaacttgaaaactccttttcggtccacgcgtcaatagcggcccctagcagaacgtattgacccaccgggcatacataaagatcatatcgactgaacctctaatgtatacttgtatgaacccctttgtctcacgatatcgattaagctcaaggctagatatgtgccatcctctaatagctcaatcattcactcgaacctctcgatagattatataacttgtgattgactccttaatcacctttggcatggccatgcgcttccataatctacaacatcgaggggcccagagatatctttccataggaggggcaaatcccatcttgattattcatatcccaatacatgtttcatagcatactcgaaaactacttttataactatccaattacgaagtagcgtttagcagtccctaagtaagctactacacatgttgggaaccatgataatctcagtgtctcatgtttggtctatcaaacaacatgttcactaacatgtctccacattgttaatttggtatctatataccatgatccatgagacatgatcatcaattaatacatgtgctgatcatctaatcatatttgttccacatttgatatttgatcaggaatcctttaaaaatagtaacaaacaacataaagagtctcatgaaagaatcacatatttattaaccaataatgagtttatctatttcaaggaacaatgtcggataaatatgtaaacatagtataggatacaatcatctctatgattgcctctagggcatatcactaacaccaccatccttacctccaccaaccgccagcctccccatccacgctgctgcgcctggcagccgccgtcgcgccaagccaccgcgcgccgcgccctgccgcgccaccgaggtcggccgctggccccgccgtgcacacgccgccctcacctctctctctgttgcacatggagaagaacgagagagagagcagaccaggaagagatgagaaagatataagagagaggagaaagattaagaagaggaaataaaggagaatgagacttacatgtaggacccacagtggaacccagtcggttgacccctcactcctcttgacccacaaaccctagtgaaagtctatattggcccccttttactttagtatccttcatttaacaatcagacaaagcccaccgtagccacctcatactaaagcccacataccacatcccctatacaactcaaagcctctcagaaagtctaaaccacctcccttcccgagaatgctccctcctcggtttataaaaccttccaatttcgaaaattcatatctctccaaccgtaactccgattgactccgttcaacttccataacctctctaaaatcgagatctatttaatggcaccattagttgtattgaatgttgttttattttatttcttttaggattgtgcgtggatattctttggttatttattggacgtgtcggatatttatcgatcgcgggtattctagttgtccaactgtcacagacatctcgaagacattaggaacctatagcaaggcaagtccctacgctccattccttgaacatattgatcctacatttacaaatgtgttgttttacaaataaattgcatgctatttataaattgcgtacctacatttgattatagcctgccttgatattgttacccttgtacatattaatgtatgcctttgaatacccaattcatttatttatatacggtcaattattgacaatgcttagcaatgctattgtagacatacgtatactccatatttaagctagatgattacggatgtgagatcactcgatgtgagtgattgatgatttgcgggtggagacatgagcgccacccgccacacacaaaccttttgtgaaaaccaaaatttaatacaacaaaactattttgactggggcagcatgaatagaatatgggtgggtctggaaacggttagtcgccgaccctggtcagttaaggaccgagtcaggaagctatacaggaaacgaacagagtacgaccgcatttctcaagtgggtatagaccggcggattaggaagctctcgtggagcggcacctaaatcgggtaggttctatatcagtgtggtgatgagtacagtgtcggaaaggtaaaggcctagatatgaacttaaaatgaaccctataaatatatatagtaaatatcccctattccgtggagcgccaggactcccttcaccatccagcagtaggggtttggagtgctggggtgcaatgggggttcatagtccttggagcaggtgccgaaatgcgagagcaactgaaaagtcgggccgtggcaagtctcatgtgttgggactaggctcatatgttgggcaagccgcggggtgcgggattaaaagcgtacatccgctgcagtgtgagtaaaccaatctattcgaatagttgtgctcgcggttaatgagcgccgagacctgtagattttaatactgcttagagtagatatgggagagatgtgaaccttgcccaaatagtgggaaggttagtatagtagagttggtataagatgaaatgtgagggtaaatcgaaccaagcgaggcttggagaggtggatgaaccctggataattacaacttcaacaatagtgttgtttttcagttaaaactgctaggtcaatagatttgtgaaatgaattgtgaaaactagctttatgcaaatgaactaagccatccttgaaccactgtgtgcattagattcattttgtagtggtggcttactgtgtactcactcttacttaattaaatcttttagaaggagttggcgtcgattagatttatgccatgctgctgtcaagtacgtgttgaagatgatggattagggaccataggttcaccagtcgttgcttgtggagttcgatggaccgccgctgcttcgctttcccgttgttttatctattactttggtattttgtattgtaagtgaccatgcttggtctttttcgggacccaatgaggttacccttatattattactgtagaaacaccggtaaacgaagtcagttgtgatattatactgtgctatgtgtgtaccacctactgatccagggagtggtactgtataacacatgggattaccggtgtataaaaccgggggtcccacagatatagggtattatttacttaggtaatgttataaaatgtttttgctatgtgatttttattagatttgacttcacataggtgtagagatgtgttttctaggacttgcacattttggtttcataatttttagagttattatgaattccttatgtattttacaagttatagcgtgttacaggtgaatagttttttgtattcatatagttttgggacaatatgtccagaatgttttgcttcctgttttagttgcataatgtgaatgatttgttgaccaactaatttttattttacaccattgaggcttttagtattttgcttcgcattttataatttaggggtgctctaagtttgtaactcaatatatcaacctaggaatattgtatgtgctgagtaccataaattttggtaagagaggatggtgttgtagcttttctggttcatctaggatttatttgttttatttggagctagggtgcattctatataatttgcttaactagtaatatgtgattagcactcagtttattaatttaaaatttagagatatatttgtacagaaggtgccacatttcattttactgggttgaagctcactacttgctggttagatagaaatttagttcaatccatttgaatctaaaatgatttttttttacaaaatttccaagtttaagtgtgcttatgttgattgttccttatatataagtttaggggcttttcatgtactgtaagcggatatttctattttataaatctgaaatgcacaattttttgattctacagaacttgagttcatttaaaaaaaggagtcaaaatggattttatacgactttccaaagttcagcttatctaaaaccaattattttgtagataatatttttagaggcatttggtgcaaagtaagtatatatttttatttctccttaccaaagagtgtatgttagtgaatctgtagaatttgagtttgtcccaaaatgggttaaattaaattttctatgtattttataagttcttacatgttttatgtttactttttcttagataagttttagatgtagattttgtacagtaaataccactttttaagttgtaacattaaagctcatcattttgtgaatccatagcaactggaatcatctcaaaatgatgtttttttattttatatggattttacaagtttaggtgttttcttgttaaaaagtacatgtttttttattttattttatattttcagattttaaattcccaataagcaaaaaggtcccgcaggtttcagggaatagatcccttggtccaaacacgtgtggaaagccaagtttattaagagtccttgagttttaatgtatttataattagatccatggtcccacatataagtctaacacattttacacttcaaaccttgcatgttttaaatttttactaagtgtggttctcagagccaaatcatgtggggcctgcagcctgcttgtcagtgagacaagggaagaagagagcagggatcgagtaggggaggagcacgccggcgagcttcccagcgtacggtgacggtgaacggaggccgatctcgacgagcaaccaaaagataaaatgtagaacctttgattgtgaatcaatatgtgtccttctagcaagctacggtgatcgaaatcagtggcgacggcggtgcgagcggcagtgaccttcctggtggcaatgcatgtcactttagaggccgggtctaggtgaatagagtgcatgcatgtgacactaaagccttgagggtgctcaccaaaccattggggaggaatgccgagacttggttggcaatggcggcttgcggatgatatttgttaacgaagtttagctgaaacctacatctccagggctctaattatgggcgctcctctccaaccaatatagcacctagccgctacgagtccatggcctcgccgcctattgacggtccttaaatcataatatttgaccatcaatacctgcatataataaaataaaatatggtatccaacttaatggtagggattattactaatcaattccactagtgttggtgaaatatgtgtgtgcaagtagtttaaggagaaaacacacccgtcatgcaaggaaacacacctccggccaatcaggcgcaagtacacggattgaagggcccacaagtcaggtaaaaccgccatggaacggatcataactgccataaccgccatcagggcccacatgtcagcctcctagccaaagaagaggccaagaggtggggcccagggttcgaccgaaccatcgctggctcctttcatcccgctcttccacgtgtacgctgcttatgctttcccaatgacggttgagggcgttttggacaattctcatagctgtaactgtcatatggaggctataaaaggaggagctgatctcacttcactcatacaactttgacctgaattaaaagaggctctattgtattttttgtacattagaaaataggtagaaagtgaggggaagctctaaaggagtgcccggaagtttagcgctccctccgacttctacctcgacaaatgtagctttctaggaggaattctggaggagtaccggagctgtgatacactctgctctgggttcggagaaacttcttctattaagtaagcattcaggatccattcttatgttatttaattacttagtataagtaagatagatttttcatctttgcaggttcattgtttagtatttgtactaagtgctttagtattagaactatggataaaaaaggaagttcctgcgcaagtattagagtagtaattgataacttaggtatggtatctaggttagatattacctttgtttgttgtatatcccacggatttgttagaggtagacggcaggtggtgacagccctaaatcctgtcctagtaatcctccacattcggatacatcatagagctatagccagaaccacgctggcagaccagcaggggtcggtgcctgaagcaacaaataggaaattacctttgcttagcttagacaattaaaacacatagaatgtcctctctagcctaactagcctaccattaattgttgtccttgaatagttttagccttaggtagatttcacacgttccctaagttcgatatccttttggggtcacccgaaggtgaagtgctacagcggtattccgtgcgcttgcggatttatctgtggtcgtaagaaataccaacaccgccattatcttcccgtgtgtcaactaggggtggaaatgggccagctcggctcggcttgcagtggctcgtaacaaactaggcttggcttggcttggcttagttagggaaacaagctaaaacttgagctcggctcggcttgtttcctggctcgagccagctcgagatggcttgcaagccttcccgttgaaacacctcttcatatatatttgtaattatttaaaaaagcaagaacaaattatcaacatgtaaaatttaaataagtttatatattcaattcttcaaaatcttaatgataaatttcaagttaacaaataataacgctataaaaagtaaaataatcaatataaacacatgatggcctaggctcgtgagccaaaacaagcggcttgaaagctagctcggctcggctcggctcatttccagcaacgagctaaaaaggaggcttgggcttggctcgtttggcttacgagccaagccaagcccgaactgagcccatgagcccgagcttcttttctacccctagtgtcaatgccatgattacattgtgatgtctcctctctatttaagacagcctatgacagagtttgactctaactcagttttacacatattccaactctaattttaactcttagtaggattatatattctgacacatattctaacagctggagctgtcgtgagctcgtgactcgccattggtaagtgaggacacaggcaggaatttgttaggctatgttcagcaggaggtgttggcaaccccttctttctggcacacaaaagatgtatgcattaacgtatgattaattaagtattagctaaaataaatttaaaaatagattaatatggtctttaaagcaattttcatatacaaaatatttgaaaaaaaacacactgtttggcagtttgaaaagcgagcgcgcaaaaaatgagagagatgagttaggaaagtgaccaaaagaactcattcttatggcatccataatgtgatgcaaatgtagtccacaagtaatataatatttcattcagccacctaggccccgttctaaaaaaaccaacttttcctcactttttaatagcatgcttttcaaactactaaacggtgtgtttcgtatgaaagctttttacatataagttgctataaaaatcaaataaatccattttcaagtttttaataattaaaatttaattaatcatgtgctaataacttgtctcgtttggtgtacgcacttaatcttcatgcttgttggagaatcgaacgggatcatagtactattgtgcaactagtccatataaaaaaaataataaaaggtacccatatgcatatagactacctatatgaaataaacaatattatttatctctacttttctcttttcttctcatgctatcttgtatttgtgaggattgctatagttaaagtttaaggtgtgtttagttctttgggtgtaaagtttttgaagtatacggacgcacatttgaagtattaaacgtagagtaataacaaaacaaattacagattccgcctataaactacgagacgaatttattaagtttaattaatccatcattatcaaatatttactgtaacatcacattatcaaatcatatcgtaattaggctcaaaatattcgtctcgcaatttacatgcaaactatataattagtttttttttcatatttaatgccccatacatgtatgcaaacttttaatgtgacgtttttgccaaaaaaaatttttatctaaacaaagccttatttttatttatatgagtgatgaccagtgtagatccgacatccaaaattcgactgctgtggaaagtccagcaattaaaaaaagaaagtgatctgcatttgttagttcaccagcacttcacccactttatttcgcttgcaaactgcccctgtcctttggcttttaaagcaaattaagacctttcctcctccagactagtctagagcttaccaacccaaactaccggaggaaagcaaattgcgagcctgtcgcactcggtggaaatggcgcttgtcgatcccaaggccggggagtcctcctcctccaccgtcacagctcaccacctgttcgtcgttgtgatcgacggcgtggagacgtccatccacgagggcagcctccaggccagtctcggcggcacggtcaccatcaccagcgcggggaacctctccgccagcggcgtccgcagcgtcgtcgtgcgcggcgggggcgggggcagcgtcagcttcaccctgtgcggagacgcggtcgccgacggcgtcgactccgcgtcgttcgtccggtgcggcgcagcgcgggcggagggcgcgcgggcggtgtcggtcacgcggtgccgcgccgcggacttggagcaggccggcagggtgtccctcgagcggtgcagggaggcacgggtccggggcggcggcgcgctgcgagcagccaggtgcaggcgcgccgacgtggagagcttcggcgaggtgcacctggcacggtgcaagggcgcgcgcgtcgactggtgcggcagcgtggaggtcgagatgtgcagggcggtggatgtcagccggtgcggggctgtgaccggcggacggtgcagggtggtgagcgccgtcggctgcggcagcgtcgaggtggcccatgccgtggtgaacattcttgaagaagaacagccacaagcagcacaacatcccgtctctccatcacactccagtcgatccagtgacagtgaatgaaggttagcaccagtaagactcggtgaatctggtgtttagtatattcgaaattgcaatctcatactgaatttgctccgtaggttttttcttcttagtttcattcacggtggatttgtttttaattaaactgaatttgatttgtcgactacgggtaaaaggtgtaatatataaatagtcttgacaagctgcatcttaatctgaactcgagtaatacgaatggagataggattttcatttttaaatgatagttttctgcattctctttcaaataaaatattatttaggcaatttcagttgcaaggttgaaatatcactgaaggttacaagttgatttgtgttgtcgacaagctcaaattacagagactcaattttggatgctatttctgctcccaatagcaacctgatctgaatcgtcatctttgggtgttctgcacttctgctctgccgcctcttgcagtcttgcccatttttcattccctgctccactcgaatgggccatatgcaagttacttcttcttgtcgtgctcaagagtcttgcctagtttcttccattttcctttttatagcttgtcccaaatctttctactccgtacttcaattattttgccccatgcacgtaccgagtactcccaattcacaaacgagatcttttagggagttagcgagatacttaaatgtattaaatggttgatcaatgtgaaccgttgatcaaaagaggggtaaagtacactggtggagagaggggttgtactcccgattgaaaacccctgtagtttcggtttttcaacatctttagtcccataaccccccctatagtctcagtttttcaacatctttaatccggttcgtaacaccaaccaggactaaagctttttttcttttctcatgttcaatatctccaaatcattataataacaaataacaaatcacaatcgcaccacaaatcacaaataacagaaagcacgaatcatagatacacaaatcacacatagttcacatataacatatctcccaataccattcacaaatcacatatcgcacaaatcatagtcattcacatcacattaagaaggaaaaaagaagaaaaaaagaaagaatttcccatgccaccgttgggcggccctccgcgcctccgccgcctaccgccatgggccctccgcgtgggcagccgctgccgccaggcctccgcgcctccacgaccttccttcgcggcggccgccgccgggaagacagggttgagggaaaggggaggaggagaaggaggaagaggagaacgagtgatgaggagaacgagtagaggagaagaggctaagggataagaccaagggaggagggacagacatatgcgtgaagagataatgatcgcgtagcttggggtgaattttagtaccgggactaaagatctatttttagtcccggttatttataccaaccgggactaaaaataattggggcctgacacgacccaacaacttcttcaaccgggactaaaaatgatctttagtcccggttggtaacatcaaccaggactaaagatgctttttaatcccggttttcattggaaccgggactattgtggaatttggccgaccgaccaaagatggtttctccagcagtggtacgaaataaaattattgtaacatggtgtcgaaactagatttcggcagtactaaaaagggatagggaacaagctatgaaagtggttggattatgagacaatggatttatacaggttcaggccttctcgatgagaagtaataccctactcctatagatgaacgagtcgggattacaagatacggaccttatcccttacggtttaagctctatatatattttacaattgtaaccgactaagattacgtgatacttccttgatatacaagttaacgtaatacccgagtcctatctttacatattctattactatgagttacccccgataactagtcgggtaacgcagccctgtgggtatatggtacccataatctccacagtagcccctgagaggccgagaccttcacagatgataaggtaatcttctcccgagtggtttaataaaaagatccgagtgctttagtcattttcgccacaactcctgagtacctcaatcatctcaagctgtgaagggctaaaaaagaaaaattaaggtgcatcgactagatgcacctaattagttgtagcccccgactatgtgatttgttgaacaaactaaacatatatagtcaaggaaaaaataaccaaccgagtggtttctaatgattatagtcatcaaaacgactaaaccaaataccaagcatatgcagcttaaatccccaaaataatatgatttataggatatgccgactgctttttatacaacatattaactcaaaacatttagcctaagcttaaatgctgatttaaaaagctcacttacgtgataacgatcggggttggctagggtt

SEQ ID NO: 8649 - DNA, 2474 bp, Oryza sativa
acctgtaacttctcatatgtatttaccatatcctataaattactttcctccgtttacatggatttgatcacttctgaaatcaacaagtgtgcagattacgaccatgagtatttttcagaacagataatgtcactcataactaaaattgtctaagtaaatcagctcccgtagcgtcgccaacacgcaggagacacgggggtgaaaccatagcgtcgccgccccctcccctcccccctcccccacctcaccgccactggagctcattgccggaaagccgattggcaagctaggatggcggcggtagggcctacttcgtggcggcgctccatatcaggcgcgggggaggcggcggacacttggcgatggggagtggcggtggcgagccctcccagcgaggaggcagcagatccagcaccgccatcacccacgggctgccctaggctagatccggctgggcgcagctagggcagcgggctggcagcgacgctgtggagcagtggcaacacgacgcgaggaggcgcggtcggcggtgtcggaggccggcacggccggcggcggtagtggagctcctaaaatcagcggtggtggagttgaggcgacgtgatcgttagacgcgggttttgttcctggacctgtggacggcggaggccgatgcagcgaaaggaggcgcggaggtcaacgtggcgcgaggaggcacggccggcagtgatggaggccggctcggtgtgaggaggcgcagccatcgaagaggcccatcgactatgggagaccagtgcggagagcggatggccgcatggtggcacacgcaggctaaccggtggggggcgccggtgcaacagtgcccacacaccgatgaaggatggatggtggtggagcaatggagcatcaattgttgataggcaggtggcggccagcggagcaatggagcatcaatatgttctatcactttctttgggagtttgagtgtgcacatataaaaggttggcggcgaagagaggacaaaattgacaagggtaacaagggtaagtctttggccatgattaagaaacatggtgattgccataagtcttctttcaactctatcaattaggggggagggggggaattcaacaattcttggctttgttgttccaaccggaagacccaaataagtgaagggcatcgaaacaatattacatcgaaaagtaccagtaaggatttctagtttttcttcattgacatgaattggcatcgtacaagatttatggaaattctcaaatactccctccgtttacaatgtaagtcattctagcatttcccacattcatattgatgttaatgaatctagacataatgtgggaaatgcttgtctagattcattaacatcaatataaatgtgggaaatactagaatgacttacattatgaaacggagggagtagtagagtaagcaaatggttgggtaatacctttgagacaaaaagctctttttgacaagctttcagaatgatgagaatatcatctgcatattggataattgggaattttcccttccacttgtgggattggcatagataagattccctgagaatgagctttgtttatccttgaagtgttttctttgttggtcaacataaactgtgggagtactagtagtggctttccgttgtttctattcccatctaaagtgctgacatcgcaggtaaacaattacctcatgagaaaacccaacctatagggtggggaaagaaggattttggtcttcaccatcctcactaatgtcctgtttggatccaagggatattttttagtccaccctcaaatagcccaaatagccccaaaaaaatccaaaagggtgagctttttgagggctatttggaaataacccacccagaaaaactatcccatccaaggggtgttaattggggctatttcgggtgggacccactgaaaaagtgtcttctctctatctctctccatgtgaaggtacattaaaggccaaatagctctcaaaataacccttggatccaaatgattagagttattttattgaagggctatttccttatgctaaaaaaatagctctcaaaataactcttggctagttttccaaacaaagcctgatattgcaggtgaataattacctcatgagcaaatactagcctagggtagggacacatggatgatttttttttaaccacccttgcaatgtcattctgcaaaatgtaaagtcgtacaagacaagaaaaatcaccagtagtctttgcatgaacattttccatccttgaagtgatgaaatcggttcgtatctctaatatatatctccctcccctcgaaagatgatatgaacttcattgcttcatggcagtcaccacaaatccggagattctttatcacctgaatcaaatatcccttgcatctcagcatcctcacttcaccatccttcaccatcctcacttcattgcttctcagttattgcagccatcgggctgcagg

SEQ ID NO: 8650 - DNA, 2838 bp, Oryza sativa
tttccaaaagcaaacggaattaaaaaccgactcatacacggatgacgtaccaaaataccggcaaaaacatttttaatttttataatagtagatatatgagtattaaagttattgagttttatgtgttagaggtaacttaaggttacccttaatttatagggggtgacaagaataaagttagagatggtagccgtctcaaatactctctccgtttctaaatatttgacgtcgttgatttttttaaacatatttagctatttgtcttattcaaaaacttttgtgaatattatttaaaaattttagtagtagtatatttaacaatgaatcaaatggtagaaaaataattaataattaattaaattttttaaataagacgaacggtcaaacaagtttaaaaaagtccagcgtagggacggagggagtataagggtctgtttggggagctttagattataagaagcagttgtttgatagccagcttctgagaatctgaaaaagctctgaaacccagcttctctagcttctggcttcttagttaaagctgtggattgtttgggacagcttctagcagaagcagcttttgagaaaaactgcagctggaataacatcccccaaactttctcaccactgcggctctaaacctctcctatctatatatccgtgctcgatctgagaactccagtagtcgatccactgctaacccctaccgagttaacacttaacacctagtcatatcgcagatcgagcttagctagaatggcgcgaatgcttgagaccgtgtcggagatggagaacaccgaggcggccgatggagatggagctacagctacctggagaagatccggtgcatgtccacgggtggcgggtcgtcgtctcgctcagtgagatccagtaactacagcagcgcgtcaagcaccgcgtccagtgcgcgtcctaggtacgtcccctgctacgatgatgctgatttcgtgacctactccttccagagggcagtaggacttggagcccccggacctgctcgagatattcgtgggcagcttggtgagtgagttcagccgggcatccggatccggccctgcgctggacaggtggttctcagaactggacgtcagctgtgtactccgcaatgatcaggaggaggaggaggcgaccgggagcctggtggggaggtgggcgcgagctctcactgtgatggcgcgcgcgctgatcgccacgctccaggaccaggaggacaacctcaccggccgactctgccaactcgggcggcttatggaggcgagtttctccaagatccaacttgcacagttcgcgcaggcgactttctccaagatgcttgcctttgccaacgccctcgctgataagccttggacgcggccaacggacaagttctcggggctcatgcaactccgcatctgcatcaacgacgtctcagatatcctcgtcccgctgtacaatgaggttttcttactagctgattattcaaaagaaataattgaaagcatagtaaaggagatcgatgatgttttctgggtagagccatattgatgatgacgacggacgccttgagccccccgagtggaccatttccggacaatgcagaaatccacaaggctactctgttagctgtcaactatgcaatattgttttggggataccatagcgtgctggaggccatcctacttgataatggcgatttgtttggtaattgcagttggtattctgagaagctagtagtagaaagattgattgtgcaaattataaccaacttgcaggatgagctcgagaagaaatccaagttgttctctgaccatagcctgagatatctgttcttgcttaacaattcctacgtcgtacaatatcagtttcttgtacccagcgactacagccctccatcggaaataaagttccactatgagcagtaccaaaaagagtatatgcgtgcctcctgggaacctgttctgtcttgcctacacgataagatgccaccgtgcttccctaagctctcatcgcattcggagctgtcaagattcgagttggaatttgagaaaacatgcagtcatcagaagctgtggaaggtcccgcttccgaatcttaggcagagcctgcgagaaaccatcattaataagatcattactagatacaaaaagtacatggaggaccatccagagcaggagaaatgcggcagagatccactggacatggaaggcatggtgaatgatctatttgaaggatgaaggggttgctacagtttcagaatgacaggcccgcacaaatagagtataagttttaaagcagctacgaagaggaggccaaggttaaataggtgttcttgatgtcctttttacttttaccgtattttgatgtcgggtgcaattgtgttcttatcccttgtttcttaactccagcggtgattttacccctaccattttaactttgtgattttatcatcatttttagttgaagcttgtgcctgcgcccattccattaagaggacttaaagttgtaaaagttcatgtcaaaaggggcaaacttcatgttaagcttgtactcgccctccttttttttaactgaatatgtgaaaattcattcaaaacacaaagtcatgttaaaatagcggcaaaatcacaaagtccttagcaaagtaggggcaaatatgcaagtgcacagatgtctttgacaccattaaatccttttaatggatgagagaaaacacaagcttccgttgaaaagaaatgagggcaaaaaaaccattggagttcaaaaaaaaaaaaggagggtaagaattgtgatggctactctgatgttcccccgttcgacccttaggtaatcctcatttta

SEQ ID NO: 8651 - DNA, 32092 bp, Oryza sativa
gaagaatcacagaaaaattcaaatgcagaatttttgaattcagagccattatcactgcgaattgctcgaagagcaccaggaaactccaaagccaaactacgagcaagagactgaaagaagccaaacgtttcctcttttgatcaagaaatagacccaagagtagcgagagaaatcatccacaacaaccaagacataccacttccccccaattgactggacccgagcaggaccaaccgtatccatgtgaagcagttatcccggtccatctgtcataaccattgtaacaggcttgtgggaggaagatgtcatttttccatgacgacatggtgcacacataagacctttcggagctttcaacttaggcgaaccccgaatcaaatccataccactaatgcgagacaagtagtcaaagccaatatgaccaagacgacgatgccagaaaaacaaatccctattctctgaggcaatgagacaacgagaaggaccaggagcagaagagtcgaagttagcaaagaaaactcgaccaactcgagaaatgtcaaaaataggagattcagaagcatcaagaactcgagacctgtccttttcgaaacgaacttccagattttcatcacagagttgtgaaacagagagcgaattgtacttaagcttacttacaagcgcgacatccttcagcatgaatttgtcattgaccttgattgttcctttagccatcacgcgtccactgctcgcatccccaaaagtgatggtctcatcaccggatgcacgagtgagagaagtaaaccacttggcttcactggtcatgtggcgtgagcaaccggagtccacaagccaagaattacttctccccactccaaaatcctacaagaaagacaaagcagatcttgatgattcagtactggggttagtgagaaatgacataggaatccagtactgaaccatgcgaggagtacaagcatctttagtgttatgagcataattatatgcaagatgaccatgtctgttttgccccaaccctgctaggccacgtcgagggtgcgcatctcggcgaggaaagcgagatacaccacttgaacgacaatgacacgcacactcgaacctctcagggactctagtagctcttctagtcctaagacgttcttgtcgctcttttctagcctttctaaagcagaaacctaccaaatgaccagctttcccacaataggtgcactcatacttggttttctctacaggcttggtttgtttctggttttgcttgtgctcaacttgttttggatttttgggtctaggtaactctataggcttagacttgctagtcataggtaccatctttggttctgaggttttgggtgaactagaactagtgtttccaatgaaacctgcagacttgaaggttataggtttttgagctagttatatcatcccatctgtgacacctaaaatttcatgggtacttatcctcaaagactcagcaaaattatagcctataccttgattgtttatggacactttggattggtctaggatcatgttcaactttttctttccttgagcaaacctctctaaagattgttgtaggtatgagttctctctcttagcagactcaagatcaactttcagagaaatgcatgatgaacaagaatcaatagatttgatagaataaatgacagttttagcatcttttagttcagtatccaggatagcacaattagcacatgaagaatgaacaggttccttagtagcaaaagattctaacaaatcattattggtcctaagcatggcaacttgttgtcttaattcatcattgtcactagtgaaaatgggacaattttcacacctaccaatcctatcatgaacaaatttttcttttaattctttcaattccatctcaagcaaacccatatcaactttcattttatagcaagtagagcaagcagcactagcactagaaggattcccagctcctaaagcacatgatttcaacttattcttgaggagattaatttcagaaagatatgaagcacaagtagaacatgtatcctcctcaggaatcatggatcgaagcctagcaatttctagcgccattccatcattttcagattttagtttctcaattttatacttagaagacctatacttgtcactaatttcaatcatcaagtgtgccattctttctttgcttagttcatcatcaacagagtcattatctgagcaagaatcatcacaaggagaaccatccaaggaagggatatcatcaagacatacctcaagatgctccgatgagtcatccttatcctcaagtgccatgagacacaggttgatgaagtcctcgttgttggcgagatagcacatcctggagaagtccttgtcccccttttcttgatcatcgtcatcggagtcgatgtcgctaagctgcacctcctcaagagtcgccaagaccttgtggatcgccttcttcatcaaatcctttctcccctttcgcccttgtccctcgggcttcttggtcgtcttgtcactcttcttcttcaacttgggacaattcactcttatgtggttaggctctccacactcaaaacacacaaatggttcattggtttttctcctttctctctctctcacattcttgtaagctcttgagaattttctagcaaaaagagcaagatcatcttcagggatcttctctaattgctcctcagtgactgagtgtaaagcggcaagagagaagccaccacacacaaaagctgagtcattagaagaagtactaccagagggatcagctaccaaagccatcgagtgtttgaggcctttccgatggaaaacatccatctcatgggtttttagctttgagtaaagcttgtccatggtaaggtcactcagaggtgcactatctgtgatggaagtaactttcatttcccaaacaccataatcaagacaattcaaaagatggcgagcattatcattatcagaaaattcttttccaacagatcacaacttcgaaacaatttctccaaaacgcttgaaataagaatcaatggactctcctgggtgcatctcaaatctttgatattctttatgaaattgattctgacgaaccaattgaatatcattgtttccctcatggaaatttcacagagcagtccacatgtcatgagcggacttgtggtgttaaacacgattaaattcaccaaaagaaattccaccaatgattgcatttcttgcacgataattaaaatcaacctgagccacatttgcaggcgtgatgtcatcatcatcgggcacagtgtaaggagatttaaccttattccacacattattcccttgcgactggaggtaggcctccattcgtgccttccaaatgacaaaattgtgtccatcgaaaacaaatggtttcgcagagtatttttcctccatagcggcattcgttgccacggttaggttacaacgaacttaaccgggctctgataccaattgaaagaccaagaacggctatagagtggggggtgaatatagcaattcaaaacttgtccccaaaaatactcatcaagccggatttctcaaaattcttactagaaccgcggctattagagaagccggatctagaaaagaagagagatggaattctcgaatctagaagtgaggtgaggagaagatagcaaaactcgtcatcgcgaaattcaaatcgcaagcggaatttaaattgcggaatttaaaaggcgaagacaaaacgaaatgcttcaaatcattttattcatcggtgttgcaaaataaccgctcaactaggagcaaacatacacctttagaggaacattaacacaaactttaaaatctctcggacaaacacactccaaactaatcctaatacaaaagcctctcgggcaaacacactccaaactcacaccgaaactctctcaccgagcatctcaaaaggattacaaaagaagcaaccttcacccttgcatccacctctccatttatagcctaagacctcgtaagacattgtcacaaatgtctttagggcgaaaccctaactcagatgcaatctgggccttaggttgttccttacatcctaaggaagtagcctggattgaagccacgtcgcttgccacatcgggatcctcttttcacaaagagtctgcaccaaattcctcccatgtgcgtgcccgcgtgctcctcaacgtgggccccgtgatctgtgagaaggctcctctgagccaatcagcatgcaccgatcgggagatcgatccgcgtcgtctccgtcttgccgaatcgaaacttgccacgttgcccagccgtgccatgcgcgtcctgtctccttttcctcagcgcgcgcgcatgcccgcgccctgtccggagccgccacgcgtctcgccgagccgctccgcgcgcgctcgcgaaaaccgcgtgggtcccacccccgtgcgcaccgaattccttgccgccgcgtgtccactgcgcgcgcatgcctcgcgcgatttcccgcgcttgcccatgcatggtgtcgatgccatgggccgtcgtcttgtcttgggcctgctcggcctggcctccctgccagctgatccatccatcatcttgagccacgaagaagggctggattggcttggcctccctgccaaccaatcacaacacacatgcacccatgggctagcaagctcctcatgcacacatgcatgtcttgagcccgtgcatggcattcggccatgtgcacgcatgcataaccgaagcaccactgcccatgcttgcatatgcacataccagtgcatgtatacaagctcctcttccattctccattttcttcgcgaacccggcacttgcacttgaccttgcgaactccgttgcgaagacctcctcacatggtgtccgtccaccgtgtgcaaccttgtgtccaatcttgtcacccagcatccttgatcgctctggacctcaactcctccctgagtctagtaccgatccgtcgttgactaagatcgaccccgatcacctgcacacacatgaatcaaacaaccgttgtcttggcacagatgtcgcaacctgaccaatgttagtctacgcacacacttcttgcacttccggtacttgtcaatttcccatcacaaaagaactataaccacacatggtttcacatcactagagtcttgaatagggattccttggaaaattttcagcatagtggataaatccacaaagctactcggctaattgtggactatgcaagattgttttggggatacgagggcttgttgcgtcacatcctgctttccaaatgggatcctcactcggacgaccgatgctctcaacttccgatcaccatgattcagcaaatgctcatcaactttgaagatcagctggagaagaactcagagtcattctctgaccctagcctgaggtaccagttcctgcttaacaattcctacttcgtaagagaagagtttcttgagcccagcaattacgtgtacatccttccgtcaggcacaacgctcaaatttatgcagtaccaagagaagtacatgcttgcctcctgggaacctgttctgtattgcctacaggataagatgccgctgtggtttcctaaacactcctcacagctgtcaagattcaagtcagaatttcagaaaacatgtactccacatcagaagctatggaaggtccccaacccaaggctcaggcagaaactgcgagaagccatcactgataaggtcattactggatacaaaaggtacctggaggaccatccggagctggagaaatgcagcagtgatctacaggacatggaagacatggtcaacgagctatttgaaggatgaataaggattattccagttttagactgacatggccatgcgtatatggagtgtaaactttaaatcagctacgacgagaagagacaaacaagttcacacttgatgccttttttattgtattttgatgttctatcctcattctacttttttctaggaaatcctcattctaccttactaggaataaaatgtatcaatataaaaaaagaataaaatgtatcgacagtttaatacaagcttcttcctgtattattatctcctcagctctttaaaatttacagtggctttataatataagtgtacgtactttacactgtaaaaatgatttgactattttttagtaaaaaaagtggcttcgtaaatattgtattcccttcggttttgctctaaatttgttctacaaatggactctttcacggctagttccctttagcaccgtgtgataccctaaaaaattgatgaaaaagaaaaggaaatagaggagagaaaagctagtgggctgtgttgaggcctagatgaccataggcccagcccactcttgagaaggaagagctaggaataagtctatttgtagtccctgaattattgtccttggttgaatcgtatccctcaaccataaaacagggcatacaggccgaaacttctaatggtcgatcgatcgccatggagatcaggattcgcccccgtctcccctccctctttccacctagtttccttttttggcaccgtattactttcctattttagtaaatttatgcacctaaagtttatagacctcaagtttacatatctaaagtttagagaccaaaagtttataagtcaaaagtttatatatccgattcaaatttgaatttaaattcaaatattttttatatatagtatctatctatctattatattattaaaacagctttgaaaggagtcaccacgttcgccgtgagggctagaaattcccaaattaatcggagaaaaagaaaaggagagtccaagtagaaatacaatttaaaaatagctgaaattcagaattaaaaataagcaatattgaaagaagagtccatataagaacccaatacgagattaatcaaaatttggaataaaaataaaataaaatccaaaattagaaaagaataggagagtccatgtaagaatacaattaaaaaataactgaaattcgaaattaaagataaggaatattgagagaagagtccatataagaacccaagacgagattaataatattcagaataaaaataaaaataaaatccaaaattagcaaaaaaaaaagaagagttcaagtagaaataatatttaaaataaaccgaaattcggaattaaaaataagcaatattgaaaaaagaatacatataagaacccaatacgagattaattaaaattcaaaattaaaaataaaataatatctaaaattagaaaaattaaaagagagttcaagtagcaatatattttgaaacaactgaaattcaaaaataaaaatattataagaacactatacggtattaattaaaatttgaaaaaaaatctaaaattagaaaaagaaaaaaatatttcaattaggaatagaatttataaataactaaaattggtgataaaaaaaataaagactactgaaaaaaaagaccatctgaaacacatgacaagataaattaagtaacatgcttagaaaggagtagagtggtgacgattgatacgacatataaaaattgttaataaaacaccaaatagaatcctaatgacgattaaaaggagcgacgacaggcaagccgtgaagcaaatgggcaagacagttgccgggacttctagaaagtaaaaaaataaacctcattgataatcatattcaatttttaaaatctcagtggcaataaaaaggagaagcagtgggcggggtgtataggagtatagttgtagagccgtggacggttagcgggacttatagaaaataaaaaatgaatttcaacgatagttatatttgatttttagaatcccaatgacaataaagagtaggcggcggatggaccgtagagaagtattgtggcatcgtttgacgggacttgtaaaaattataaaaaatggaacctaacaagacaataaactctaaaaactacaaaactacaagatccaattgttaaaggttgggaactactaaaaagtaaaaaaaaaatacaataataatcatgttcgattttaaaatctcaatgacaataaagaagagagacagcgggcgagccataaaggagtacaatggcaaagtcgctgacagtttggcgggacttctagaaagtaaaaaattaaacccgaacgataattatgttcgatttataaaatcacaatggcaataaagagaaaagacagtgtacggtccgtataggggtataatggcagcgtttgacgggacttctagaaattataaaaacgaaacccaacaagacaataaactctaaaaactacaagtccaatttttaaaggtttcaaggagaatgaatagaactagtggtagatcgagcaagcaaataaagaagaatatgacagaagtaaggggtagcagctggtgtgacttttaaaaactatataattagaaatacgcaaatgataaggtttggtctttcaaagtcttaagacaacgagatagctatttaataaattttaaggaaaattatactgaaaaatgtatgattttgtttgggtgctaggtgcgcaattgcgcgggccacccggctagtttctatacatctaatgtttatacacctaaagtttatagacctaaagtttataagtcaaaagtttatatacccgtttcaaatttgaatttgaattcaaatattttctatatatagtatttctatacatataaagtttatacacctatagtttatagatccaaagtttataagtcaaaagtttacatacccgattcaaatttgaatttaaatttaaattttttatatatagtatttctatacataaattttctaacttttgtttttcttttaaaaaaatgtgatgtactgtagtagaaagagaagaaggggaggaggaagggggagaagaggaaggagcgtattgcgtatagggggaggggagtgcgggtgatcgctcacattagcaacaccctatagaggctccctcaactataaaaacaggatcaatttgtctcctcgagctgtttgaacggtggttttatcctacgtgagacgttgaccaagtctttatttgacgtagcacctacatggcaacgtagtaaaaaaaaaaaggtgggaccaaagatgctgccctccctgatctagctggccagcgccgtagccgtccccgtcatcccaagcattccgcaatgcgggatgggagcggctgccccagcgtgccgacctggccatgcaattccatcgggagatgttgcaccgacaccgccgccgctgcctgctgctactgctgctgttgccggttgaagttgatcatgtcgtcgcggacgcgtagctcctccgcctgcttcgccatctctaggactcaagctgttgcagcgatggcgaatgcgagagggagagagcccctggtcttcaccacgctgtccgcaccggcgccgagctgcaccggcgccgccgaacgcagggaatgcttcgtggtgctggtggatagccgacagcgtgtccgactgcggcggtgacgtcgatgaccgggattgctgctgctgtgtgggttcatcaagaagaggtgcatcgccatagctgggtcggtggcaaggccaaccatggcaaagttcatcgcaattttagtaaacaacacaaagcacaacaatccgtcatcatcgatctgctctgctcctctcatggtcaggcatctcagtaatccgtcggtggttggttgccgtcaatgtcataggtctctgccacagcatgatccctttgtagctgctgttcttggtcctgatctcgtcggtgcaccttcttgctcaccttcattcagattgcagttgggttagtggagaagggatttcaaaagattaattattggttgcaaagtgcaaaatgttgcatcaatggagaagtagtttgcaaagattgattcttagagtgactcgattaatttgcttgtttgattgattgatcaccttgtgtgatcttgcgtggaggcggtgatcggaggacaccaccttccggcgaggtaggctccagcagccgcccctgagggggctcttgctgccgggcttgtaccagttgacaatggacatgtcgttgaccctgcaacgctccttctcctcgccggcgccggcgaggtcgcgccgccactgaaccatgatcacctgcgcaccgcgattcctgggagtgggacatatatagaagaactcatcatggccgccgatcagatcctcgcgcagccttggtgggttggctcacgaacatggcggtttggcctagctgagacgatggtgctgctatttccactgccaacatcgtcggctgatggaaaagagaggagagaggaagatagtgaggggaaaagaggagagtcattgatatataggacccacattttatgttagcaaaccattaaaaaagtctatttataccggtttttaaagataggggagctcttatatctgattttacggttgagagatgagattcaagtattcaaccaagagttaagtagccatttgggcaaccagcgagcagcatgcattgatgcatagcaggagaagtgcgacacggcagcaagcagcagatgcatgcacatgtagtggcaccttgataattgctcggaggagtggtttaaagaggatgaataatttggaccttttacacgaaacgataaataactatagtgtgttgtaatgaaagtaaactaccggagaaataatctttattaggtcggttctaatataagctgggactaaaaaattttatttagtcccggttaaaaatttgttgatctttatcaactgggactaaagacatctttagtcctggttcatcccctgtcagaggcctgtcaggggaccgagaatctttagtcctggttgatactactaaccgggactaaagattaccaatttaatcccagtttaaaaatctatctttagtaactccaaccgggagtaaatatttctctcctatctctgatcggttaagtcctagacgagacttttctcctcaccaagatatttagataagattagatcgatctcattccctctccacctaactcctcagatccccttcctcctcctcctccctcatctcctcctccccctctcctccccctcctcccctcccatccggcggtcggcggcggcaggtaggcagggccgcgcggcggcggctggcgggaccgcgcacgggcgtggcgagcggcggcaggcaaggccgcgcgcgggcgtgatgagcggcggcaggcggcagccgtggtgggcaatagcgtcgattctctttttttttagataatttgtgattcactgagatgtataatttctttttttttagaatttgttattcattgcatagatctgagatgtatttgatttgtgtgtaatttttgtaggatttgtgatgtatttgatttgtgtgtataagtaacttaggatttgtgatgtgaatggtttgtgatgttactctgatttggggatttgaggtttgatttgaagatatgactggcactcgatttgggagaaaatatagggattaactctgtcaattagcaaagaaataatgaaaaaaaaagaaaaggggaccaaccgggactgtcctaccctctctttactcccggttggtaatactaaccgggactaaagattcaactttactctcggttatttcacctggaactaatgatgggtattttagtcctggttagaaaaccgggattatagaggttctcaatcaggagtaaaaacggttttcccagtggtggtataatctaataaattgtgttggatctaaaaccattaattttcagggatgcagctactctgacgtaaagtcataggaatatagatccctgatagatgagattcaccaatatagatccattcccgagtgaccgatgttactctgacgtaggccctgtttgggagagcttctcctagctgtagctttttctaaaagctgcttctgcttgaagctgccacaaacggtccacagcttctgagaatctgtagttacagattctgaaaaatgaactaagaagacagaagctggagaagctgggtttcagagcttttccagattctcagaatctaaaactcccccaaacagggcggccgtagtatgttagaggagcctagcattttcaggtgttaacagttatgcattgttcgggtcttaggagtgacacatcgtacgagcatatggaccacagcaaactagatagttcttggggtaagttgccaatattactaagttttggcatgtttgcttatgtatctactaaagtttgataaaaaactaaatatatgtatatttttagtaactttattagaaaatggtatagtttaaaatgatattaatctgaacaacctatttatatggaccgttgaactgagcaattaaaaagtgtggtctatacagaaattatgatacttagggggtgtttcgatctagatactaaactttagtccttgtcacattaaatatttggacacctatttagagtattaaacatagactaataataaaactaatttcacaaatgagagctaattcgcgagacgaattctttaagcctaattaatccataattagcagatgtttactgtagcatcacataggctaatcatagattaattaggctcaatagattcgtctcgcgaataagtgcagggttataaaatgggttttgtaattagtctatattgaatactctaaattagcgtcaaacatccgatgtgacagggacaaaaagaaaatttagccccatccaaatacccccttaagagacctaggttcggcctttcaaccttctcatatttcatctggattaactgatggcttctcctatcttattatcattggatggctagcttcttctggctatcccaatattttttaggatttgatatcctggatttttcaccttttagttcttttagaaaaactcattatttttaaaaaacttattctataaatagatgtcacgcccggaatttctatccaaaattccaaacgcttacatgtgtgtgaaccctcgtccaggaatcagccgagacacacaataacaaattgataatagagtacaattattactctaattaataagcgaataaaatgtcattacagaggtagatagttcctctcaatcaataaatatctaagcagcggaaaataaaataaacggcgcagacgactccactccactggcagcttgaccagggctacgcctaatcctccacaccatcagcatcattgtagaactcttcctctgatgaatgattgcaaggtgagtatatgacatactcagcaagccacgcagcaaatatgcaagtgcacaaggataccaaagaatggcataatatagggctcatttgcaaaagcagcatttagcaaacatttgagaattataaaacagttaagtaataattaaacaatattaatccaacactatacaacataccctgttgcataggcccaaccattctgaacaaccatcccggctgcacaattctatctccaaacaaggaatataccattccaaaccaggagctaaacaaattaataccagttataacatcttctattatgatgagaagtgtgaaactaatcacgaaagacattgtttgacccgcccataactgcgggcacggctattcgaatagttttactctgatcagaggtgtaccactgtacccacaagacacagccccacatcatgtcaccatgtgcctcaataccaccacggtaccttggaaaggagctgtgacagtacccctcgcacaacacaatccaccacagcgcaccattcctggatcataatcacccccttataaacaaggcatggactccccagcgacccccgtgggcttatctccgccacttctcagtctggtgccccgcaatgaaccatgctatacaaaaggtaaagccgttgcccacgctggcttgtggttggcacgattaacgtttcacaaccgaaactcgtgaactggtccttaattgtcatgagcacgactctcaaaaccatgtgctcacaacccaccattatcaagttttagttggcaattaattaattaaccaatcacgattgaccatcgcgaactatcattaagccatcattaaataatagtgagtcataagttatcccaatagtgtgctaatgtttctaagcatgactaagcaatcacatctaatatctagctgaaccaatatatataaagctcaactagtcaagttataataacccaaggtatcaaggaataaagtaatcaagaacaaaagggctataacaaataataggttaattccacccaatgacattcgaaaataaatgcaatagttgaatagaaacaatagctttaaacgggatcaacatgctcaaagggttgtttggaatctgtgtgacttgccttgctggccttggaactcttcaaattcttctcctgcgaaaacggactctccggaaacgtcggaatctaagcagaaagaagcaaaatcaccaaaacagcacataaacaagcatgaacagtatatgtggatatttttaaaatgtagatctcaattttagaaaaatttagagacttgaaccaactaaatccgagctaagatgaattagttatgaattttagaagattaaatcggattaaaacacttatatggattttaattgaattatgacgcaataatgaattattttagaaaaggaaaagggatttattgcgtcagcggctagggtttgcggtggaccgggcgcacggcagcggttcacgggaacggacggccgagatcaatccatccaaaacggacggccgagatcgatcgggtctacggcggctcacggaaaaacgacgacgatgacgtcggcgatgacgtcaccaccggcgacggctcggcggctcgagcgcgcatgctcgctggcgaacgacggcacggcggtgcaaacggaggacaccaaaacggtgcgggcatcgcggcgaactcaccggtgaccaaagcaacggcggaggagcaacgaacgacgtcggcgacgaggtcgaagcggcggagaaggtcgggtcgacggcggcgacggtgctccggcggttgacagcgacggcgaaggggcggacgaggacggcgacgacttggcgaccacgatggcgatcttcccgaacgacgacgacgaccggaacggcggcggcgcacggctggagcggcggcgacgacggcggctcgaggtttcacggcgctagggcgctcccgacggcgagagacgaaggcgagggtggcggcgggtagaggagacaccggggatccttttataggggcaaggaggcggcggcgaaggcccacggcgaccggcaacgcgaaggaaaggtgaggatccggaggaaagagacgaatccgactcgagatcgaatccacggatttccaaacgattttagccggtgattccaaaagagaaaagatagaggagatcccgaagatcatttcccctctattgatttcactggaaacggaaaggatcggccgaatttggaaggagacggcggcggcacggcgctagggtttcgggcgacgggcggccggaggaagacgacgaccccgacaggcgggccccacctgtcagcgagcgaaagcgcgcgcgcggctgcggcggactgggccgacttgggccgggggagagagagaaggttttgggccgactttcggcccaaagccaaaagagacttttaaaatcatttttcaatttaaattattcattaaatgcaattccatttattaaaaatacttccttagctcaaataaatcccagaaaaatctaggaattatagaattaagcaaagtatttaatgaaattttatctggccccattttacattggaatttattaattaaaattagatcttctcttctaggcttttaaaataaattctaataattccaattaaacaacaatttatatatttttggatttttagggtgtgacaatagacctcagaaaaaaatttattttaaaaattttctttttcttcttcgtactgattcgtatggaattagcctgactcggcgcacgatgccaatgttattagtgtcgtggtcaaatatgaagacggtcattggcaccatcccctccatccccaggtggaagctatggcactgatgtgagagggagaacgtcaatatcattggtgtcgatgatttatttgtaaaaaaataaaaattatctatttataattaaaaagtatatacaaataggtcatcagcgtcaatgctgaggatctatttgtaaatattattttattgcaaataggaccatttttgttacaaatagatcttttttatataaaaaagtgcgatttggttatcctttacattagtgacttagctttcacctagaagtggagggcgctgtcttattggactacgacaccaatgatattggtgcagtgaatgttatgaaaatagatgcataatggagacacgaattttacgtggaaaaaccttacgagaaaaaaccatgggtggcgatcggcaatgatcactattgagcagttgattttaaacgtaggggaataacaatgagaacccaccccttcccatacaacttacaagagtatatataggagataaaagaaagtcacataataagaaaagacatagagtcctattaggaaactaattcgaatacattgtaggcctaaaatttgtatcacataccgtatttaacaatctgcaccttgagacgaatttcctcttgtaacataaaaatcatcaatcaccagaatacctcatgtaggtaaaatcaccgtgcaccaaataatctgtaggactataatgcaacacgaaccaaacttgagcaaagctcaaacttagtagcatgaattagctttgtcatcatatcagataggttatcatgattacttatcttgcataacttgacatcaccttcagcaatcacacctcgaataaagtgatatctcacattaatgtgctttgttctctcatgaaatatctgatccttagtaaggcatatatcacccatcaaaatagtaccaccttgcacaacttcatagttggcaaaccaatccctattcgagcacatgtgataggtgcaagcagtatcaaaaatccattggtcactactttatgcacaaccagcataagcaataagcaattctgcattagacttctcattaataacaaccgcggctttaccttccacttctttattactttttggtatgtactttccggttcttttgtccttgttctgtagcttccaacactcagagatattatgtccatatctcttgtagtatttgcatgacttatacatgcatttagactttgatctcccacgatagctacttgaactttcatctcttgattggttctttatgttcttctcctattgcctgccccgaacaaccaaaccttctgcttgtgaacttgaactttcagagggtaacatcttcctttcttttgaattcaaagcttcataaacttctttcaaagttagagtataacgactataaagaatagtatctctaaaatttgcatatgagctaagcaacgaacacaacagaataagacctaaatcctcttcatcatactttacctccatggagtcaaggtcaacaacaattaagtggagagataatccatcacatattcatcatattgcaacttgtgcaaaaaaaaaaacttttgctttaggtgcatcttattggtcaaatcgtttgtcatgcatatcttctagcttcaaccacaacccaacggttgtcttctccttgagcacctccaacaaaatattgttagatagatgaagatgaatatgtgacatagccttatgtccattttcttcttattgtcggactaatcctgagtcctcttgttaaatccagataacacatcatcgaggtcttgctgtgcaagaacggttcgcatcttcacttgccatagtgagaatcttgtgtttcggtccaggagcggtagatcatatttcaaactcgccatgggaattgatcctgaatttgctactaagaaattaatgtaaacctagcaaaacgtgaacctctggtgcacttgtcatgtgcacgtactgtagatctggaatcctcatgttaagcaggctgtgtgtgcgtagcaatttctaaccgtgaaaattaattcagccctgccttttctctttctcgatgcgcatgctgctggatggttttccttgctgctctgctttttctcctgctacgcgtgatcattctttttttttttttttgagaaacgcgtgatgagtcaacagatgactccggttcggcctgcgacgagaactacgcgtaacgccgctgcagccgatgagatggatttcttcgaacggagaaacacgccggtaaccggaatagtagatcagattttcaatggatatcacttattatgaaaatagatgtataacggagacacaaattttacgcggaaaacatttatagaaaaaactatgagcgccgaccggcaatgatcaccgttgaggaattgattataaacgtagaggaataacaatggaacgtcatccctctctgttcggcttacaagagtatatgtaaaaaaaaaagacatctagtagaaaaagatatgaagtcctatttaaaaaactaatacaaatatattgtaggcctaaaattcagatcacatatttaagtgtgaaaataatcattttaaaataagtttttaggatctatttgtagaataattattttaaaaggatcaaaatataaaaatccagctttgacctcccctcattagtcagttctcaccaaatctggtaaagaacagcatcactcagatcggatccactgcctagagctagcttagcacctactgcagatatcgcgcaagcgagcatggagacacagctgccgaccgtgatggagctggatagctccgagccggccaatttcacgcagccgtcacggagatacagctacctggagaagatccgtagcctgtccgtcgtctcgggcgaggtcgccgggtggtcgtcgtcggcgtcggcgtcgtcgtctcggtcggcgagatccagttactacagcagcagcatgtcaagcaacgcgtcgggtggccctcataatcatcggtacgccccttactcaaactcgtcgccgggtgacattgacctccacggtgctcaggacattgcgcggcagatggtccacgacgggttcatggtgaacttgatcagagagttcgaccgagcgcccgggccagcgctggagaggtggttctccgagctcgacgtcggctggttactccggtcggcggcggcggcggataaggagcaatccgagctcggcttggctgatctcgtgcggcggtggacgcgaggatataccgtgatggccgaagcactcagcgccacgcagactaaggttgcaggtgtacccgccataatacttccgcaggcccagcgggaccataacaatattatgtgtgatcaagagctggaagacgacctccgacttcaattcgcgcggttcgttgaggcgacagtatccaagatgcttgcctttgttgatgccctcgccgctgaaaacactcggctgtcaatagacaacctctcgagactcgtgggcctgtgcagctgcatctacagctgcttctacaagtgcaatgtagtagtaataactgattcagaagaaatagttgattcagaattgcaatgcctaggccgcaaagtggttggtgctttcataattacaacgacaaccttgtgcaatgcgatagagagtatggcgatggtcgccgaagctgttacccctgtcttaattggttgggattcctgtgaaaattttaagcagaatgcagaaatccacgaagctactaggctaattgttgactatgtaagattgttttggggataccagagcttgcggagtaacatgcggtatcttaaatgggttcaaattccgatcaccatgattccacaaatgctcatcaactttgaagatcagctggagaagatctcagagtcattctctgaccctagcctgaggtacctgttcctgcttaacaattcctacttcgtaagagaagagtttcttgagcccagcaattacgtgttcatccttccgtcaggcacaacgctcaaatttatgcagtaccaagagaagtacatgcttgcctcctgggaacccgttctgtattgcctacacgaaaagatgccactgtggtttcctaaacactcctcgcagctggcaagattcaagtcagaatttcagaaaacatttagacatcagaagctatggaaggtccccaacccaaggctcaggcagaaactgcgagaagccatcattgataaggtcattactggatacaaaaggtacctggaggaccatccggagctggagaaatgcagcagtgatctacaggacatggaagacatggtcaacgagctatttgaaggatgaataaggattgttccagttttagactgacatggccatgcgtatggagtgtaaactttaaatcagttacgacgataagagagggcgaggctaaggttaaataagttcaactgtattttgatatgttcccacctcattctacttttttcctaggaaatcctcattctaccttactatgaataaaatatatgggcagtttatttttttttacgccagatctgttgacagataacaatacagatcttcttcctacattatttcctccacggctccaccctttgattcttcaccataccgctaataacttgctcaggcctcacagcctccaacggttggggagagagacactacagggcaattgctattttctcctctaatcccctccataatcaccagtggttagcggcggcagcagcaaattgcattggtcgccttgcctgttctcccgtgggtgcggcagtgttgcaaaatctgcaacaattagttgtgcgcgtgttgctggagcggctggtgatttccatgatctgctatatcttgttcgtctcaactcgcgtgtttgcgtggcccgcgcgtgctgcacgtacgtcccttggcgttactgtgctgcttctcttaggcctcaaatttgttgagcagtagatataccatagtggtgtcgtatatatatatccgtggacaggtggctaggtggcagataattgtttctctggaaccgtgactttgtcatgctttgctaggcttctgtatagttgggagtgtccttatttgtgacaaaaaaggtccctctctatcttgtgatattatgtttgagacttgctaagtgctagtactgaatcaattattgttagttgttagctttctattgtggagtaaattgagagccatagcttgaaaggcatgttcggcattaacattataaaattatgagtgaattacactttagaccatgttttattgctaaagtttcactttgaaccatcctgtacacaatctttttactttggactaggtaactttacttttgttgcataatggacgaccaccctaactcttttcgctagtgatgtctagcgtctctttcaacaataactcttttcgctagtgatgcctagcgtctcattcgacaaaggtatggcatgtatataggtatgaaaatttgctggcatgtcgttaataatttgctcgaagtcatcgaagaactgaaggcgtggtttagggtggtccattgtgtaacaaaggtaaagttacctagtccaaagtgaaaatactggacaaagggtagttcaaagtgaaactttggcaataaaatatggtccaaagtgaaattaactataaaattattgttggttcttcttgactaaccacacggagacttaattagtagtgtagggcgaatccaccccatttcccacgcacgcacattcataacgaacgacgttgtgactggaggcacactttcccttctgggctagcccccgtgtaactatcaccaggcaccagcgctacatacaaaagtagagaaggccccgtgcatggagacatggcgatatttcgcaccgtatgtaccctactatcgaaagagatttgctccggtccaataaaaagtaacttgaggtacccactactacggaaatcatctttcgtggcggtcattttgtatttttgctggtggaatttggagccgccacaaagcaaaggccagtgaagatctaagattttcgctggcggttttattccgcttgcgaaaatctattttcgccagcggacaaacgatttttgctggcagttgaggtccactagcgaaaacccattttcactggtggttgcctaaagagaactgctagtgaaaatcaacctaccccaccaaaaatccccaagcccaaattcaaaattctctgcccggccaaattcaaaacagtccatatctgaaaatggacataaacatcattcaagcatcaatccaaatccagagcatcacaaatacataatattggcatcaattcaaacacaacacattggcattatcaacaaaacagattaacaacacacagattaacctaacatccttacaaaccaaaacacacaagagaaccctagccgctgaagccatcggggacgagccgccgccgctgccatctgttggctgcctcccctccagccagatctggaagaggggaggggagggggggaggggaggggagggcagtggtgccaccgctgcaggcctcctccagaagggtcgcgcgtggtcaaggtcactgagcccggcaggcagcgtcgttgtcatcgtcgttgttgccgcggtcgcggtcgtcgtcgtcagctccgctgtcgcccgcgccgcgtgctccccgcgccgccgctgaggcagatccgtcctccccaccgccgcctttgttgcgccgccggcggcggcctcctcccctcggacagatttgggagaggggatgggacggcaggggcagtgcagggagccgccggtcaccgccgccagagccgccgccaccgtcgccggtgggaaggccgggagggaggaggagagtgaggaggagagaagaggagtggataatgtgactggatatggagagaagaggaggggatatggagagaaggagaagaggatgaggtaggtgggtggttttaatgtgaccagatatttttggatcactgagctgggttttctctggcggttttgtttattagccgccaggaaaaattcgaccgctaacgaagattatctatttttgctggcagcgcacctaagtgaccgccagtaaaaatagacatattttcgctggcggccgcgttagacaggccgccagtgaaaattcattttctctggcggtcggtgcccctcatccactcgttacgactttgcggtggttttcacatttttccgccagcgaaaataataggccaacgccatgaaaaatcgtttttctagtagtaccagtacctcacggtaccaaatcatttctgatcgttggatctagcaatgcacatcctgcccagctagatccaaagatcggaaatgatttgataccgtgaggtaccggtacctcgaggtactttttgttggaccggagcaaatctcggtacttgtaaattgcttttcgttaagcaatttctgttcgaatgatttttttttgaaaagtcatggttgtggtctgcagacttgttgatcatatggcgtatccatgtaaatggaggaagaaacctttagaggatatggtaaacaaataagaaaatttgcaggtgaagaaatgttaaagccataaaaaggtaagttcgctatcaatctgtcataataattcattcaactttgcacttttctgatttcatatctgataaatttcctgagacatcactaacatgataatattcaatatttatctgtttaaaatggaagagactgatagacaagggcacaacaacatctatagttctagactccaaacataatatttttacagtccttgaagtaggtatcaagagataccaaatttataatagaaaaggtggtatttcatggtaaaattgttctattatttaggatatggagaatgttttactacatatactcgttggtttcagatattccacatcccctacatgagtcttcttgttctcttgagtttgtgagagctagctctgcgttggtttggttatgtaccctacccaaagttgatggagccaaaacattggcattgttaaatttgttaggatagagatgaagaatatgtttgatttagtgctaaaattgtgaatatatggcattgccaatttgctataatttttgcagggtggcattgtgatggagaccataccaaaattctagcactaccaagttttggtaggttagcaaactgaactagataaacatcacactgaacatgaactgcctgtctctgttctcccatatctgtcggagcccctgaggccgagcgggacaagccatgaacaaggaaaggaggatctaatacaagaggaagcacgcattgcaatgtgccaacaaatctggcacagcaagactgaagtacatattattccttgtcaaggtagaatgaagatttccttaaaaaaaatcagaacactagaaaaaagaggcatcgaatgaacttgtttaaccttagccccttgtcctgttagctgcttcaaaatttatcctatacgcatggccaattaggccatgtaattctaaaacaggaattagtactccttcatccttcaaatagctcgttcaccatgtcttccatggccagcagatcgctgctacttttctctggctccagatggccctccaggtactttctgtatgcagtgatgaccttgtcactaatggcttttcgcagcgagttcctgtgctcggtgttcgggactttccacagcttctgatgcctgcacgctttctgaaattccgactggaatctggccagcagctgcggggagtgtttggggaagaactttggcatcttattgtataggtaaaggaaagacagcacgggctcccatgagacatcgaggtaacaattctggtagtgccaatatctgatccctttgctcgatgggaagctgtaatcggtgttggtggcaagaaactggtcctgtatgaagtaggagttgttaatcaagaagatgtacctcaggctagggtcagagaatgactcggatttcttctcgagctggtccaggaaggtgatgatcatttgctcaatcaggctttgtactatctcccaacaattctggctactttcactcctgtaacaacataggatggactccagcactctacggtatccccagaacaaacttgcatagtccacgattaaccgagtagccctgtggattccttcagtctgtgtgaatttttcccaggaatccatggcgctcaagacaggagtaacagcttcagcatccttggccgtcttccgtatggcttcacccaagctgtcctgtgtgttcgccatggcttcaccgatcttgttgactaggctttgcatttgttctgaatcaggtagccggagatcgagagcctcctgtttcaaggcgggcatgaggatctctgacacgtcggagatgcaggtgtgcacctccatgagcccaaagaagctatccgcggttggagttgggcaagtcccggccttaccggcggcggcgagggcggcggcgaaggcgatcatcttggagatggtcgtgtcagtgaaccgcacgaggcagaggtcatcgccgccgccgacgacgccgcgtagcagcagttcatgatcggaggaagaagctaccgcgggcgccgtgtgatgtggcggctgggagattgcgaattccacacctccaacgacggcgacggcggcggcggcggcggcggcggctgacctctcgtcgtggaggtggccctgcgtggcgctcagcgcatgggccatcacggtgagcgctcgcgtccaccgccataccagccgctcggcctcctcctcctcctcctcctcctgctgctgctgatcagttggccggagcacccagccgacgtcgagctcggagaaccacctctccagcacgggtcccggcgcgcggccgaacgctccgatcagggcaagcacgaagccgtcacggaccatttggctggcgatatcgcgagggcctgggacttggaaccctaccactctcaggaaggagccgccggaggcagcgccggttttgcagcgacgacggtgagagccggcgccggactcggtgctggagacggtgctgctgtagttactggatcttgccgagcgagacgacgacgacgacgacgatgacccgacgacggacatgctccggatcttctccaggtagctgtagctccatctccacgacggcagggagaggctggcctcggtggcatccaactccgacagcgccgccattaattctagctctactgttttgtagtgcactgtatgtaggtgtagagaatttcggatcgggcgattgagaggtcgacttcagaagttcagaattcagattggagttcagtatagcttagcttaatttgctggctttcgatttcctgacacgcaactaaccgccttaagcgatagagacgaatataaatgacgtcgttgttgattggcaaccgcaacaataaaattacgaaacagacaaatgcatgcgtgcgactttcacaggaaacgctgcaaagtttggcggcgccaaatcgactctgtgtgcttgctcaacacctttgtttgccaggtgttcgtccatcatcttagtcttggtagctaattgtttttataaatataatatttttttcttttccaccactctcgtttccagtctctaccgaaataattaattgtctaattgtaaactcacagtggttctcttttcttgagttggtacataatacttacttcaggaaattaatagaatgtcatctagctactaactgtgttgtaatcccttgccaagaaaaaaagaatgactgttgtgtaatctggaagtcaagggtagcaatgtttagttgcctagctacttatgagttatgacttgtgaattgtttacgtggtgttttctgttttgtgcaacttccgttgtttacatacggtgtcgctttctgttttgttttaagagatgtagtatttctatcgactacctccctttatcccaaaatataagaacataagatcggattagacagaatttagataggttttctgtctagattcgtcttattaggatatactccatccatttcataatataatgtacaaccacttttctcagatgttccataatataagagcaggtacaatagcaggctataagccagctgcaaatatattttaaggagataactgaggagagagaagggtagcgggctacagatttgtagccagctgtagcacgaactccaagacgcagtgtgtgtatgacaggtgggaccagatattaatagtgtagtatataactattgtatgaatgagctattagattggctatagatgaattggagtatactattgaacttgctctaagacatgcatgcaagcatgcaattaattatgacatcttctctattagataacatgagagtgtaggatttaaaaaagtatagagaagatgtcataattaattagagaagatgtcataattaattgcatgcttgcatacatctcatgttatctaatagagtttaccactgtgccttatattttggaatggatgaagtatatgtcttgtctggttttagttttagattcttatattttgagaattgggatggatgtagtactcagttagaagtaactttaacttgcatacatttcattgtttcattaatcaacttcagttagaactagtttttttttgtgaaaaaaaatattcatggttgacttgttatattacggagtataatccatttaataggaaaatcgaggccactaggttgacgacgatcgaggtggttcttggtgatagatcagcgggcatcggctgaccatgagaggtcaccggtgatcaatttgcagatcggtttctttcaagcatctcctgcaaggccttgaatcggtccttagggtcccttccagcaccctaatgattgggcgataagagttaaggtttgggagagtagggtacttacggtgcgagatatcgccatgtccatgcacggggccttctctccttttgtatgttaccctggtgcctgatggtagttactcgggggctagcccaaaaggaaaaaagtgtgcctccaatcacaacgtcgttcgttatgaatgtgcgtgcgtgggaaattgggtggattcgccctacaccactaattaagtctccatggctagccatgatcaaccaacaataatttaacatggcaatgccgaacatgcatgtaaagctatggctcgcaatttactccacaatagcaagctaacaactaacaataattaattcaggactagcatttagcaagtctcaaacataatatcacagttcaacagtgtgctagtaggtgttcgcaagctaccagtgacggccatagtatcgtttaccttcataaagtgcaacgagcttttcacactacactagataaggtcacatgtgacgggcccaaccctcacctttgacgggtttaggcttggtcagtgatcagtggtcactggtgactccagtcgcctttgacgggtggccggccgtcacctctgacggacaaataactagaggaccgtcagaggtgttggtctctgctagcctagggccagttaggacccatcacaggtgacccatctctgatgggcatgtaaagaaaggccgtcagaggtgatggtctttggtagatagaagccgtcacaggtgatccacctgtgacgggcccgaaagtaaaggcccgtcacaggtgggtcacctctgacgggccgcgatttgcgtatccgtcacgggcatggttacctttgacgcattttgtttccgacatgtcactaatgagttaattccagaaaaaaaatgctaaatattggctagcctcaggatttgctagccatgccctctgaaaaacagaaacatcacagatacatgccagtcatcacccaatatcacatattccccaacatcacagatccatctcaaaactgacatcattcacatatgcagttcaaatgccacaattttgcacagcaaattcataccccatgaaagccacaatttcgaaattcataccccatgaaagccacaatttcggtcgttgctcatagaaccgcatacttaccaaactttcttgtatcctgttccttgtgaacctccacgacctgctattgtaaaaaatggagaaaacaattgaatagtacaacgtaaatcgtagttgatcaaatttgatgacaatttagcaaactaccataaatattgcacatataaaagtaaattacattgcattccataccacagaatcatagaaacaactttttttacatcacaagaaattagataattgtattgttcatgacttaacatctaccccgttcaatcatctaactggcatgaaaacgtcctttcttgttcattatttcggcaagaatgaaggcgcacacttcgcctttgatagcgccggggggggggggttgatgggtgaaatcttcaagccaactctacctttatgttcaataaatcaaaggttagcatgtttagaagattaatgttggtattgaaatgagcttatttgccattagcaacaatctcagagtcgaaatctttcacctcttagaagtgttgacatgttgtggcacacgtggaaaccacactggtctccgatctgttgtgtgcatgcgaacttggtgtcatgataaagtttgtccttgccctccttatgcctaccagccttttccacatatgggccccaagccatatttaaggccttggtgattgcagtgaaattataatcttttgccttatttgagttaagataggagaccctactccatttagggtctccgtcatcggcgccttacggagctccgccaccgtccttagcatcgcacggagcttagccaacgtcgtcgacgccgcggagctcagctgcgtccgtgtgtccaccgtcatcgaagacgcacggagcttgctgctgccgtcgtcgatgccgcgcgaagttcctacgcgcgtccgtgtggccgcctctgccttctccatcgccgcatgcacaccatcgtcgatgctgccatcgatcgcctgcgtctgcctccgttgatgaaagagtagagagagaagaagaaaaggataaggatgcggtttgctggaaatgagataagcgtgtgggagaccgatatttccttcccgcatcggtcgcccgataataagcattttcgtatggattaggttgtgaattgggcaatgctcactaggaaaataaggatataattcaagtagtccttatcggatccaaatcgaactctatatctctctttttcttatctaggacttctttcttatctactcatcactttatccatatgtacgagggttatttttgtataggacttagtatatgatgatcccatcgagctaagaatacatgtatagggtatcccatatctagaacactgatgtaaagatcatgcaaatatgttggatcatctacaatttattaccccctccaaaacacagggacttttaggttgtttaggaaatataaggttacatttcttttagtcgcttcagttgttaatttaaaaattttgaattgcttagattccatttgcaagcatgtgattggcttcggaattattgaaatgattagaaccgtgggaatcaatgcaagaatccttatagcaagtttaatagtatagccaactattagctttaaattatctatagtcaatttaatagccaattcattcaatagttatctataaacatatactacactattaatacttggtcccacctgtcatacacatattacatcttggagtctgtgttgtagctggctataaatctatagcccgctgctcttatctctcctcttttatctacttgaaatgtatttatagctggcttatagtctgttattgtacgtgctcttatattgtgagacagaatttgaattatagagatccttatattttaaaacgatcctcattattgtgatacaaaatttgaggtatagaaatccttatattctaaaatgagggggagtatattttaaggcccaattaatatacaagtatgtcaaaacatcatctcccacatccttttcataatattttaaaatatatccatccaccatccatttcctctaaaatatttaatatatatttattcatatatttcgtaacaaagcacgagacattattggtatttctagttttaaaacgcgattacggccctgtttgagggagtttaagattttgagaagcagttggttggggtagccagcttctgagaatctgaaaaagctggattttccggcttctaacttctagttcattttcttgattccataactacaatttttcataattcggactaaaagttagactgtctagggaattcctgattcggaaagaagctgctgtagctacaagcttcccaaatacggagtatgtcctatatgttaaacgtgcatggcacccggcacgcgtactagctagtggataaattaaatatggagtaactttaaaagagtgggttggagatagaaagagagattttttagggatcacttggagacagtgtcccttggagatagtgaacagtcatctctatcacattttacgcggttataattagttaatcgcactcttagagcaagtaaatataatatagagtaagttcaaaagagtgggttggagatataaaagagtgaatttattttagggatccatggagtcagtgagtccctcttagacagaacggtcgtcggtcaagtctatcactttttacgcggttataatttagttaatcgctctcttagagatagtactgaaagcaaaagcaagtactgaagtacttgccctaaataccttgtagagtaatactccctccatcctaaaatataaaaatattgattagatatgacatatcctaatactatgaatctagacatgatagtattagaatatgtcacatccaaccaaaatccgttatatttagggacagagtgaatatgctgatatggaaaaaaaaggagaaattggagccacctctcatgtaaggataacttaaactagaaaaaaatacacgt

SEQ ID NO: 8652 - DNA, 21205 bp, Oryza sativa
gaaggaatttaagcacgcatctacagactgcagagtagagatgctaaattatcgaagcgctacagctcttacttctatagcgcatcagtgagcaggattcttggcacaatctctctaaaacccaacctaattcaaacatccaaaaatatatatataacgcacgaagcctcaatgcaaagatatttgccgcccgcatgccaagttcccctacccccgcccgcactaacacatcatcggaaggcagtgcggatctagggtttggtaccggtggcggtggtgctcggcgtcttcggctgggaacaacgggacgccgccgggatgaggcgaagatgccagcggcgcggtggcgtccggaggaggaagagaggatgggggagggaggtcgtgcgtacctggggatggagggagtggggacttggcgaagctgcgaggccgctcgccgccgccgccggggaaccgggggagagaggatgatgctgcggggaggaagaggcgaggcgaggcggccggcggcgaagaagaagtggggtttcgcggcggcgcgacctcgcgacgcgttgtgtcctttaattgctccgcgagaaggagagtgggggaatcgcgagggagcgagaggggtcccgaactcgcgacggtgagatttggactttggagacgaaggcccgattcctttactttttcctttctcggagctttgattgctactactatcctatcttcgttgatttttatcacatgtttagggctcctttaattcagaggaaattcataggaattttagaggattttattcctataggaatttttcctacaaaaccctttgaatcaaaggaataaaccctatgaaatcctatgaaattactatgaaatgcctcttcccatataagttttggaggaattttaacaagaggtagaacctcatggaagaaatcctttgagtctttatctcttctcaaattcctatgtttttcctgtggtccaatcaaacggtcatttctacgtttttcctgtgttttgcaatcctctattttatactttcagggcccctttgattcgtaggaaaagtgtaggaaatttgaaggatttcaatcctatgaaaaaaattcctatgaaagcctttgaaacaaaggattgaatcctatactatcctttaaaattcccatgtaatggctaatcctatagagattttggaggaaagttagcaagaggtccaacctcttagaaaaattcctttgagtctatctctctcatccgattcatgcgtttttcctgtggtccaatcaaacggttattcctgtgttttttctgtattttccaatcctctgttttacacctgcattcctgtcagaatcctacgtttttcctatttctccgttttatcattcctgcgattcaaaggggccctcattcatgtcagaatcctatgtttttcctattcctccgttttttcattcctgtgattcaaaggggcccttaaccattcgtcttattaaaaaaaattacgtaattataatttattttattgtgagttgttttatcgctcaaaatactttaagcatgatttatatctatacatttatataaattttttttgaataaaacgaatagtcaaacatatgttcaaaagtcaacggcgtcatctattaaaaaacggagggagtatattctaatgtaccaaaacagtttattagggagtaaaaattaatttttagataaaatttttatttatttgttcttatcgacttaaaagtcaatgtaaattatagcttttgctttgacttattaggccaaccgatgggactctcgaacaactgtccttttgtttttttttatataggccatcgttttgttctatttcttgtaaaaattgctaaatcttgtttacatttgtgttataacgttaagacagcaattttcagatttgttttgcaacctcattttaagatatagtgatttttatctatatatttggaccgacgggtttactacggtaagatttctttgattccaattacgaagactgcgaaataaccccacctccagattttcagatccaaactggtccatttctctagtttttaccagctcttatttggtaagggataggttgtcatgctgtaacctacggagaagaaaaacatcaatgattaatgagcaaacgagcatgcattggcatgaaacttgaacaaacaagtggcgtttcatctttcaaattataaacctaattcatcatcaatatgcctccatagggcaagaaaaatctacagaatgcggaatccaggactgcgaaagccagttgttccagtagctgaaagtgacctgaagcaatctactatacttccagaaataaataaataaaaacaaggaacagaactagacaagagtgatcttcatcactcttaagtgcaacaaggtaggaactgcacacttgtcagatgcacatgaagagataaaaagcaggcgattacagggacgtttgagaataaatcacagggtaagttgttggtgccagcaaattataagttgctagtaatcatggcaatcatatcagctgaattcacacgaccccaagcaaaagagtacagaacaattctgaattagttacgactttcatgattttcctcgaggtacagagcgcacgccatcttctctgatagtaatctcaaaccacagtagtacagtaatgcatacaccaattttcataggcaaaattttcttcccattagtgggagcaagaggaatacggtacacagtgaaagagaatcctaaacactcgtatgatactacttcagaggatggatgatgctcttgccaacaacatggtatctttcacatagctttttcagggtaccaaccgagtgttgcatcgtgttcagcttgatatccatgaacatggcctgcaaacataatatcttttcagttcacattttcaaaattcaagtatccattgattatgaactccattgagaagtaaaattgaacatagcacccaatgtaatttgaatactttcatataccttgtagtcatcaccatgcttctctattaatctgccaatataaatccgttgaacttttgtcagtggttccaaaggtgcagatttcccatcccgcctctgctttccaagtgcagatttcagatctacagtccaaagaaacttatgcatgagtttacaaagcgttgacgttctgctagtaagatcacaagcatattcttatgcaaaattctgtgtcataactaagtaacaaattaatgaatgataatagcataccttgaccactatgacaagcatgatcacatgaactgctaatcaaagaacatgcaaaactataccaattgaacttctaacatgttctactgccatatatcaacatgcccaaagaaagcataaaagaactataatgtgatcgcacagctggggtgagtatttcagtttaatactgcagatataaattagcaacagaaaagagaaaaagattatttaaaacaatgtctccaataattttcaggtctacatgaaaataaaacaggccactgacacttttgaaatggaaaggtggggaaaaactataatatcgtaacattgaaagaaaatgttaaaagcatctgttttccaatacattgcatgtttacacatataaagcaaattccgcccatgggacttgtattattatcttcagtggcgaccagtgtattattcacattctatttacagagtattatctttggtcaacatatcatcttaaacatttcttaagcaaatgctcataattcataaatacatgatactggcctgcttactctgggtaaacaatcaatagatatatttcagatcgaatgtgcatataatcagaaatcaatatggttcgattccaatcagcatactatggtgcttctttgattttcacaggtatggttttcttgtccacagactactggctgaattcaagatgatcccaacctgacatgacctgtaatttatccaaacattacatacatacactgccaataattttgcataccaattggtctatctctttttgatgctatgtcgatgtttaaagttgatcaagcattgctgtattgaagcatcacatcagccacagtgattatgcttgcccaaagctcagaactaatcagattagtaccaatttcttgccaaaatgctcaaaatcaaggatcccagagcatattagattcaaatgagcatgttttcgtaatggcctcatcatactgcgcgttttagccacttaaaaacaatcgttcaaagttcaaccgaaatcgaatatactccagcatcatatcccacaaaccatacccaaccacaaatatgatttaaacatgaagctatcagctttcacaaggcaggaacgagcgagtggaaaggggaaccgggggaggactgaccgtcggactcgaggtcgctgccggagtcgacgggctcgaactcgtcaacgggggcgcgcgccgcgtcgatgtcgggcgcctggagcggcgcgctctggacgaggcgcggcgtgccgcgggcgtgcgcgccgaggaggttcgggttcgcgacgaccccgaacgcggcgtagttcttcaccacgcttccctccgcgtcccagctcggcgcgtggccgccgccctcggccgcggcggcggcggcgagcgcctcgggcaggtcgaaggccggcttgaactcccgcggcttcttgcgcggcaggcccaccttcacctgggcgcgggagcgcttgagcttgcggcgcgatccccccatgctcctcctcctcctcctcgatagctagctagggtttggacgcgcgagccgagcggctagggttttgggtggagggagacgaaagaggaagaagaagaagaggagatctttaatgggcctccacgagaaaattatgaggcctggaggcccattaggttgtcttaggctttgggttaattggatccttgaaacttgacggggtattttaatttggacatcttttaaaatcatttttttcattcaaaaaagttgaaaggaatttaccattgcaaagacacaacttgtctctatccttcgaaaacgttacctattaagcccccaatgaataagaaaatatcgtgctctttccaaccactcattccgcgtatctcgtgtcccctctctctctctctccctcccgtctctctcccacgtaggtcctcagcagtcaacagcggagatagaggaccggcgtggcggttaacggtggtggaggggaggcagcaccggggaagatggacatagggagtcatctccctagtgtcggtggccctggcaaaaggacggcggagaagcggtgaagaggaggtccatctcctggtcgatggcagagctaatggcgatgcagaggggatggggccggcaggggtcgatgacggccgtggggtgggagggggcgtccttcctatgcagctccccagcaagaacttgcagatatcggcacgagtggaagctgcaggaagacaatgacccttacatagatccgtatgtggcatggctcctattcgtcggcgatgatggggtgacgaaagcttaggcaatagcagctacccgccttgggggagtagaaggcattgcaggatcctggtgtgaaagagaatagacaaattgtaaaactccaattgcacggctacaaatagactaataattgtaatgacatttatctgaataggcacatttgcaatgatacggtgttgcattttgctaataagtatattattccagaggaaacacctgtaatacgatgatgtagtcatgggatgtgcacaactttacataccaggatttaaatcctagtacttacgaatattacaaacatgtaactggacttttaacaagtttttagtgaggtccgggaaaagcctctgattttcgtctctttgagcgtatattaggagactcgtttgcatgtgtgtctacggtgtaagcgaaaaaaaatattataccaaaataatatggagttattttaagaccaaatcaaaacagtggctttgtgagcgcacagacttgtgtgcctataaattttctcaaggaaaaaacagcactaacttttgaaagcacaaataacttataccaaactagccaagcgcccgtaagttgcaacggaacagaactgctacgaatgcataaagacaaaattctccaaatttgcttataatcacattccatgacttcatctaaacaaacttgatcgaagctacgctttggcagttggcacacgtctttctcaccactcccatccaccaaatatgcttatatgcccgtcagctctagctctgcaccctgtttatgctccattgtgccttgtcctattctgtttttgcaactggtcatcataaaggcaacaaaaaaaagtcatggaaaatattagagttataaaatgtggaaattgctcaaatttattatttgatatttgggatgctttgaaagtgaggtgcaaaattatttgtgagggagaaagactaaggaaaatctccataggattttattcctacaaaattcctccattttaagtttattccaaatgagcccttaacaaaaggaaccgactataaagcttataattttagggcaataaaattataatactacctgcactttaatcttagaagggagaagacaccattaccacaactagaaaggtagcccgcgcattcgcacaggcatgcgtcatacgttaagtttgagacacttataagagcgaaatattaaacggagaatatctgtcacgatttctccataaattattttcgtcggcattaattgcttttataattttctaacctattagctttatattatatcatatttaagtaatatctataagcaattatatataatctactttatcatttgaaaagaaggtagacttattttctttagaaaacatgtcaacgaaagtaaaagtaagtgtaaagcaaaagtaaggcgtttttcgttttttagttgcatatatattatcatatttgacctacttttttctttctgtgtagaatgtctgatttagttatgaatgtttgcaaaacaatatatgatggtgcaatgtatgttgttgaattatttttatagtttcttatggtaatgtgaatgacatgtaaaatggaagggatggtgtccatcggtaaaaacataaacatgaatttatcatttttgtttggatactattgatttaatttagttatacatatttctatattgatgtataatgacgaaatatacgttgatattatcttaagtatttcatggctatttggttgacgtgcaaagtacacggtcgagtatgcccagatgccatatatttatatagtaaaatgttagcatatagatcttcagttgttcgtttaattagaaataaagtaataatcagattagaaattatacgtgtagcttaaaatcatagtccttttaatatctacaattattgattgtttttatttttagtttaatagctgaaaataaaaaaagaagacttgagaggaatgaaaagcatagagctttaagacagagatgggaggaggtgggcagtgtcgtagtgttgtgtgaatgtgatgtgggtctgaggtggaggggacattatttttctaatctttctgaatgatccaagtgaaaaaaatatttttttctcatatttctaagtttttctttgatatttatgacatgtcatgttgcggcttatattttctcaaagagaaagaagatctaatgtttaaaaataattggtcatcgatttatattgaaactaatggatagatgttttttctttgaatttctatttttttccaacttttaaaatgtgacacgtgatgacttacaaaacgctatagaggaagtttaattgatctttatattgtaaaacgatctagatgacatagtatatattgacttttttaattgagtgtggctatgtaagtacattacgtgcttactccaggataagaggtggggttttacatgaggatgatgtgtgtctaattaatctaatataacggtttataaggttggactcaccgatttaattgaaaatcgagggatggatgttttgctttttctcaaattttgtacaattttctttagtttattagatctaatccaatggtgtaaaataacgggttcaccaatttaagtgaaaatcgacgatgagattaaatattgccacatggtggtctaggagcgtttgtatgagtgccacgtggcggcttaagagcgtttctaggaagtttaatggacttttaatatataatataatagaaagaatagaatagatagatagataatcaatcacattgcgagctttccattgaactacaagtctaaaattatcttgacaacacaggaatatatagcttcttcactcttcagtccttccactgtctatgaaaatttccaaccaaaggccgagacgtttgatcaaaatcttcacttttccatgtgccgcagaaccagaacagagaagcaagaagggcttaactctaaagatgacaaattattgctacacagaaaacaaatggattctaagtagtatagtagtacatatttgcacacaatagctaaaattcatatccgcattgtcatcaacagcataaaaaaatgtcaactactggagagaaaaccagagtaaaactaaataattcattacagaagacaagcaaagtgtgtataaatatagcatcagttacgcaaaccatttgatacaccatggtcctgaataaagtgaagatgtgagcaagcatcagttcatctgctggtaagagaagtagagaactcatacatgtatgcacgttgaaccatcactctatttaaaaaccaatcaggaaagtactggtgaattgtgaagtcagcattaaaaattaacacatcatgctgtcaatgggtaccgtcgaagaacgagcagaaactaaaaggctaaatatgaacatagggatactgaaaaaactgtttcactaaaaggataacatacttgccattggttcatcatacactcggtatcataacttcaatttgactaccaacatgcttgtagggcttactgaagtcatcttaaagtaatatcagcagtattttgttccaaaattatggtaaacaatgtgaaatagaagataatttgactaccaaggcggcaacaatatgcacttttgtgatacacaaatactaatatacgcctcaaagccacctgtgtagtagacttcttctgtatcactctttcagctcacctaagaagcagaaagacaaaaacacaaaactgagtaatggtcgaggagttgccacgaaattagtgcaattgaaaatcaaaagaagaacagcagctctgagcatttcatagaatcgagatgtaatatgtaaacaagttagaggttgcattacttcatagataggataagtcaaggtgacggaaccagagtaccagactgccagagctctgtacatactatactggcagtcagtgagctgagctacaccctacaacagatactatcagcccatctcatctcagagtactactagagatgagatcaaaagaaactaccctaacttaatgcggttcaggcattgttcctttgttactgtctgctggttttcctggctctttggtagctccagaatctctccatccactgccttcaaccatcttggccaaccgctgctccatggagtcgacaacttgagagatcagggagtggaactcaggcccctgcgagcggacaaactgacgggtatccatacccgacggctcgcgcaggccctcaatgcccctttctcgacacagcaatgccgcaatcccaaccgtcaggctgctcctggctagactcaagctatggctgtgagacacagggccgaggagagacacgagggctgtcatctgcttaatgctcttctccagagagtcagccgcattgggtggggggtccagtattgtgcccagcctagcgaatgaagctcccatgcgcatggcaaggctgttcatggcagtaatggcggtcgctcggtctgattgtgcctctagcatggcagcctgggtctctttcaacattgcattggtcacctcaagctcatcctcagtgctacacagcttcttggacagctcctccacctgctgctcaagccctgagatttgggtcaccaaagcagcagtttgtccacgtatttgtagagggacttcatcatggaggccggcagctatagaggtggcctgcacaagaaggataattgcatgtgacttgcttcctaggataggcaagccagaaggattcttaggaagatcacctgaacaaggaatgaggtgattttagacaaacgactctgcaggactcctggctctgagacaccttccattagctctttgactttctcattgacaaaagttctcgcaagttgtattgcatccttgtcttgaacaaggggaattgactggagaggcttgccagggccttcactatccacagtgatcacttcattatccctcaaatcttcaacaggcaggtcctgtacatcagctactgccatcttcaccacagaatctccctcataaaaaggagaattttcaaaactcagcaaggaaactaaatatgattaacacaaaagcaacagaaccggcaaacctaaacataccagtcttagatagaaccacacccggagagtactcccctttcccataatcatcctgctgaagcgtagctttcgtgctgtcaggggtcaagcagccaagaccatctgaatctgcaggctccacatatcatgaaggtcatttcacaaaaaaagaatgcccatctgacaaagatacagcttttcaactcaacaagtgacaaaggcatattttgacctgagctggtaacagcaaggttaatccccatccaacaaagatgcaacttttcaacttagcaagtgacacaacacaaaagcatatttgaacccgagcttctaacagcaagattaatcgatccgcctcatttattatcctctcatttcactcaaattttgaagaaaaatgatatcagcacaggaaaatgctataaatgttagttacccgattgatagcaataaaaaataatgagctactggaacaaataatctgtatgtgcattgtagattgaggttgaagcaaaaggtcaccactactatagtttaggtttccaagcaagggctctgtacagtaatctgcatacatctctaggcatttcgagcaatttctcagtactgatctcagtagctcagggtccttaccatcagagtcaaggtcgctgccagggccacagccgcatgaaccatggaggccaggattaccagacacgaaaagaggagttccctgcggcacatctcacattttcacacctcagctcagaggtgggggcgggggcaagtggaagcaccagacggtcagagtcctttggagttttgggcagcagccccacatccaacttgttgtgcgagcactcgtgcttgtgccccagctgccctattcgcactaggttttgggggcagggagacgacgagaaggacatttctttgctttagtaaatttcactttgagccacctttactgacttgtgaaactttggttaataaaggtgagcaatgtgaaatttactgtcttttttttttgcctgatagaattggttctaaacttacagtgttaaatggaccatggacctgactagaagtaaaaactagcttttctagtggttgaaaatattggtagtagttgaaacatactacctccgttttttttaatagatgacgccgctgattttaaggcacatgtttgaccattcatcttattcaaaaaatttacgtaattactacctctgatttttaatagatgagttgactttttatcacacgtttgaccattcgttttattaaaaaaaagtacgtaattactacctccgtttttactagatgacaacgttgactttttatcatacgtttgacaaacttttgaataagacgaatggtcaaacatgtgttcaaaaatcaacaacgtcatctattaaaaaaggatagaatataatttattttgttgtgagttgttttatcacgcaaagtactttaagcatgatttatatcttataaatttgcaaaaaacttttgaataggacgaatggtcaaatgtgtgttaaaaaacaacgtcatctattaaaaaaggatggaatataatttattttgttgtgagttgttttatcattaaaagtactttaagcatgatctatatgttatgcatttgcaaataattttttaataagatgactgattgtgtccgaaatcaatggcgtcatctattaaaaactggagggggtataatgtactagctctcttttttcctaatctttctttttttttgcaaagtttttttttctaatctgaaatctccttttcttgctgtctatccagattaaccacgtcataccaataacaccacagtatcaaaagcgttgccgctcgatctttatacagcaaccatacattaaaaaaaaaagtgaggaatcggcatacatcgaagcaaaggggggagacggcgtgaggggcctataaccttccgtctcgaggtcgctgccgggggcgacggggccgcgatcgctcgaagccgaggatttcctcgccgcgggtctcaccacgtcacgccttggcttggcggtcgtcgtggcggcggcgagcggtgccaatggccgctcggtgctcctcggcttcttcggcggcggcgcgtccaccttgccgtgcgagccctcgtgcttgcgcacctgccgccccattcgcgctctagggttttgtggcggggggaaaggccgaggaggactggaggaggacactactccatttttgtgttcttttaacttttttttcgagtttggggagactttggagacgaggacgagccggcctgtcggggaaatcgaggcaagccgccgggcccacctgtaagtgataggaggctcgctaaggccatcagcaatgggtaaccccaggtcttgccactagcgacggccgttcgcttttccgtccgccctgttcccccgtgatggagcgcgtccctctgctgggggtgctagggggcgcggctctctacacgtctcgccggtttttcgtggggagtcgtaggcaggcgacacgttgggggcttggggcgctcgtggacacgactaccgcacctgcgatttcccattctaccctcgatctcgttgctaggaggagggcgacggcggtggggaggaacccgaggcggcggcgcgagagagagacgccgacaagagagacaggaggcgtcaccagagctgcgagaagggaggcggcgtcaagagagagaggagagagaggcgatggcgacgacaaccggatctggcggagaagcaaccgcaccgcaccgccgccgccatcgccactgcttgaggcgcccgtgctcgccaccgaggagcacgcggacaacttcgtggtggtggtcgctgccgtcggccaccgggcagagacgggcagcggcgagcgtccgtcgcgaccttctccacctctatcttggactcctccgcacggagagagaggcgagcagcggcaggagagagaggagaaagtggcggcggcggcggctgggaagggcgaggagggaggtggcactggtgctcgcgagatagagagggagagggagggggaggacgacgacggcgccgagcggagggagtgaaacccggcgaagaaaaaagaagaggaggggaaagaggcggagaaaaaagaggagagggaaagagagatagggagaagagaggggtagtataggaaaacacacactgtgggttttttggttgagacacccattgtgggcttgagtactttcatccagttgcctcatggggagcccatctagggtgtcctccattgcgaagggagtttcccagagagtaccctcagtagagtgtccctgattgtagatgtcctaaccgatgctgacacatcctatactatgaatgtagactgaggccttgtttagttcgcgaaaagaaaatttttgggtgtcacatagggtgtttgaccagatgtcggaatgtgtttttggacaggaatgacaaaactaatttcataactcgccaagaaacgtgagatgaatttattaagcttaattaatccatcattaacacatgtgggttactgtagcactttatggctaatcatggactaattagactcaaaagattcgtctcgtgattttcatgcaaactgttgaattagttttttattttatctatatttaatgcttcatgcatgtaactaaagatttgatgtgacgtatttgggaaaaaaaattgagaactaaacaaggcctgagtacaaatatccaaattattagtactaggatgtgtcctatccacccaatcaacccaaaatcccttatattttgggacggagggtgcatactttaggcctggtttagttccccaaaattttttcccaaaaacatcatatcgaatcgttggacacaggcatggagcattaaatatagattaaaaaaacaaattgcatagttagggggaaatagcgagacgaatcttttgagcctaattagttcatgattagccataagtgctacattaacccacatgtgctaatgatggattaattaagctcaaaagattcgtctcgcggtttccaagcgagttatgaaattagtctttttattcgtgtccgaaaaccccttccaacatccgatcaaatatactatataacataccaaaaattttcttttcgcgaactaaacaggctcttagtattgatggtgtccattcccacatcactcactgacatgtcacatgtgggccgcataacctgtgctagtattacatcatctttcaatgaatcatctcactgtttcaccattggttctccccaaattttaaaatcaactacttgttcaataaataaaataatagtattatttcaactaaataagtgtttattaattgatttaataagataaaaacttaatttgttttctgttgcaactcatgggcactaggctagttaaaacaaagcacgtgatagtgtgtcgtttcgtattggtagattagtaaaaaagattataagtctacagtcttgaaaaaccataccaaagaaaatgaaaaaaaaacagccacatcatacgtctatgaccaaatcccgcatttcaagattaagtcatgtttgtttcagcttaatattattgtaatctagattattaaatcagattactctaagctggattataataagctgacataaaataagctatgagttgtttatttctctggattattagaggcatccaaatgtagtgggtctttagccactcaataatctggaaaaagctcctctagaggagattattggattatagtaatctggcttatagattataataatctatttgtttgtttcagcttactcctaataatccagattataataatcctaagctgaatcaaacagcgcctaaattagatcgcatccctaagggatgagagtgtctctgcacacccgccctaacgtgctaggatgtaattttcatctaaagatacctatcggagagaacaaaaaagttcacgcaacaatgccctaagaggaaagtaggggtcgtaggcatcgccgttgccaaccgcccaacccaaagggctaggctttcacctataatctttttgccatcccgtatcaaggtcacctactagaaacagtggccaccaccgacagtataccttcaatgcgctttcaccactccagtgtctcgccgtcgaccggcccaagcaagagctcaacatttggtgcgctccaaattcatccacacagttgggttgcagaggaagagaatgagagagaaggatagaacctctcgcttgcactagcccacaaacttggctatcttgtgccggcaaggtgccgctgcaagaggactaatgactagatcggaggccgccgcaggcaaccgatgctgcttctgtatgttttctttagctgcaaaagtacgtattctatcaaaggaagcgtaaagtgcaagctgaaactaatgcacacttccgaagcccataaacggattatcacaaaataaaataatccattcagctgaaaagaagtaggcgattgaatcgacgtcacaaaaagacaaattaaactataacaaaaaaataatcttgctggaataagtgaatgttcctactaactgaaatccatgttatagcagaacaaccataactgatactaaccattaacagggccaatctttacttcgtctcactcttaccatgcgttgccagtgtagaatttcctgagtacaaaaccacaaatgaacgaaaatttgaacttgtgttgtcagtgtagaatttcctgaatacaaaaccacaaataagcgaaaatatggagtttgcttaacaaatacaactggttctttacattacaggtaatttggtgacatgtttacaaaaaaaaaaaattgtgcaattacagtgcaaggtatatatttagagacgtgccaagtcctctaagttacatattaacatttcaccaggtttagccacatcagatgccatgtatgttttcactcttctactaagggtagaactcaacgacgtaaaatagatgagacaaaattggaactatgatacaattgtgttacgtatttcaagagtggtgccggagcgatattgtccaaatcaggtcagaatctgaagtgatcgtaacaacagtactctcctctctcacaatgtttgatgtgctaataagtccaccaaagctcatgctggtattatctggagatgaaatttacagatttttaggcaccaattatttgtcgatgtcgaattgatgaagtgggaggcttacctaaattccattgaagcccagtggttgtggtggtggccgaaggcgcgccgatgggaatcaatccacagtggggcccctcaatagaccgttcaatatggatgttatgagtgtgtgttcttggcagcagaaagatcaagcaatcatccgataggagtatgatcctgttgtttgggaagagatgaagtacgttgatgtttcccatctcgtggtcaaaccttcccccaagggccccaagagcaaagatacacagctgcagttaaaagacaaatatggcagtaaattttgtgaagatggtgggtaatgacaccacgttatcgagcttaagaagtttacattagatttgttggggatggccgaattctcagtgataaaagctacacatttgtgtaaatcggtggtgtcctgatcatgtgactcatcgactatttgagtaccctgcaattttcacaagaaaaacaattgtttcatcagataagcatgagaaaggaatatttttgtttgaagtcctataccaagatacttcatgccatctgatgaccgaagcatgaaacatatcaatatgaatatttgcaaaaatagatactaccgtggcaatgtgagctatatcctatagaagataccagcagctgtctatattagacataagaatgaaactaaatgttcttaagtaatctaagacaactcttaacactgttcttttgttcctaccagaaaaactattctgagacagagaatataccagcttgaatgctcatacggcatgtaattactttatcactttctgtaaaaacgcaaaatgccatgatgtgcccattaaaaataatctggaatatgacttccatttagttcagttgtgtcagtcattggttttaaataagctgtcatagtcatttggtttttctttctcattgctacaatagatactctgtttgttaggcttctgactgggcaatactaaccattctagtgcacgccatggtttgaaactgtcttattttgttctgattaaaaacaaaacatgtgccaagaagaagcagtagcaccatagtagtgaggctcatgaaattccaagagaacataaaaattaactagcaagaatagttgaaaataatattactagataatatggctgaaataatcatactgttttgactaacgaaaactggatggaacatattaaagaagtttatgaattagagtaatatcctgttattgctggttatacttgagtccatatcccaaactagttacatctggttttaattaaccgtgactaaatggaaaatattgaattactttaccatattggaataatattccttcacttctggtcgaactgagtccagatctcctttgattacatctggtttgtatctgcaccaaaacacttgtgaattttacatgagaaatctttttgtaaaaaaaggcaaacccaaaatacttcgatatttgtttccgattatcagccattaagatcatctgaaatatgtgaccatctctcaaactctgattccgcataagcaatttggaacataagacggattcttgttcaacctttgtctgtgcggatataataaacttgagaaaattcgatccatagcacaagaaagaaagcggtaccaaaaaatagcacaaaaagtttccacttttgatccatagcataggtcaccgatttttcttcgccccgtagcacttccgtcacattttgaagtaacggcgttagatcggagtggagaaaattttcgtcggactcatttgcccttcgttccccatcaggtctcctctttcgctccctcatggacggcggcgcggcagccatcgggcgaccgcctcgtctccccgccgccgctgagcgagctgctgcgcatgctcttcaacggcgtggacgcgtagctcgccgtcaccgctgacggagaggtggacaccgacagctgcgccacaccagccgagcctcgcgggcccctcgaacagccgcctcagcgccgccgtctgcagcatgcccagctctgccatgcacgtgcggatgtggtcgtcgctgccgtagagcgccgggtactggtcgatttcacccgtcctgccgtagaactcgtacaccggcttgtccagccacaggaacccgcgcatcagcgccggccaccaccatgttctgatgtactccctccggctcttccagagctccgacgaggcaccaatgccgaacacaatatggcccagcccgatcgacgcggcatcatcagctggcatcggtttcagccgtgccaccggcagcgacgaggcgttgcgcctgttgccagcatggccggcggccgtgagatgtgcaacggcaccactgccaaggctctcctccaggcatgagctacccgagtagaaaggggacacggcgagggcaacgacgtacagggcgagcaccaggaggagcaagtagaggaggctgcagaggaagaaggaagccttgcacttgggcgccatgctaggggcaaattagtattttgaactccttagtcacggctaaacactccatcacaactccaaacctgacggaagtgctacggggcaaagaaaaaccggtggcctgtgctatagatcgaaagtgaaaattttttgtgctattttttggtaccgttgtttttcctgtgctatgattcgaattttctcaataaacttggtataaaagcttctcatagctcaaggatattcatacataatatgacaataaataataaatagggtaatgcatcaaccactagttctgaaaccactgcacctcaaccagtaagtggaagttctaacatactagaataaccacttgccggtaacagttgtattaggaaaaaaggcctttggtgtacccaatagccattaagatgggattaggctacctataaccccccaatctcagcaccagcataagcagtttaccgaataggccatccgatgggagccacaattagaaaggcagcttgatcctacgactgaattctcatttcttaagagcatattatctcaactagtgctacacctttatccacacgaatatactaccatatacctatactcgtgtcaagctctagcatgagggaagcacaaagaaggcattccatcgagcacatagtgggcatgcgaagcgcagcagggagcaaccaattaatgaattaaacagaggcatacatccaccgcccacaggaactgcatcgcaaagtcccccaagaagacaaaaactaaattatccgtcatgccatgtgcatagtaaccccctgcgcatctcccatctccaagaatccaactcctgaacttttgaccacgaatactggcgcctcaatgacatgaagaggctgttcgaatcgtagttaaaataaaataaaccttacaaaattttaacaagttagcaatattatcaaaattttggcagaatttcttatgtatttatcaaaatttgtaacaaactaaatgtaggtttttttatacaactttgctaaaaaataatataaagtagtacgattgaaaatggcatcaatctaataagccccgaacaagatggagaggatcatcggttgctgaaccgagactccattttggcgccgggggggggtcgcacagataggcaagaagctaaaattactgcagtagagttacttgcgtgccatctcgaccaatccaaaacgcctcgctgcacggccgccgccgtcgaggagcacgaacacgaacacgaggaaaaaaaacactggaacacgcgcgcgcgggcgcgccgcgcacgatccatccaagaaaccgaagcggggcgggaaatccccccccccccccccccaaaaaaaatccgggatcagatcgcgttacctgcggcgaacctcgtcggggtcctgtccaggaaacagctccggcatgccgtcgaacacccggttggcgccgccgtccgcgcacacccgcacctgcgctgcagagagagagagagagaacgagaacggaggcaggcgcccacgtcagtcagtcagcatcgagaagaagagaacagaagagagaagagccacgcgcgaagcccggcgagcgagggcattctactaccgcggtcccagaggcggggcgcgaagcggggcaggcgctggttgagcacgaggagcgagtaggcggcgcagtcggcgtcggcgcccgccgccgccgcggacggcgagggcagcaggaaggcggaggagtggacatggccggcctcggggccatggcggcggcggcggcggcgcggcgacggcgagggctggaagtgggtggcttcgcgccgatcggggtcggggagggtgccacttgcgagtcgtgggctcgtcgcggtcgtgcgagctggcgtgttgaatgggcagcgcgtgtttgaaaatttgggg

SEQ ID NO: 8653 - DNA, 36728 bp, Oryza sativa
  unsure (1)..(36728): unsure at all n locations
cacacccgcacctgcgttgcagagagagagagagagaacgagaacggaggcaggcgcccacgtcagtcagtcagcatcgagaagaagagaacagaagagagaagagccacgcgcgaagcccggcgagcgagggcattctactaccgcggtcccagaggcggggcgcgaagcggggcaggcgctggttgaggacgaggagcgcgtaggcggcgccgtcggcgtcggcgcccgccgccgccgcggacggcgagggcagcaggaaggcggaggagtgggacatggccggcctcggggccatggcggcggcggcggcggcgcggcgacggcgagggctggaagtgggtggcttcgcgccgatcggggtcggggagggtgcgacttgcgagtcgtgggctcgtcgcggtcgtgcgagctggcgtgttgaatgggcagcgcgtgtttgaaaatttgggtttttggtcagaggtgatgggatgatgggattgtcgtaccgctaccggagacttccggagtccccacttgtagtacccactggtgtgtggggtccactgcatttaacatgtgcaggtcagctgcagattgtcacgtgtgtctcatttaatgtaatggaaaaattgcaaatccaccttataagtctctcatattacattccataattcatcttgttgtaagggcctgtttagaaggaggcctctcgtagctttttccagttccggccatccatccccgccggaggtgaggttgagggcggccatgcatattctgaaagcattgtcgctgctggatcagtgaagtggtacggggagtcggtgaaggggtcgaactcgtcgacggaggcgtgtgaatcggactacgacatgaagtccctcatgccggcaccggcgccgtatctgtccccgtccatctccgccgatgcgggcatgagcggctgcggcggtcgatatcggcgaaggtggaggcagaagagggcatgagcggcggtgtcgaggatgaggtggatatgagcggcggaggaggcgggcgttagtggctacggcgggcgagattagaggcacgggtgagctaggttggaatggggaatggaacgagcgggtgaggaatggagagagaaaggggttgggtggggaatggtcggatggagagagagagagcgagcgtgggcatcataggtagtgcgcgtaccgcacagctcccaatgatttttccaaaatttgctgctctagagtcccaaatgatagatgtcaaattgctaacttttgctactaatgtttagatccattttgacaaaaaaaatgctccaaaacaataaaacttttgccattttagaggaactaaacatggcctaaatactcacccacctatttagttttttttttctaaaaaataccaccacattgtgcccgcacttaacctaatcaatatgtttttttttataaaatgtgagccatcaatgtggttttcaccaaaattaaatacttccggagtatagtcttgaagctttgttgaggattctacaaatagaattgttggtgagagcttaaacattatcgcactgagttttactatatgcaaaagaaaaaattcaagcaaacatgaaaagtattttgcaagtacttagacaagattgactcagctaacttaacatgcggtgactctacatcagtgataacgtgctgattcggttaagcacatacgaagtggggtggtttttcaataaaactaagtatggtaggatatttggaacaaaataacttatggattggaatgtcgaaattcaaacgacttatgtgaaggttttgcaattttccctttaattttggaaaatggaaatttacagggaaaaaaaaccacaagtcaatagaagttttaaattttatcccataagtcattttgttgtaaatgctcacctctatttattcatgttgcaaaaaccatccagtctgcacgtgcttaacaaaattaatatattttcataaatcgtgaaccatcaatttggtatttaccaaaattaaatacttctagagtatagttttgagaactttgttttaggttccagaaataaaattgcttatgagagcttaaacgttgttgcactgatatgcacaaataaattcaatgaaacatgaagaataattttaatgcaaacacttcgacgagattgactcagctaggttagcctgtgatggctctacatcagtgataagggaatgatttggttaatcacgtggatcctgggacacttttcacatacttgcaacaaattaaataacttatgagatgaatgtcaaacttcaaatgacttatgatgtggttttacatttatcccttaccaaaatttagacacagtttggttttgattactgaatggattattatcgcatattatttacttattttactaagactgagtttaaaagtgagtttatatatacatttctcaacagctaaacgatacaaattttacaaatagtttttgtataagtttctttaagaaaattaaacaaactcatttccgaagtttgtccctagtacttaactaattatgagcaatgactcaattgttttgtgtggaactgaaatctacgccacacttcaacttcaaacttacataagtaatcatgtatatgtaatgtacttttttaacattacatatggatcatcttaacattttgcagcagaaattgtgtatgcaaggcggttccttttcatccaataataaaataaagaaattcaagctttatttttatttccagtaagactaaaattggagaaaaaaagacaacatattatggcgtacgaccagagtacaataatgcacatggaataattccaggtacaaccaaagcaaaccagtacacacggaattatgatgaagcaaagaaataaagaagaaatatacaagcttatagttgagtcaaatatataatcataaatatgcaattcttccatatagttccaaccagaagtacattgttatatgtgtcccttaatccccttttatgactttttcctatagaatccacaatgatgtatgacattaatgcgatatatatgtctaaagaaggggggccttttaagatcatgtgccactaaacatggatacaccctcaagcacataaggaacccagcatgcatatggataggactaccaagttcgaaccggagatgaccaagactgctcagatgtttcctaccatgatatccagacataagcctacatcagcctcatcaagttgatatcttgagtaaccccacaatcctccatggaccgcatcacaaaattcccatctctcctgattaggtgaatatgcaatattagagttccattcacatacttgtactcggtgtgatctccaaggcaatacctacaaggagtcaacggtattatgatgggtttagcggtgttggacttgaagttgtaataaatgaaggataaagttagagtcgaactttgtcatacgctttatcttaaatagagaggggggcaccacattgtacaatggtgactgcaatgtagcgtagacaagcaaggaaatgatggtggcgaggccatgaactcgtagcggctaggtgatatattgattagggagaagtgcccatgaaaagagtctcaaagatgtaggtttcgactgaacttcgttaacaaatattgtgtgttcctgtgtcgtcatctggcgtatcttgggtgatcaataaccgaggagatcgagaaggttagtcactatttcgctatatcgactaacttttataataagtggtattagagccgaaagtttcagaattgtggaagaggaaacacgaggtgagatcatgcattgataagagatcatcaaccgtggcgatgagatcgattgcgacaacgagaacgttgtggaggcaacgacctcccttgcgattagaccggcgatggtggaacgtggccgaaagatggggtcgggtgtggctaaaagcaaccagagagatcggatgggtagcgccatggacgacgtgcccaacacacacggtggtcgtagatccgtagcagcagggaggctatagcagaagggcgaagccggcgagcgtggtgaggcacagtggacttgcagggcctgaggacgacgtgatcgtggatggtgaacacaagcgttatgactgcagtgagtgcggaaacacaaacaacacatatggagaatgtgctatacacacgcaggatgagcaaggcacaaaatggcagttgacaacaaacaacgtcgtgtagcacaagcagaaggcagaccatatgagatcgaaatcggggcaatgttggactcatgagcatgaacgcaagtccgaggtggacttgtccatgcagtggccgggctcgagttggaagttgttttcagactcacaaggcaacaactattctgaaggatgagcaaagagtgcacgagaatggtctagacttgttgacgcaagggtcaaggaggatgtggatgcgtttgagagcatcacaaagagaagaaaataatctcttttttttcaggtatattttccaaactgttaaacagaaggagcattaactgcatgcacatgtgcaagtgcatggtgttgtgtagtggtgcatgcatatgaggcttggcaaaactacgacgttggttcacgagtaggactagcacagctagttgagttggattaaagtcaatatgagcagtggactaataagtatttggtggcatggacttgggtgcacttggcgactcgatcgtgtggaagatgcagcatggtaaaggagaggttccgcgaattgagccgtcttgcagcgtagaggcagatggtggcatatggtgtaggcaaggcagttgcttgaattggactcagggcatagccaggatgcataggtactcggacatggctaggtggatactcgatcggttgatagcttgatggaaatgatatatgcctaaacattgaaatcattcgttgtttgttattacagtgtacactactacagaatggcatattggtgtcggttgggaaccggtcttagctgccggatttcccaaccggcaccctataggcggcatagatgtgggggaatcaaaggggcacctttgaggttccaggattggaaaaaaggtcggctcgaatgcatcgagccgattcgagccgacactgattccatcaagaacacacatgaacaaaactttcaaccaagaacacacacgaacacacatgaacctccgctacctccatgccatgcaccgcgcgcgcgcgcgcgcacacacacagagagagatagatagatagagagaaagaggtggcgccgtcgccccttcaatctccgccgggcaacagctgcctccatgtcgccagatctagcggaggcgaggcccggccggccgcctccacgccgtccgggccgccgccccctcccgcccccgctgagccgtagccgcctccacgctgctagatctggcagaggcgaggtccggcccgccgcctccatgtcgtccgccgccgctggacctcctctctcgtccgaactggcggaggggaggttcgggccaccgcctccacaccgtccgccgccgccgccaccgcacctcccctcccaccaccaccggagagagagagagaggagaggagaagccaatagaaggggagaagtggatagagagagagaggagaggagaagccaagagaagagaggaggggagaagccgagctcggccttatctcctgcaggtgtgggtgtgggccccaccgggaggaaaaatatctcccttggctggctcggctcgattttatcggtggcacctataatatatggtaggtgccgttttttttaaaaacgacacctataatatattataggtgtcatttttttttaaaaaaaagcgtcacctattatagatgccggtttttctctaaaaccgacacctatctccgtttaaaggtgtcggttttaatttttttttttcatcttatgaaggtgggaaaagcactataggtgtcggttttaccacttccggcacatatagtgccgacatctatttgatgttttgtagtagtgatgtattagtgatttcctttcgtagatttctaaaatcgagatctttgatatcaccaaacaaattctttttatttggttttcatctggaattcttgtttactcccttcttttttaattataattcaagccttttttactcaaggattaagaatggtgtgaaactaagagaaaaggaaagaaaaatgaccatggcatcgctatatatttaaataaatcatttctaaatatagctaagagattatgctccacattaaagtagatcagcataagttctaaatatagctactacatttatcccaaaatttagtaatatttagttatatatctagtcatagctatgtatttggacttatgtatgtctagatacataccctaaagttattatagttcaggacagagagagtaagagattatgctccacattaaagtatatcacattttccgaaagaccaggaaacaagggcagctaagataagaaggtaataagaatagcttatctagacagtatatgtagtaaaagcatacattgatgtattgcctaaacatattttgaggatacaaatcaatgcaaaagattaggatatcataacaatcctttgagatctctatatatatcagtttgcgtgagcacttcttgcttacaacgaaacataggaagatacatacaaagtagaagaaaaatggcatcgatgtcctacttcatcgttgctatgctcatatccaattgcttgggtttcattgcaacaccaattgctcaagttgtaggtagcagttcctcctcgggtgttggtggtcgaaaagttttatctgcgggaggtttgcaccaaatctaccaccatggaggtactgttccaggttcgagtgaccccctaggtcctccaagtgatgagatatatcatcatggtggtaccgtcccaggtccgagtgaccccttaggtcctccgagtgatgagatatatcgccatggtggtggccaccatactaccccgggcccgagtgaccccataggtcatcctccgagtgatgagatatatggtcatggtggtggccaccacactgcaccgggcccgagtgaccccatagatcctcctccaagtgatgagatatataaccgtggtggtcatcacactgctccgggcccgagtgaccccatagatcccataggccctcctccaagtgatgagatatataaccatggtggtcatcacactgctccgggcccgagtaaccccatagatcccataggccctcctccaagtgatgagatatataaccgtggtggtcatcacactgctccgggcccaagtaaccccatagatcccataggccctcctccaagtgatgagatatataaccgtggtggtcatcacactactccgggcccgagtgaccccatagatcctataggccctcctccaaatgatgagatatataaccgtggtggtcatcacactgctccgggcccgagtaaccccatagatcccataggccctcctccaagtgatatataaccgtggtggtcatcatactgctccaggcccaagtgaccccataggtcctcctccaagtggtgtaatatcatagtacctgattagacattcctcatatattagagatgtacaacactgtttttcagattcggactattgtaaccgtgcatctccaactcatgccgaaataataaagcatatcttcgttttcaattttctcttgatgttctactgtttcctccctataagagtgactacttgtatattctacttggttcctgctttatacacatgatatatattttcttcttcgatgtattatctattgtatttcagatatgctaatatcaaagtgaaagcattaatatattatttttatttatattttagcataaagccaatatcagtgtcaacacaacagctgacttcattcgcatagtatttcttatgatattagttggggtaacacctttatgatcaaattgtcttgtactcacggtgcaaacgaatcttttttgataatggaataaatatcgaaattgctaaacttcagtcgacagaaaacctacctccaaatcttgcaaattttggttcactggatgtgcttcgcgattcgtgcttcagctgcttcttctctaactccgatgaactcctcttctccgacaccggcgacaacccgaactccggcgaagggccgaagaattagggtcccggagtggggtggggtgggaagggtgggagggggagaggaataaaaggggagtgcgtcgggcttagagggatggctgggggaggcggcagcccggtggtgggcggcggcgaggcgccggcggcggcgccggagtcgcggggttgaaggacggtggtgggccggcgttggtggcgggggcatctccccatcgacggctcgaggaggaaggaggggggagggggaggaggctagcagctaggggggcctcgccgacgctgttgacgccctccggccagccggcgaggcgggtggcggcaggggatcgggcggtggcgacgtgcgagggtagcggcggcggcggaatgcgcaaagaggtggggaatgggagaaaaaaagttagggttaaagctgtgtacgaatcctaaaacatatctaacggtccaaaatttaaaagatgagaggtgggattgtctgtcatgtatagacagtcccaataaatattccagtatctcgggactagattggtggtctggagattttcatagaaaaatacctggcactgagatcgtagcagggtagtattgtttctcgagctccagcagtaggttgttttttcttttcatatgtacaatatgctctgtagcaggctattatttatttttccaacattaatcggtgttatttgtcctaaatctctcccactagtttaattttgtttcgcaagaattcgcaacatccgttgtgaaaatatcaaaagaacgaggctttgcccatggataagattatatcagatttttcctcccaaagacatctgttcacaatcaagttctgcttatctctgtatttctcccgattaaccaagtcatgttctatatgtgctctggaggccggagctattgttaaaatgattctcgactccctcgctttatggattgtctatttcagtcagtccttaaataaaattcagttcacatgttcaatccgtcttgaatatattgtgttagcatgccgaaatgtagatgatgattttcgctaagagacttctggatgggagcaaatccctcacgcatggaaaacagggcgatctattaacacgtaattaagtaagtatgagcaaattattttttaaaaaatagatcaatatgattttttttaataactttcgtatagatactttttgcataaaacacaccgtttagtggtttgaaaagcgtgcgcacggaatatgaggggagaagttgggaacctgtacgtgttgccgaacacacccttaatgatgagttgatcatatgggtccgtgaaaattacatcatacagttctcaggtttgttactcagagtttctgcagatgttccgtttggagcctgctggacagagcttcctggtgcagattatgttttgtttgaatttggtcaataagagttataatttgaaattttggattgaccagtgttttcaatgcaaatccggttcgatttgagaattaggatacatcaaattgttatatatgttttccttttcttcccctttctgttctgaaaacaaagggaaattgcaagactgccagtatcggaatgactgaggctttgctttgcttttcagggctacatgtgccgaatagcttgttaggattggcagtaaccaaacaactaatcgggtcataaacacaaaccattgtcggttatacgccctcatatgttcagaaaatcttcataacattgattgaattgcaaatgtgcagaagctagactaaactcttccactatcttaaaaatatatgaaatgcaagtaagtagtaaatatcactactcccttcatctatttttaatagttatgttttcaaatctgaaaaatttatttgtgatagtcatatttcaattcaacaacggaacaacatatcattttaatgactttctcggatttaatgcatgactctccattcttacacacaagtaatgaatcgcttgtttacgaggaatgactagcagcatgtttaaatggatgataagtagaacggaattgcttatcattggtctgtgcgtcaagatgaaatattactatcaaaaatagatggagggagggttattatctgcctataattttctacagaaaaaaaacaacaaaaataaattctagctagccggcggcctaaagctcatcgtgatcgtcgtcgccgccgccgtcgccatctcgccgtgagccgccggacctctggtacaccgccgacatgaccgggttgcacacgtcctccagctcccggagcttctcctcgtactcctccttgccgacgtcctggttgccgtcgagccactcgtacgcctccatcaccgccgcctccaccttctccttctcgccgccgtccatggcgcccgccatctcgccgcccaccacggcgttcttgacgccgtagacgtaggcttccaggctgttccgggcgccggcgcgctccctgtggcggcggtcctcgtcggcgaactcctccgcctcgcccagcatccggtcgatctcctcccggctggtcttgcggtcgtcgccggagatggtgatcctctccgacctgccggtggccctgtcggcggcgctcacgctgnnnnnnnnnnnnnnnnnnnnnnnnnnnnnnnnnnnnnnnnnnnnnnnnnnnnnnnnnnnnnncgcgatgccggcgaggtcgaacctgccgagcagccggttgtcccgcgtcatgctccgctcgccctcgaacaccttgacggtcaccgtcgtctgcttgtccttgtaggtggagaacagctgcgccctcttcgtcggcaccggcgtgttgcgcgggatcagggtggccatgacgccgccggcggtctcgaggccgagggtgagcggcgtgacgtcgaggacgaccatgtcgcgggttttgttgtcggtgtcgccgccgacgatgttggcctggatggcggcgccgtaggccacggcctcgtcggggttgacgccctggttgggctgcttgccgccgaagtagtccctgagcagctgcctcaccttggggatcctcgtgctgccgccgacgaggacgatctcgtcgatgtcggcattgctcagcctggcgtccgccatggccttcctcaccggcgccatcgtcttccggaacaggtcgttgttgagctcctcgaaccgcgccctggacagcggctccgacaggtcgacgccgtcgaacagagactccacctcgacgcgcacctggtgctggatgctgagcgcgcgcttggcgcgctcgcactcgcggcggagcttgccgagcgcgcgcgcgtcgccggcgatgtcgcggccgtgcttgcgcctgacgagctccacgaagtgctccatgacgcgctggtcgaagtcctcgccgccgaggtgggtgtcgccgttggtggcgaggacctcgtacacgccgccgtcgatggcgaggacgctgacgtcgaacgtgccgccgccgaggtcgaagacgaggacgttcttcccgccggcgccctccttgccgacgccataggcgagcgcggcggcggtgggctcgttgaggatgcgctcgacggcgaggccggcgatggtggcggcgtccttggtggcctgccgctgcgcgtcgttgaagtaggccggcacggtgacgacggcgcgggtgacctcctccccgaggtaggcctccgccgtctccttcatcctggcgagcaccatggcgctcacctcctcggggctgagcagccgcacgtcgccgcccctcacctcgacgcggacgtgcggcttgccgcccttgtcgacgacagcgaacggcagcagcctcatgtcgcgctgcacctcggcgtcggcgaaccggcggccgatgaggcgcttggcgtcgtacaccgtccgccccgggttcgccgccgcctggttcttggcggcctcgccgatgagccgctcgccgccgccggtgaaggcgacccacgagggtgtgatccggttcccctggtcgttggcgatgatctcgacgtggccattccggtagacaccaacgcacgagtaggtggtgccgaggtcgatcccgatcacggtgccgccgccgccgccggcggccgcggtggagcccgccggcaacgtgaggaggaggagcacggcgaggaagaggccgtgcaggtgcagccgccgcgtccacgttgcgccgcgcgccatggctgtgtgtgagagacgagacgcggggggggcggctcaatatatagctttgggtgtggccgcgccggcgcggcgccgcgcgtgcgtgtagcgtccaatgggaggctctgcggcggggcgtacgcgtcagcggcgtgatctgagccgtccgttgttccgatcgggcggtgaggtgtaggggaagcgtcgtgttaacacgtggcctttgggcgtcgttccggacatggaaggggcgcgcgtggcgcgcggaaatttcatgttggttttccatctcggtgtttggatccggcctggcccatacagacggttcgacacaccggaaattacatgttgggcttgatttgctggatccagacatcctgccgggcccgtaaataaatggatgaacggctatggaacgtcgatgaacggctatgggccagttcagctcagctgccacaaaactaaggcccaattatctagtcaacttctttgggaaaaaatccactttgacaccctcattatacctcggatctgatttgtatcccttaaacacaaaaccggttataataacttctccaactgttaacaccattacaaaatgactcctaggataatattgaagttggtattagctgacgtggctatccaatcataaaaaaaattaaaaagaacagtgggacccacatgtaagtgctaagggaaaaaagccagaagaaaaagtcgcttcctcctcgccgaggtcgtccgcgcgttcctctccggcaattgggacgcctccttcacaacaccgtcccctccgcgcaagccgctgcctgcaataggcggtggtcccatcccgcgctccatagtgcttgtacttcgtggcgttgtccggtgtggagctccatgccctcgcgtggtctacggcctagggctgggcggtggtggggtcgccagtaaagccgtggagcaattcacaatcgaattgtgaggcagaggtggtcctctgttgcgactctccccctcccccctcctccctaatcctcctatcttctacccgaagcaatcaaagtaggcccatctcctcaattcctcatgcaaaccaccgctaagcctaccatcttgatctaccgttacgagccgtctcatgccatcccactgtgacaccggctttgcgctactttggtgaggattccctcacaatcttctgttgtctttcatcgtcattaatgtcgccatgagcccatggctgctcctctactctagatccactccacagccactagcctcacccacacctcctcaacatctccaacatagaaagcgagttccttgtcacaggggacgcgtgatgacacccttggaaggccgagatccatatctgagcttgttggcatctcttctctctccaccgaaccgagcccttgactgccgtgcttatgctatcttcctcgctggaaacctccacctttggatgagccgagtcgtaggacacactcaatcgctcttgttccatcgtcggagcaccaacacttgagccccatctcctctaacctcccaaggctcctccactgagagaatcgtgatactgagagtgtgaataggaggcggaagagggaggaggaagaagacatgtgggcctgtgtctatttttttttatttttgtgatgattgggatgtcacatgttagcgaaaactgcctttaaaacagccgagcgagtctatttacacggttttaatggttgaaggagtcataataactggttttaaggttgagggatatgaatcaaatccgacctatattatgaaggagttaaagtggactttacctatattataaaggagttaaaagtggactttttcacttcttttctgatgattaattcattggatcggttacttgaggacttttggagtcaatttccttgcaagctactctttacgtcgttaaaaataacttctagagaaaaatttgaacttgtactcgtcgaagttgatttttttttttgatgagaatggtgtatacttgtttgaaaactgcatgtttcatcgaacggagtagctcgatcaccgtaggtcgattttgcttaaggttttgaatatttggacaacctgcgcgtggatttttgtgaagctatttctgcgtgtttttacatgcatggaccacctgaataaaacttaaggttttacgacccaagttaacttgaattttggagtccatagaacacctacatttgtgtacacagtaacacagatgctccaatcgaaagctgaaagattatggaacccaccacctaggttagtgcaagcatcagatgcccagcccgaccacttaaccgcaacgtcatctaccagaatctttcaactcgaaagaaattcgacctgatcctaaactcactcagtgaaatttcagatgtcaccgctgctgatcaattcatcctggacatcctttgacatattagaggaaaaaagcaacacgatatatttacaaatataaaatagtttataaataaaacttttatatacgtgctcttaacgatataaaatcaaagactaaaaataaactatgctgaaaaaaaattccaaatcaactccaaatataagattattgaaaattcaaatgtttttcatcgttgccgttttcgaagagtgacataggcggggtgggtgcgttcgtgcagacagctcgatcgatcgagcggtgatcggatccaaacaacgccgctccatcgatcccctcgacgcgcgcaaactccacgcaccgccaccgcccgtgcggcgcgcacacgtcactctacctagcttacacctacccacatcaaccttacacacagctcgatccacactgacacacagagcgcgccgcgcgcgacagcaaggcgagagcatggccgagcaccacctcccgccggagccagccgacgagccccaccaccacaaccatggcgggaaggcggccgtccacgccgacgacctcaagcccggaggccgccgccgccggtacggatactactatggcgacgggtacggctctgccgaccccgcccgcacgctctgcttcgtcgtcctcgtcgtcatcctcctcgccggcatcaccgcgctcgtgctctacctcgtctaccgcccctcccgcccggccttcgccgtcacctccgtcgccgtctactccctcagcctcaacggcaccggcaccggcaccggcgccgtcgccggcgggccggccacgctggccgcgtcgttccagctcaccctcgtcatccgcaacccgaacgagcggtcggcggcgcggtacgaccggctggcggcgtacgtggcgtaccgcggggagcccatcacggcgcccgccccgatgccgccgctggtgcaggacgcggacagcgcggtggcggtggcgcccgtgctcggcgccggcgccgcggcgccgcccgtcccggtgtcccccgacaccgcggcggcgctcgccacggacgtgtcgtacggcgtggtggcgctcagggtggtggtgctcggccgcgtccggttcgtgtccggcccgttccggagcgggtggcactccatgtacgcccgctgcgacctcctcgtcggcgtccgcaagagcggcggcggcggcgcgggtggcggtccggaggcgccgctgctcggcaaccctacctgcgccgtcgacatgtgatgccaggcagctggatagcttcgtcacacctcgcctgtgtacgcgtagaaaatttacctatacagctagacgacgacgtacgtgtatctgtgggtgaccacgtgtccgtatgtatacgtatattggcaagcatacgtgtctccgcttctggatacctttgcaaaatatacgtgtaaaatatcgaaaaataatgataccatatcacatatgctaatgttcgacagaattttcatcaggatcgatgcagaatttatgctaagctgctttgctgtgtgatgagatttataattttaattggagttatgcgaaatccatttggaacatgacattgaatttcagcggctaacttctgcagcaatggccggtaaaacactaaaactgacgtagaaatggtgatgggaactgcacaagtactgggcaaccccgtttcagggttgaagcccagtaggaacagcggcaaccggggatgggccgagcaacggagcaagcgaaggacgcacgacctctggactggatttggcccaaaacaagacgcatgctcaacacaccacaaaccaaacaattcttcgaagatttgggccaaattttactacccaagttttaatctggacaaccgtaaaactaatattttcagtatgaaccgaaacactttgtcatggttgcggtttggaccattccaaacatcttcaatacacatcgacagcatcaatcaaatcggtttgggaataccggtgaacttttccatctattgatctatacgcaggccatatctttgtgaatagaggctagacatggatataaagagagttgggcgatcgaaatcatgataaaattaattgaaagtgaaatgattggtttaaaagtaatcaaaggtaaaactttagcaataaaagatggctcaaaccgcaatttttctattgtttaataactagtcaaatgcacatactttgttgtgtcatgggtaaaagaaaatatataatactatgtcatagataaaatattttcctatcaaatatggtagtattattcgtctgtttatttgaacatatggtacttgattcaaataaatattacactattataaaatattagaaagtatcataaataaatttataaaagttacaaaagtaatggtggtggctgactattaatgtttgtgtagaaaacatgaggcatatctctctctaccctcaaagttattgttttgatgttcaaattagtttggtactccctccgtactcataaaggaagtcgtttaggacaatgtttaagtcaaattttgggaatataaatcatgaataactctcaagttgttgagtttgaaaatatacaaattatatgaatagatttgtcttgaaaaatactttcataaaagtatacatatatcatttttcaataaatattttcatagaaacaagaagtcaaagttgtattttaaagaccgtgtcgctgtccaaaacgacttctgatgacgctctctctcgtggcccgatcttctggtgaggggataactctcgctttaatcgagtgcgacgtttttgacgtggctaccaaccagaacaagtccaggacgccatgcaatcgctacaccacaaacgatgtcgtaccaaccgtgacgcgcggttgatgatccctgcaatgcaaacgagagaacactgtaagaacaagataagatgcaatctaaatattgcgaataggtgattaagcacaaaggaatagttgcgattaaagtggcagatctaatcgacccggcaaatcaacacaccaactattgggggctctaaatcaatagtcgccgactaatcgagcgaggactagagacaaggtgaatgacacttggcaaaattcaactaaacaaaacccaaaagtttttgaggatgtacaaaactatttatagaggaaaataaagctagggttaagtgctaattcgtggaggtggagggagacacttccgagatgggcctagtctattacaaggcccaagtcccaagttcggtttcagcaatagcactgtcttgttttggcgattcccgttgactcgagatgaatttggacatgagaccggatgcgtttgaaagatagcgagataagctttccacgaagtccaagatcacccaaatcggagttggcatgaaggcgctaggtccgtttgaagtcagtgttgtctccggaggccgaactggacttggacttggaattatcattggaacatgtgaagttatgagcatatccgacgaagtgatgtcctcatcaacttcttttacgagtacggagggagtactccagttagcttcagatcaataatttcaactgatcactaagggtccctttgaataaaaaaaattatggaggaatttcatcgaattgaaattctatagtaatttttttaatgtagccctttcattcaaaggattagagttttccaaatcctataaaattcttaagaaatggctcactgcataaaagccttgaagaaaatttagcacgaggttcaacctattggaaaaattccttagagtctatctctctcatccaattcatgtgttttcattgcggtccaatcaaaggcttattcttgtatttttcttgtgttttacaacccactgttttacacttacattcctactagaatcatgcgttttttctactcttttcctttttcagtcctataataaggggctctaaacgtctagcaacaaccaaaatccatccttatgttaacctcactagattttggcaaagcacttctccaaattgttttttccaaattcgtttgtccctcaaatagttatcgtaaatcatttttatatcctaccatctcgatattcagcatgatagatatacttttttttcccgatgcatatccatgtcaaaaagttttttttaccctactgaatttttgcaaatgacttgtccaacccccccccccccccaaaaaaaagaagaagaaataaccacaccggccattactactccctccgtcccacgatataaaggattttgagtttttgcttataacgtttgaccactcgtcttattcaattttttttttgcaaatataaaaaacgaaaagttgtgcttaaagtactgtagataataaagtaagtcacaaataaaataaataataatttcaaaaaaaaattgaataagacgattggtcaaacattgcaagcaaaaactcaaatcccttatattatgggacggagggagtataatataagggattttaggtagatgtgatacattctagtacaatgaatctggataaacggttaatttgtccaaattcattgtcataggatgtgtcacatccacctaaaatatcttatattatgggacggacataatactattgatcgataataacaagtcataacttcgctgtagccccttgtgtgaaccatgcgtgcctgaagggcaccatcgaggtcagactcgcgtcgcacagtcgcatcgcacgcacccgcaccggcaccggccgaccgaccggtcgctgttgccttgcctcccaacggcgccaacgaaccaagtcgcggtcgtactgtgcgtgtagtggagacagtacagcggcggtggtgacaccagccacgctgacgtcacgcgggtgacgtcaccgagagaagagatcttttgggccttttctctctttctctctcttcgaatccgtctccgtcgccgcctgcggatgctgcggagcgtcgctggaaagaaacaaagagaggaggtgatcgagggtagtacccgacgttgtcgctgacgtcagctggtttcgtcagaagaagaacagagtacagaaaaaaaaatttgaaagggacgaccacccatgcatcggtgtgcctccaccgattccaccctgttgcagcgggtggtagtcttttttatttttgcttcttctttattttactgtgtgcagccttttcactttctcttctttttatctttccctcactttcctttggacaggtttatcgagctactctcttcgtacgaatatgtagaagtagcaagttttagttctttgacagagatattataagaagaaaagtaaaaagacttggttgtgttattgggatgcatggttaagatataggtctgaataagttgaagttgggatactacgaatagtttagtggtaaaagtcatatttttttgtcaagtaccacttgttgttaagtttgaaataaattttaagttttaaaagttgttattttcagacgaaggtgtactaatttagctaagaaatcttttcctcaactatttagacaaaactttgaaattgccggtaacttatttgtttgtacaagttttgtttttgaaccacatagtaaaaacacatgtgctcatatacatatgtgcaacctaccacttttaagaaacggggtcaacatgctcctctatcatatcttgatagtatcgtgccgtaataagaatttaactgtgacatcagattgtttgtttctaaacttttgccagaaatgtttaaattaaaaatatattatggcatatcgatctctggttgaatttgtttttggaggaccaggttatttaagtcatggttaatttatgatacatgtttgaaagccactcccaaaatcaattgtaggacaaccctaaacgccgttcttatagtgttgactcagcgtttcttttgagacctaacaaaacccgtttattcaatgatccaagtcaaacagaaaattgtactatatatatacattttcaacgatgaacaatgccactgtataccacatagaaattttttgtcaaaaaagaaaaaaaagtctacacacacatcagtatcagagaatctcattatttgaaccagctagcgcaactggaggagtacgcacgtagtttctaacgcattttccaacagatgccgtgaataaacccaagttaaaaacatatgctaattactccatccattttatattatatatcattttgagttaatcaaatttctttaaatttggtcaagcttataaaaaatattttaatacttacaatataaaaataaacatattatcaaaatgtattcattgttagatttaatggaactaatttagtattttagatgttcttaattttgacaaatttaatcaaacttaacaaaatttagctaataaaaatcaaaacaatttatagtatgaaaacgggaaggaggaactaaagctttgtttgtttgtttctctctccattattctaacgaatttgttgggggtttttttttaggattggaccagagaagcagagaccgtttggtcgtccaacgcatgaagcaatatggaattttgcagtaaaaaaaaaacaaaatacaaagaccagctcatcgcccccgatgggtcaaggcgtttgcacgtttttaaaactatagttccccctctcacgagatcatgcgcgccggcttccccacaggacacgtcaccctccctcctgcccctaccctcgctggtatttataccacccgtcgcctccaagccacgacgccaccgccattccacctctcgcttcgcttcttctcctctctctctctctatcttcacctcgcatcgttggagatatggagggagttgacgtgaaggcgccgcggccaggctgcggcggcgacgacggcggcgcggcggcggcgtcgttgtcggcgcggcgggaggaggaggaggagggggcggtggtgggcggggaggacgagcaggtggagaggttctacgcgctgctggccaacatccgggcgttgaggggcatgtacagccggtacaacggggaggagggcgccgccggcggcgatggcgacggggcgagcgggaggaagcgggcgaggcgcgcggagccgccgtggaggccggcgttcaggatggaggacttcgagttcgaggaggccgccgccggcgccggcgacgacgacgcggcgtgctccggcaggacaacgaagaagcagagatcaggcggcggcggtcacggcgccgccgtggagaagcggcggacggagaaggaggctgccgccgccgccgccgaggacgacgacgacgagcaggagggaggcgaggtcgtcgaagggaaggaggaacaccgaccgggccgccgcgtcgaggcccacgggcccactgaccagtgaacattagctagctagctgatctcgttggaattggtccttcggaaacagaaggcattttcgttggacttttctgattgatgtcctagtttgaaatgttcacatgtatgatagcactagtagtatcacgcaatccatgtgccagtcttgatttgcaaattgcaatgtacttatcaaaattggtgatcatggactatcccagctgtgcatgggtaaaccattagtatttgagatcaggttttttaatttcgaaattggtttttttgccggggaaccgaagtttcggaaatttcgaaattttttggtcgaaattatttaaaattttgacttattttcaatgaatttgaataaaatttgactaaattcacaaaaaattgcaagaaaaactaaaaatttcgggcaagatatgagcttgcccgagggaaacgaaatttcaatccctgtttgagatagactaacacacatcactccaattagtttaaacttgaactgcggtaatatatgcatttcaaaaaggagatttaaggaagaatgtcagtattttaagcagttaagcacctctgaagatttggtaatgcgaataggtgttcgatcttccggtagtttctattttgcaacgtgagccatatcttgagattagcaaagtaactatagatatttagttgtcgacggacgacctaccactaaaacaatattttgctataaatgcgatgatctatgctaagtgtatgatttaaactcagatgatgaacagcttcaccacaagacaaagaacctaaccagctgagaaaataattaggtataaatgtgatgatcaacgttaagtatgtaacctaaactcggatgaacagtttcactacaagaaacccaaccaagttacactcagtttacaaggttaggtggtgtttgtatctcctaaaaatgaagattaagtgtttcacgtaaaatgagatggtaataacgtgtgattaattgagttttaattattacaaacttgaaaaatggattaatctgatattttagagcaacctttatatagaaagttttcgtatgaaatacaccgtttagcagtttgaaaagcataccatgagaatctaaaatttcatccaacaattgttggacattcgaacgcagccactagtatagttttcatgtcactttaacgtaaacggaaaacatacttcacaagacaggaatttcgtaaaagaaaaggttgaagagatcaaactaaggccctttttagatcccatataaaaattttacaccatatcacatcgaacgtttaacacttgtatgaagtattaaatatagactaaaaaataactaattgcacagattgcgactaatttgcgagacgaatcttttaagcttaattgctccgtgatttgacaatgttgtgctatagtaaacatttgctaataacggattaattaggcttaataaattcgtctcgcggtttactgatggattctgtaattagtttttttattagtacctaaacaccccgtgcgacaccctatataatatccgatgtgcaacgccaaaactttacacccctgatttaaacaccccttaattaaagtgtatggaaatcttgcaaaactctcatattacaaagcactggcagagaaaacctttttactcccggttgggaaccccctttagtctcgggtttccaaccgggaatagcaatctaggactaaagatggttgaaataaccgggactaaagatgaatctttagaccaaccgggaccaaccgggactaaagatagagtatctttagtcccggttgttgttaccaaccggaactaaagaggatagctaggtttttttccttttttattttctcccgaatctaggtagtatgcatatccttttttattttctcctgaatatgggtggtatgcatatcccaaatcaaagtaagatcccaagtccacattacaaatctgaaagttctaaaaaaattacatcacaaatcaaatatatcacaaatcctaaaaaaaattacacacaagtcaaattacatcacaagtttctacaaaattcatcacaaatacatcacaagttcatatcacacacaaatcaaattcatcacatgatcatgcaataaatcacaaattcttaaaaaaaaacaaacagaggagccggccggccggccaccgccacgcggccccaccgcgccgcccgcccgctgccgcgccgcctcccctccgcaccggccggccccgcggcgctgcctgacgccgcgccgccgccgcggtcctccgcgccgctgcccaccgccgcgccggcctctcctccgcgtcggccggccaccaccgcccgtccctctgcgccgccgcgccggctgccgcccggcccgctctcgctccgatccaagtggcactaaggaagaagaaagggtaaggatagggagttagaggggaaaaaagagatagagaaagagtttgttgtgtggacgggaaaagaggataagtaatagggattatataatacgtgttgatttttaattccggttagtaacaccaactaggaataaagttagatctaccaaccgggactaaagatcctagccgcctgacacggtctgacatagagacaaccgggactaaagatctttactcccggttggggtaaccccaactgggaataaagatcatctagtcctgttacgcttataaaccgggactaaaaatcgtttttagtcccggtttttaaaggaatcgggactattgtggatttgagttgaccgaccaaagatggtttctctaccagtgaagaaatccaagtttctaaccctagtttgtttagttcgcccaccatgatgtgataattttgaccaccgaaacccctaagcagaaagaacaggacatttccacgtacagttcattcagatcagcatttccatgtagttgagcgtgcggcgtgggttccacgtacagtcttctcaaatttctaattttctcttctctcaaccacaccgagcgtacaatatgcacgaacagacaaactgaaaccagaggtaaagacaatactggagtaatatatagaaagctaattcctcaatagtgttacaaagtttcttaacgaaccgtgacccgctaatttactagtacaattatttaagtgaaactgtgagagtacaaataactttaaccgtaggctgctaattaaagaaaatagtagcatacacaccatgcagcggaagtatcgatggtgtaggggacagggcctgagacatcttgggcttgagcttcaaaactccatgtaattttctttagaaattgtatgagaattttcaaaaatatataatgcctaactaaaattgtcaaattcagtcttagacttgcaaaaaaaaaaacatccaccactgatggtatagtgtagtagttattgatgcacaactcacccactgggggttttaaatcctaatgccttcaataggattttaaagaatccacgtacttaaaaaagtatttgaatatgatatgtagtggtgtgtatatgcatctttagtattcaatgtaatcgaataaaaaacatacataggatttcaactaacggttccatcctaaatgtagaggttggagatattttcatataaaagaatacaaataaaacagtaaagatcacatgaggtaaaagagtaaaaaaaaagattaattcataagtacagtggtaaaagaataattggtcaatggtgtgtggtttatatgaaacactataaccataatatccgagattatatgtttaagtgttatagataaggcatatataatatatatttttgtgttaaactcggtgggacccaccatataccaagttttatactgaatcaatcctaatatacgaaaagtattccagataaagaaagaggaaaaagagtctactcgatactaccaggactatttggatcgtataatacttgcctacttagttttacttagaaaaaggcacacccgaagatataaatacaagtcccactagaagaagtgggaggccaagacagaacacaagccaatacagatctaaacaaatacaaaacaacttcaaacctcaccaagttcatagtactcgagaaataagattacactagttgtcaaccacatgtgagagctccatgcggctaggccaacagtgactagattaggtcatcccaaatattatactcgcgtgatgttgatagataaaggcaacaccggcttcaaccaagaagagcagggctattacttgttagttaaggtcatgaccatgtataaaaatccttgtctttcatctcttttacttcaatcttggtgacaccaactacccccatactctataaataccataggtggatatagtactctctcgtcaatgtgtcatgtgtcaaaatttatggagtatgttttatgtaatcaatattacttagggttatactagaaaaatgcatgtgtgttgcaacagataagatgtttttaaatcagcatacgttatactcctttcttagttttgggccgaaagccaatccctttcttctttttcagccctagcccagtctgctacctccctccgctcggcctgcctctctttggtccaacctacagctggagccgtaggtctaggtcgcacgtcttcaacctccagaagatggtgtcgtgctcgtacaataccataattgattctccccatcaaatccgtccgaatctttgtcgatcttctaaaattggtttagggtttttatccactcgatcttctctttcctttttttccaaaattggagtgagcaaaacttgggataaaaatggccaagttagcttgctggcctgccatcatcgacgacggttaaatggagattaaatccggccaattaaagccgaatttaaggggcaaatcatggggaaatgatgagggatgagtgtgaaatcgatttttgcaatcaattggaggagaaaacgcatgaagagatatatcgatgtggtggtggagctagagataggtatagcgaagggaaaagacggtgacgaaaagaaaaccgaaaagccagaagcccttaccgcgtgcgagaaaaaaaccgcaacgaaaaaacggtggcggaaaaaaaccgtatgagaaaaaaaaatgaaaaataataaaaccgcgacggaagaaaacaacgaaaatacgaacggagcataaaactgaaaggcttacagataagatccggataataataataatagaactggaaggcttacaagttttttatcaggtatatagattaaaactgaaagatagaattaaaaccgattcaaacacatatgacgtatcaaaattctagcagaaatattttaagtttttataatagtgtagagatgaaatttactatagacaaataagatcagtaacttgttatataggttcccctgattaaaaatgtcgataggcttgaaatcgttagacatcctgctatagatcgaattgacattatattccatgagaaactctcattccaagaaataaaagatatgttcgtccccatattcttcgatcaaaaggttcggaattctagaggagaaatcatattcttggcttggatcgatatggaagtgcatactgtatgcttcggacggtttcttctgttggctgtcaaatccagaatcaaacatcaacacatccggcggcagtatcatctccttttatggcgtgctacgaaatgatgcccacacacttgcacacagtaatatactccctccctcccattagagcagagcaggtacaataaaagactataagacatctataaatacagttcgagaagataaaagaggagagagcagcgggctatagatttatagctagctgcagcacggattttaagatatatgtgtgtatgataggtgtgaccaaatattaattgtgcagtatatgtttataagtaactattgtatgaattgactattaagttgactatagatgatttgaagccaactgttggctatactattaaacttgctcttataagtgcagccataaattttcgtatctaacgtttgatcgcccgtcttatcatctaataaaatactattcttattttatcatataataacaataaagatattaatcataaaaatatttcaaataggacagatggtcaaagttcgacattgaaactcacaactgcgtttattatgggacggagggaatagctcatgagtaataatggagtagctcgttcaatagaaacatttcacgccaaacaaacaaaccgacaaatttcgcaggcaggcggtacaacatcgtgcgacacgcgcgcgcgtgctctcccctgaggcccttcacagtgcagtgagctggccagttgcttcacagctccacggaggatggttgatggcgtggaggagagagggtgtgggccagagttccttcacatggttgctcggttccttggtgagcaacgagttcctcgtcataaaagcctgcaaaaatgcctgaaaaaggactgagcacgcacaaaaccatcgggagagagagagagggggaaagaaaaacgacctgcaaagcgattccgtggtggggccggcctgaaaaaaaatgagggtgggttacgcacgtgtgcactatggagagggaagcttcaaccacttttacatttgggttgctcgcccaggctcaccgcattgttactgccctgaaaaaaaagggcccgatcgatcgatcgaaccaccactccgtataattccatgtgctttgatcacctgctttgttgtggagcacacgggcacgagcacccgcgcgcgcctggcctggctggaccgaccgaccgagctgaccagatcgaccagctaagccaccacttttgcctttcctttaacccgtgcgcgctgacgtcacggcacggtcgtcagcggccccccgttcccgtcacacacacgtccccgttggccgttggcgcctctcttttttgtcgtgtgcgcctgcgtcatccgctgacgtcacccatgacccaaaccacagtcgacgtggaatggaatactgttcgtcctttggtttaccccgatttgtccccaccgaccagcgacttggcgtccccattttggggatggatgggcgagggcagtttcgtcacttttgcagcgatgattaaagaggaagaccgggggcagggcaaatgcctcttttcatcagggtcatagtttgtttttttagtggtttggtgactgggttgtggggcccgagacaaaaggacaacagtatcgccatttgcagctgggctattttcccttttttttatttttatttttgaaaaaaaaagagggtgacgtctataacgtgcgcacactgctattgacgggtacatacattacctactactaaagaagcacactcttatcaacgggtgcgtacattgtctactattgaaataatagttagaagtaaataagaacactcgtatcaaaaataggatttgaatctctatgggttagtttcaccacaaagaatctagctaaccagataagctacgctcaccttactggttagatttttttttcaagagaatatgtcgatattttttatagtaataagcagtagtgttggcagtcgtacatgctccattatttttggaggactacaacgcatcagacggtcaaaagaaagaggaatattcctatagagtgagccaccaaatcatatcgatgttgatttgatggaggaatatttttctgggtaagatgtgataattacgtttgcatgtggtttggttagaaaaagaaactatttttcaaatttctattaatgattgtaagtggatcttcgcatgaaactagattttaagaaccgctactttcttatattagttgtttgacttttttaatcaaaattctttagatttgaccaagtttatagaaaaatatcaacatctacaccaccaattagttttattaaacttaacattaaatatatttagacaatatgcttgttttgtattgaaaatgttagtatattttctaacaaatttggtcaaccttaagtaagtttgattaagaaaaaagtcaaatgatttataatatgaaacagagggagtacataattctagttgcttatctttggatttacttcgtaattcttagttacctcctccgttccacaatgtaagtcattctagcattttccatatttatattgatgttaatgaatctagatagatatatatgtctagattcattaacatcaatataaatgtgggaaatgctagaatgacttacattgtgaaacagaggaagtacttatgttcctactaaaacaattttagaatcaattaatacaagttctgttcagtttcttttctttttgattaagtgaagacgctgatatacacactctattacgcgcgcactcacatttttttaaggattatatggaagatgtacgcgtgcacaatttgcgctctgaattttgagttactccacttttgtttcttctaataaaattttagaagcaacagaaaccattcaatttagcatcaccccgttaaaatcctatgaaaaatatgcgcacataatatcttaatattagaaccttaatagaatcatacaccctgatcctagcacacataaaaacttatactaacgtgcaattcttttgcccgttcagaaaaacaccgtacacgaaaaaacacaagtgcttctcaacaaaccgtccaaattaatcctacatgaatggaaatatatatggaattgttcattcggcctcagatttttgacattgctctacttttgactctctaccatggccgttcaaagttcaaacctttgtatatctcttgctcctgatttgacttatttgagcacggtaataatgcttctccgtttatacgcatctgattccgatcgaattaagacgtgtctaacttcgatcgatcagatgctggcaacctggcaacgaaggcggcgcttttggatttacgtattctagagaggacgcctaattaacgtttaattatttaatcgtaaatggtccggtctaatccaacgatcgagatgtgtgctgtgtatagtgtgtcgctgcttcacaaattcaattttaacttcgctttcgttttcgcaagctgttgctataaatttactcaccatggctgcgccattctccgcagcagccagcctagctagccctagcctactcccatggaaaccaaggcggaggccgccggcggcggcggcgagaagaaggcggcgtccgtggcgccgcgcgacgccggcgacgccccgtcgtcaccgcgagcggcggtgggaggagagcagcagagctcagcggcggcggcgtcgagtggcgatggtgtggcggcggcggcgaatgtggatcggagcggcggtgtcgccgccgccggcgaggcggaggaggacgaggacgacgagcagcgggccgtggagaggttctacgcgctggtcgccaacgtgcgggccatgaggggcatgtacaggagcagcggcgacggcgccagcgcggacagcgccaccggcggtaatgccggcggcggcggggagaggaagcgggcgaggcgcgccgaccagccgtggaggccggtgttcaggatggaggacttcgccgacgacgtcgcgggcggcgccgccaccaccaccaccaggtcggacgacggcgccagagcgccgccggtagagcaggcggcggcgccaggagtggagggcggcggcgacgtggagcttaggagaggccggcgccgccgcgccgccgcgtccacctcgccgccttcgccgcggcgcgcgccgctgccatagccgtgggacgaattaacttttttttttttggcaatgaatgtttgactagtcggcaggttagctaagcttagcgtgaaacatctgtggcgagcgcacgatgtgttttgtttgttaccacacgtttttgtgtgttatgttaattggtacaccaattaatttctgcagtaggacgcatttgtcacgcgcttacttctttagcaaactttcgcacgacttatcgctttcgatcattaatgtttgaagttagtattagattcgatctcacttgaaaattaaagcatcaggccttagctatgatctgttaacaagatactacgacactaaaagagtgagctaagctatctctgacttgaacaaatttatgtacgtgtaggccgtagaaattctacacaaaatatgcatatatattgcctaatcttaccaaggttggtgtttactgtttagattgagattgaagatttgcaattagtctttgacttagaagactcattatttttggatgtggaagctggaggtgttgagcccttgatggagctaggctcactatagttggagttcagagttttcttttctctcttttttttttgtcgaaatattgttataaaaccgatgatggcattgagtggaaacatgcagcatcgttgggccatggaggacaggacagggagactggcacattaggttgacggagtgatagccacacgggacaacagccaagagagatggcgagctctagggctccctagggctcgttcgtttcaaaggcattagggctcattcgtttcaaggaattgtaaagaaaaagtacataagtatgcaatacttaaatggacatcaaactgtcattcgttttaaaggaatccaccgaaagagaattttcaattctatccctccaattttagggggaagacaaaggaaagaacaatccactcttaactcattgttttcatgttctttggattgtttgttgcacaactatagacaagttttttatgtttttcaatccaaagtttccacatgtattcccatactattctttttttttctattcatacattttaaaaatcctacaaaccaaacgagccccgactggaaatgaactatcgaactatcttctagtttatcttttttgttaaaaaaggaagaaaaaaatttagtataagactcaaaaaccttgataaatcgagttgaacttgagagttaaaaggtgatcatcctacggagttgaatttgagagttgaaacgatatctgttctaaattattttcacaaactttttacaaacaccgatgtgttacattatggttgaatcttgacttttataacttctagtttactcaatcggacatttgagaattttgttagtaagaagtttgtaagaaaattttagtacatgtagcattacttcatggagtaggagggtagctgagggtaaaatggagaaaatttgaatgggatgtgattgatgtgaaaagtactactacctcatgtatgacactgttaacttttttttataatatttgaccatttatcttatttaaaaaattagcataaatatgttaaactataagttaagattatattttatttgatgataaaacaagtcacaattaaataaataaaatttatactataagacgaatgctcaagctttatacgaagagtcactggcgtcatatatttggaaattgagggagtagtatggttgagttgcatttactttaggataaaaattaaatctagaattagatccctcgttatactgctacccccatagtatgatcccctcaggcagcaaatgaacctcccagtttagagccccattggataccctaataagctaaagcaaaagctaaattttaaatttcaaacttaattttgaagttgattttaaaataatttcaatgtggcatttttatattggattttgagtcgctaagaacatatatataaaaattttacctataaattaatttttcttccttaaaaaaccgttttggcttataagacttgaagaacaataattcagtattagacttgaagccctcaataattcgagttgaatttgagagtttaaggtgatcgtactatgggatagcagtaaggcccttcacagtgggcgttacttcatatacgtggagcattacttcgtcctacgtggtaaaaaaaagttggtgggacccatagcttcactagcttcttcggttccaagtgaaggatcgagaacctcacttaaaaagttgagcgcggggcccaccgatgagagggatttgggtcacatgagcctggagagattgggagtgacctacttttatgtgggacccactaggatgaaagttttcttggttttgggtcacgcactgtggagagcgtgtccttcctgccaattttttttgtttcgttcactttttacggctgaagacacgctatacgtgccttgcactgctactgccctgctaacatctcaaagtgagcagccgacctacagagaaagtacggaaccagcagcaggcatcaggtagttggactgtgtcggcaaaactacacacatcgaaaaggattttgcacccacgtgcacacagaaacaagaatatgtactcatatggcattttgaattggtttttttgcaacgctttactaaactttttgtttatacaaattattatttttatttggtggccggccagatggagatgcgccactgttacatggattgaaattcgtagtacctttattccaaaataagtacacattcacgaattaggataaacttaaagtgaccgaaaaaaataaatacacatttatacatgaattctatgttttaatttatacatgattctatgaattctggcttctttagccaggatccatgaaaggagcaagaagggaactttacaacccctctcctcccttaagaaaattttaaaatatctaattaaatgattgagattttagaaaaaaaaacaaacttaccactattggccctagctctactccctccgtaaaaaaaaaccaatctaaaaggagatacttcctagtacaacaaatttggatcatattctcttataggttggtttttttaggacggaggggagtactgcgtaaatttggtacctttgccaccatcttgatgacttaagccttgcaaaaccattatcgttatacgcaagcaagcggcaaatttaacgattcttcaggggaaaaagggtccaaaacctcgttctttctttctacccgcggcttctctgagctggaccaattgattcactacaactcacaacggcacagcttgtacttgcacagatcgagagatattttgctggagggaatcgtatgccaagcgtatgtaaaatggccggtatcaatggctataagcacatctcattcatgggaatcagattaccttttagtttcttcgacaaggatgcgtatctttttttctttgcgggaatagagagctttattgattacgtaacaggattacaatcatgctgcagacattgcataacacaattcggtacattattacgccaaccgtgctttgccccgaacggatagcaatctgagcaagttcatgtgcgaccctattacactctctattacagtgcatcaaacgcacttccttaattaaccctataactgatcttgctactcgcagcagaaatgaccatcttgatctctcttcagtagtggaggacaacctcgcaatcgctgtggcacagtcacattcaagcataactggcatgggaatccattcagcagctagcttcagcccttcatagcacgcaagcagctctgcttcctccgctgacacacatcgcctgagaaacttccaagaagacaacagaacttcgcccctcgaattcctgattacaactccagtgccccattaccattttcaggattgaaagctccatcgacattgattttagcccagccattcacaggcataagccagcaaacacgttgctttggaaaggcccgagttggacctgactccttcccctgttcagggcgacacaaagccttcccttttctgttagctcttggttgccctcgtctgatcgtcggcacggtttataagatgtagcagccagtcaggtcctgactgagagaactcttgttcccctggtagccaccaattctgccgcatctctgccctcagcgcagctgctttcgtgcatgcaaccgtagcatgaaacgcatcttccacttctgccccacatatctcacagtttggcttttgtacaatctgtcgtcgatgtttattatgttgtgtggctagacaatctcttgatactctccaggcaaaaatccttattttctgtggcacttgcacattccaaatgttcttccacaacttcctatcaccatcgccatttgagcattgtgcaacctcttcgtcagctctgatttgggcctgtagggctaatttgtaagcagaacgaacagtgaacatacccaccttatcatagtgccaagcaatgaagtcctcttcagggctatgtggcaattggattctcaaaatttcctcagcatccaggggatagaagattcgatgaactagctcttcattccaaatttgttgatgtggaaccataagatccgagacccatttgattctcgatctaacagcctttcccaaaacccttagggtatgctctctcggtatctagttatccctccagattctgactttgcttcctgatccaatccgccaaattagaccttgtttcagcagctctaacccgtggaccatccccttccaagtttctgaagagtcaatagggaaagcagtatcacacaagtccccattggggtaatattttgcctttaaaatttgagcacacaaactgttgg

SEQ ID NO: 8654 - DNA, 46292 bp, Oryza sativa
tcacagagccctgctggaagcttaaacacactcatcacgtaggtcggaatagcctgtaggactgatttaattaaaacttccttccctcccatagagaggtatttctcattccaatccgttaatcttttctcaaatctctccttcaaagattggtatcttcctgccttcagtctacccatcggagtaggcagaccaagatatttatcttcaaaggaagtgtgctgaacatgcaaaagtgatctgatgtcagactgcagagcatccccacaatgctttccaaacatcaaagaacatttggccgggctcaggagttggcttgtgctttgctcatacaaagtaagagcactcttaaccacattagtctgttccatatttgatttaaagaacaacaggctatcatctgcaaacaagagatgggaaattccaggggctctcctgcagactttcagaggttgtaaccgtcctgatctttcagcttcactcagcgccattgataaaccgtctgccacaaagaggaacaaatagggcgacaggggatcaccctgtcggaggcctctggtcagtttgaaggattcaagcatggatccgttgaagcgaacagcatagctaacagaggtaacacaggtcatcaatagctgaacccattgagaacaaaaaccaaccttaagaagagctccctccgggtatctccaatccaccctatcatacgcctttgtaaggtccaacttataagcacagaattgagactcaactgatttacaccgattgatggcatggaagcactcaaaagctatgatagcattgtcagtgatcatccggccgggaatgaaggcgctttgcgctagcgcgataacatcctaaagtaacggccgcatcctattcaccaaacacttagcaatcaccttgtaaatcacattacaaaggcttattggtctgtaatctttcaaatcctttggctctttctttttcagaattaacacaatggcagtgtcatttacaccttgtggcattcttctctgttcaaagaacagcttaacagccgcaataatgtcccgtttcaacacatcccaattcttctgaaagaactttgtggcatatgtgagaagggatggaagacaacatggaggggaacgacgatggtggtttcttgggcatggaggcaagcggctgtggtctcaagggtggaggaggacagcgatgggccgcctccccggaagctggagccgaggtggactctgtaccttccctggtggaggtggaagtcgatcggtgcgggccacccggacgtcgaggtggacggcggtggtggctcctctgccctagccgtgcagggaggagaggaaagccggcgatggtgcaccttcgcctgcaaatggttgtggagaacgtcaaagaacaaccgaacccaagaggatgaggtgaaccagattggacgccgtccggaacagcgtccacctttggacgctcttcaaaagaaagtgtgtccaagtctggacgctattgggaacagcgtccttcctatttttacaaatttaatctgagatttactatttatttaatttaaggatcattaattactgtaaataaaaaattcggcgaaatataagtcactggtgagaatcccctttggccataggaagtggttcgaatgggattctcccctctgaccataggggatggctcgaatagagactttcctcattggctacaggaaatagctcaaaaggaagatcctggtggacatcgtcttgggcagctccatttcaatttaataccaaggatgtttagactgaatatgggatgattttaccccatgctacaacaaaatgcatgtctgacattggtttcgtagaaatatttgatttaacaagtaaagttggggatttttctggtgtgttgcttccagcccgcatacacaatatttcatttaatctaaattcacaaaccgtagaccggatactattaagttatataaagcctaacaatctcagatactattaagttccttgccgttttgatgcataacaatccttcggtattttcttgcttcagaaaatcagttctcctgtttcttttgcattttcataacgattcttcctaatgactgtattatttgcagaagaaattttagcactaccaatgccatgaaggcaagaggctcaggaatcagaacaaggccatggtgagatgatcactgctgccaatcaaccatcaaaggctctgcccgtcatagagacaaagatatgaccacttgtgccatgccttgaaaatggatattttttttgttataacaagtttatgcttaataatcatttaatcattttaaccggagtagttttcaatttatacttggattattatttttttgcccgttgcatagtatctttactacttaaaaaataagagatgtttccttcgtccgtcaaaacaaaataaatagcgaaaaaataaaaagaaaagtccgactccctctcagaaaaaatagtctgactctagatccgattcccccttaaaacggaaaataaaacaaaccacggtttgagtcccccaggcaccactcctcttggtttcaatctataacatgataccccattcatcttcgtgaaaaaaattaatatgccggattgaagatctgtttgcaaaaacggaacctaccggtcgagagcattccatttttatatgattttattttttggggtttatacatttacatttgagtccctataatcttgcaataagatacttgaggttgtttttgttaagaaaaaataataaaagggagagaataaaagcagaaaggtgcataaaaagaaaaacaaaaaccgcaagaaaaaaaaagaaaaacaacaacaataaaagtttgtttcccctaggtggcgaaaaaaaaccgtagatccgattcctctaaaaggcaaaaaaagtggtgaaaaaaaagctagatctgattcctttaaaaacagaaaaaaaaactctgtttcctataaaggcggaaaaaaatctgaaaaaacatctaaaaactttgttcgattccctaagaaagtggcgaaaaaaatagttcgtaaaaaataaaaagttggtttgtacaaaataaaaaatgcgtgcgagaaaagaaaatgaaaagggcgaaacaaattacaatttctaatcagtatatatgtcttctctatctctaatctaatctaactatttaaaaagagaaaatacacgagaaaaaacggttcaaaaaaatgcgtgagaaaaaagcgaaaaaaaacatgctaaaaaggttttccatcttccaaaaaaaaacgtgggagaaaaattatttccattgtaggtaaatttttttttaaaaaaaacatgccaggaaaaaactgtaagaaaaaatgcaccatttctaaaaaatgatttaaaaaaccgcgcaaggaaaaacaccgtctattaaaaaaataaatcgctctgaaaaagctgtaagaaaaaacactaaattaatggacgcttgagtcggatagaatccatcgattttttgccatctactacacggcttttatttcgtcatatattctcttgtattggaaaaaagaaaaaaaagaacatttgaaaaaaaacaagcaaaaaatgcatgagaaaataattgtcagaaaaaacaggcaaaaaacacacgagaaaaaaaaaagcaaaaaagggagaaaaatatggtttttgtcgtcagttaaaaaaaaacatgctgggaaaaaatgttagaaacaaatgcgccatttctgaaaaatggtttgagaaaattgcacaagaaaaaaacaccgtttataagaaaacaagctgctgattaaaatacaaacattgtcattgacataattatgcatgaaaaacgtatattatcattagaatttattcacctgttgcagcgcacgggtatttttgctagtaaaacaaaaaaagaaatcagggcgtaggagatgatcaaatactcgatcggtagtgcatatgcatgcggaataagtccactatgactcccttaaaagtgacctgaatctaatccatgaccctaaaccgtaaaaccggatatctcaacccccgaactatcaaaaccggtgcaatttgactcccttgatggttttggagggtggttttggtgacgtggtggtgttgacctagtctgtggagttgacgtggcgcttaagtgtcatttgaattaaaaacaaatatgtgggacccgtttgtcattcacacataaaaaatatggggcccactgacatgtgggacatgttcttcttcctccccgcttcctcccctctctctctttctttctctttctttcccctttggccggccgggccgccgagggagcatgagctagagcggcggcgggtgggcgccagagcggggaaagctgaagtggtggtggcggtgggagtggcgacggatggcgctcgccctgcaggccgactgcttcaccagcgacctgagccagctcatcatcgctgacgtgatgtccgggtcagtgccgctcgacgcaagcacgagtatctccgggagggtggccatcttgggtgtgttcaagccagacaaaattaattgctcccgtatgcctactcatcctattcttcagtggatggtgaacgacctgctaataatctctggttagttgctaaatgaatcaattttatttctggattttgtgatgcttgtggccttagcagcaccggttgaaggagacgcaatgggggatgagttggtggtgatgatggggctggcgcgggaattgacggccacgcagcgagctcgagcaatgacttgacgacgtcgtcgttgcaatgttgaatggcatagctcgatggcggccctcaccctaactagcttgacacttgagaggctcgatgtcgcatacgccagatgcccggatcttgttgttgcaatcggcggagaggccagagcgccggatcttgttatcacagacggcgggaggcggcggagggagcagggagctcgttccccggtgagggcgccgtgccggtggaggtgaggactggggttagggcgtttaggtgccgtgccgttgaccgctgtccccccgctcgatctcgtcgacgtcggcgtcagcgttgccgtcctctcccgcctccttgccggccatcgagctgcctgttgccgctctggaacccgccgttagctctagcccgccgccaccaccgcttcagcttccgctggccgccaccactctagccctcgcccgtgagaaaattgggattatactatcgcaaaagtgtggttttgctgaaatgctatcgcttcaaactgattcactaaaatgctatcctaaactgagaggtgttcaccaaaatactatttttgctcttttgggtgaatagaaatgtttttcttaattttaactttttcccggaccaaaatacccttaatgcggggcccacctgtcatactctctaacgtcttttgttcttgttcccctctttctctctctcgaggatgacgtcgggagcggggtggccggcggccagcggcggcgtggcgagggcgtggtagagcggggcctgcagaggagcggctcggccagccgcctcagccggagttcatgccatggaccgccgccccccagccacagccgccgccgccgccggtgagccgcgtgtttgcgcggcgcctcccccgctgtgggtggccttcttcgcgccgccgccgcatcgtcgccgccgaggagcaggaggcgaaagtggacccggatgcgacggaggcggcagagccactggtcgacgggcggggcggcgctaaccgagggacggtggacgcgaatggtggcggcggcgcgactggattggaggaggagcaggagagggagcagcgggggccgccggtgccggacccggacccgatgcttaggcgcggagtgaggggcggcagtggcagcggacgcgaatggaggcggcggcgcgagtggactggggcaggagggaggggaggagtaggtaggagagtggcgggggccggcgctggcgccggagccggacccaatgtggaggcgcgacggtgtcgccggtgccgatgtcgctccgcactcctcagttagcgccgattccatctggtaaacctatctgagaccaggtattttggtcagaacaaaaatgaaaatagagcaaaatcatttctagcaaccaaaaagacccaaaatagcattttagtgaacaccccttagtttaggatagcattttaaagaatcactttgaagggatagtattccagcgaaaccatccttttgcgatagtaaaatcacaattttctccctgcccgctgccgctccagccgtgctccccgcggccggccgaaggggagaaaaagagaaagaaagagagaagggaataagaggggaggaagaagaaagagagagagaggggatgacatgtggggccacatgtcagtgggccccataattttttatgtgtgtgaatgacaaacgggtcccatgtatatgtttttaattcaaatgccacctaaacgccacgtcaaccccatagactagttcaacactgccacatcagcgccacgtcaccaaaaccgctctccaaaaccaccaagggagtcaaattgcaccggtttcaatagtttgggggtcgagatatccggttttgcggtttagggttatggattagattcgggtcacttttaagggagtcaaagtggacttattcctatgcgtgcgaattctactcgcgatatatttctcccgattaggcccagcccatcaggaaccaaaccagccagtcgggccacggcctctttttacgcgaccacgaagcgggcccggtccgtgagagcctacacttgtgctgggccgcgagccagcccagatgagcccaagtactccgccacatccaaatctgcaccgttaacgccgcatcccacggctgtaagctcccctccgggagataaaacaccctccccccgatccagccaccatcgccattctctagggtttattccacgcctcccgtcgccgccgccgccgccgtcgttgtcctcgcccgcgcgcgaggagaacgctaaactccggtcaagatggtgagatccgaacgccctttactctctcttcttcgcgtcgttcagttattttctttttgtttttttttccagttcgttcggtgccttgtatggtcagtccagttcttgatttaaaccaggatatgtgatcgtctagttggcgtagaattacgtgcattgtaccggtggaatcttgttgcctgtgttagatcacgcggtgagttgatttgttcggttggttagttcttactagatcggtctcttctttaggttcatgtctttttgatctacctgtaattctttgtagagcgagttctttgtcaaatatgttattttggatcagagatcattttgggtaagtgctctgtgggtgacaacctggtcaagttgttagtaaatggctcaacacccgttctattagacatccttttggtaattaggagttactttctgtaaaactgtgattcccaatcataaaacatcctttgatagttatgagccattccatctcaacattaaatgtttgatgaacgcatagaatcccaaggaatgatggcatagattgtaagtgcttatttggtgaatcttgtttttactgtattgcccccttttcatttctctcatttggattggttaaacgctatcaatatgtatttatcttgttaaaagaatctccttttctgcttaataggcgaggggtttgaagaagcatctgaagaggctcaatgcccccagccattggatgcttgacaagcttggtggagcatttgtaagtacattgtatagccgcaagttatatcacgcagttcaaatgcattctgtataatgctaatgtagtgtttggcaaatgggaaagggaaatgatttcccacccatctttaaatcctaaccattcattctccctcttccatttaatcctaacccttcattcatttcccaatcccaatcccaccccccatttcccattatccaaacacatcctaagtgtttgctcgaattttttctgatgtttatttcctgggcaggcacccaagccttcttctggtccccacaaagctcgggagtgcttgcctttgatccttatcctcaggaacaggttgaagtatgctctgacctaccgtgaggttatttccatcttgatgcagcggcatgttatggttgatggaaaggtcaggactgacaagacttatccggctggattcatgggtgcgtgccctgatttgctgcatcattgtacgagaagtcaatgtctaattaattccatggaatcccttattagtttcttgtatcatgcagacgttgtgtcaattgcaaagactggggagaatttccgccttctgtatgacaccaagggtcgcttccgtctccacagcatcaaggatgaggacgctaaggtttatattaaattatccatcactatatggttcataatagtaggaacttttgctttgtattcttctgtgcaatacaaaaacaaacaactaaaaatatccttatcaagtgaaatcctacgccttgcctaatatcaagcaaacttcttgatctttaaattctactagtcatgtttgcctcctatggctggtttcatcctccatcggtactgttgacccacaaatgtgtacgccagtgggcccgttccaccagatgtagcttcatatcatgttgttctgtttagttctttatgtttgtgtgatgtaggaattgaagacagatcctattaatatcctactaatatgtgttccttttataggattcttatctttatagatttactttgaggttctctttcttgtgccaatgtggtttgcttggtttgtgctttttttgcttgacaaaattctattgagtcctacacttttgctttaaaatatttactgaaatacttctgttaataatgcagttcaagctctgcaaggtccggtctgtacagtttggacagaagggtattcctttcctgaacaccaacgacgggcgcacgatccgctacccagacccactcatcaaggccaacgacaccatcaagattgacttggagaccaacaagatcgtggacttcatcaagtttgatgttggaaacatcgtgatggtgaccggtgggaggaacacggggcgcgtcggggtgatcaagagcagggagaagcacaagggcagctttgagaccatccatgtcgaggatgccctcggccaccagttcgcgactcgcatgggcaacgtcttcaccatcggcaaggagaggaagccgtgggtatctctccccaagggcaagggcatcaagctcagcatcattgaggaggcgaggaagcgcaatgccgaggctgccgctgaggcttgatttctgaaaatctccatgaatgaaactgttgatttgagcagtctatttatatagattatttagctcttaagatcatatgtccattggagaccgtcaattggcgcttcattgttcgatacttgtcgagctgttttgaaactatgaattcatcatctgttaccttcagcataatagatccagaatccttttttagcttgtgtaatctttcccaaatgagaagctaccttgcatactgaaatgaattccacatgatgtttggatttgcaagttcgtatttttgggccctcttttatgggttgtgatggtcaacgttaccctgatacggctacaaagcgacgtatctgtatctgatacggcaacggatacgttccggtacggacggatacggatacgttccgatacgtattcggtatgtatcccatatatttgtgatttcaaaaaaacaaaataaattgagatacgccagcgatacggccgcgacgtgcctccgtctacgctcgcatcagggatgcgccgccccatacgctcccatcctgatggctgtctctcgtgcgtgcccggcaatgccaccggagacgccggctgcagccgcgcgcttggttgccgtgcgcgggccacaacgtcctctccgcgagacggaagagctgccgcggctgggcggcggcgcacctccttcgccgccaacctcggaggccacgaccgttgccgggcatagcggaggccggtggcaggctggccgctggcagcatcaaagcagggagctttttctttgtttgcttgactgcctggccgggtaaatccatgctctttgaacgtttcttgcttgaatctgttgtgcctttcatgtttttcttaggacaaagtaccgtttttgttagatacaagtgctagtgcatccagcaattctagtggttactggttagtgcggctgctaatgttgatgcaaagtcatcaagagttatatgattgaactattaatacgtggtttttgggatcttaatcgtttgttaatttgaattgcttatagaaaagaaaattgcaaaatattgatatggaatcggctactattagtattatatcgctatttctttataaaagctccttattttttttttgtatttttaatatatattaatgtaatttccttaattttttgtgtgttttcaatatatatatagacgtatccccgtatccttggtttttggaaaatgtcgtatctccttatcgacgtatcgcgtatccgtattcctgtatctgggtaacgtaggtgatggttgaacagcaaactgtgcatccaagtgaattccacatgatgtgcatccaagtgaattccacatgatgttttggatttgcaagttccacatgatgttttggatttgcaagttcgtatttggccctcttttatggattgagatggttgaacagcaaaatctatgcatccaagtgctggctcgagctttgggatcttggtttgggcaaagtttgaagaacaggatgcgctgaaaatttcataaactcctttatccagtgcatattcagagttatggattctatgtattcagtgcacattcagaatttgcacgagctgcgtgtaaaaagaaaaaaaattccgttgccgggactcgaacccgggtctctcgggtgagagccgagtatcctaaccagctagactacaacggatgttgtgctgtagttgatccctgggaatatatattaatgttttttgatcacataaacagtattttcgacgcgtattgtcgtagatacagcgtacaaataaatgaatgtattggttgggtcgcgttggatacgtacaggacacagcagcctaggctagtaggcttgattgacatgttaccgagaaaggcctatacggcgataatgtccatggatgaccgaccactcatctgcatgcgccgctgcctagctgcaccttcccttattattagccgaagcacctgccatggcctccctgttgctagtatatactacctcaatctcttctctactacttaaaaaataagaaataagagatgctttcatcgtccgtcaaaaaagccagacaaaaaaacaaaatttgtccgatccaaaaaaaaaaccgggcgaaaaaaacgtgcggaaaaaaaaaagaaaagaaaaaccaaatctgccctatccagaaaaaagaggcgaaaaaaactggcaaaaaaaaccaaaattgtctgatctaaaaaaaccggcgaaagaaaacgtctagaaaaaaagaggcgaaagaaaaccaaaattgtcttgatccaaaaaaaccgggcgaaagaaaacgtgcaaaaaaaagaaaagaaaaaccaaatctgcaaatctgtccgagccggaaaaaaggggcaaaaaaagaccgggcgaaaaaaaaaacaaaattgtccgatccaaaaaaaaccgggcgaaagaaaacgtgcgaaaaaaggaaaagaaaaaccaaatctgacgcggtaaaagaaaattcgggggaaaaaacgaatctgtctgattccccaaaaataattgtctgatctctactattataaaaactagcattgtggcccgcgcagattgcgcggctagcatcattatattttctctcatataatagcatatatgttttctcattatattattcaaatatattaaaatgacaatataattttaaattttgcaataactctacaaaactactaatgtgtaatgttcatattatattttatatacgtgttagttattaattatttttaatattaaattttagttattcgtaaattatatatattcctatatggattctagaatcgtcttttaatatttctttttttagttccgaattttctgtaaattgtatttctatatagactctatgctcttcttccaatattatttatttttatttcttaattttcatattatattttatatacgtgttagttattaattatttttaatattaaattttagttatttgtaaattatatatattcctatatggactctagacttgtgtcagggttatggataccacattcctaatagtagttgactaaatctcggcaggacccaccgcataccatgtcctatatggaaacaacctgcggatataggaggagttccggataaggaaagacaaccagagttctacattgaaacgacaaggactactcggattgtatccatattggtttccttagttctacttggacaagggaacacctatgggtataaatacaaggctccctaggaggagaggggacacaatacacacccgccatggaagagacccacaatcaacatacatggaacatagatcaagacagaagatcaacatacaagccaacatacgccaagacaagacgtcgggtatcgacttcagggataagcacggctagtcccttacgttgtctccggatactgtcaggagagacgaaagcgctatctttgatctcgccgggcacgaactcgaggaggaagactaccctgttgtcgactatgagtcagaattacagaccgctatgtcgacaacagttagataggctaccccaaatattgtactggtgtgattatgatgaataagagcaataccggcttcggccaacaggatgtagggttattacctgacaattcaggggcccgaacctgtataaaaatcctcgtccccgtctcttttacctcagtcttatgtatatcctagtaccaacgattcccataccatgcaaatactggaatcgcgacatcaaacgtcgacaacttgtcttttaatacttcttttttttaataccaaattttctgtaaattgtatttctatgtagactccatgctcttctttcaatattatttatttttatttcttatatttcatattatattttatatacgtgttagttattaattatttttaaaatcaaattttagttatttgtaaattatatatattcctatatggactctagacttgtcttttaatatttctttttttaattccaaattttctataaattgtatttctatatagactctatgcttttcttccaatattatttatttttatttcttaatttttattatttctaattgtatttctatgtggactctaaactcatctttcaatattctttattttttaatttttgaatttcagttactttgacggagcttgggctcctcaccgggagaccgcgcaggcccctctttgccggttcggccgggggcgctatgtgaggttcttcgccctcgatctaaggaacgtcagcgagaagaatcgcacaagacacgggcgacatagacaggttcgggccgctgagaagcgtaataccctactcctgtgttctggtggatctgagtgtgaaggaatacagagagctggagagcgagagagagttcaggctttcgcctctattcgccagcctccctcctctcctaggcctgggcctcctttttatctagttaggggtcaccacatgggcctcaagctgcctaaaaaaagaaacattccttttacaatgagggctaatctacagccggaagtgacctctgacaagcacagcacacgccttctgctccgctcgtcagctctcccggtggacgcccctttcaaccttcattcaatggccagcgactttcttgccatgcttgcgctgaagcctggcatggatctgaccgggactgacataccaactccaggagtcagcacgccggctccggctagggacgagagccaggaagctctcatcattccgacgggacggggcgaggcgtgtgacaggccgcctgttgccacctaacccgcaatctgaccggtctgtgaccggtcacataccgcgactggtcacggaccggataagcatgcgctgcgccgtattgaatacggcgcggcgcgctcgtctaacccgctataaatgcggttaggtgagcgccgctgtgctcacctaacccacacacgtggcgccaacaccacagggggtcggggcgccccagccctcggggccgaaacgggagcggcccgacccctcggggagacagagggaggggtggccacgtcaccctcgggcccgacccccccgagggggtcgggccacgtgggtgatcgcggctacccaagcctctagtcacgatacccccgcccctatgtcaccgacagtagcccccggcgttacgccagggcgaccgcccccctcgagggaggcgctcgggcgtgacgccactccttaggcccggtgacaggtggggccggtccccgcaggcgggcagaaacccaacggtcgcaaatcgcgcgcatcgggacgagccggtttgtttcgcctggggacatgatgatggcgttttttgcggttggcgagcgcagttaatgcgcgcacgatctgccccatctcaaacgtcacggctgcacatctgccgcgtgcgccgcaaacgggcgagtggggttagtggtggcgtgggtgcgagaaacgagggggcgaggtagtgggcgcgggaaacgaggagccgggcatagcgttggcaagggtacaaagacgccaaggaagggatttgtttccttcctctcgccactcttccccttgccttcgccacttgcgctctgactctttgtttcctgcgccctacccttgccgtactcgctcgctctcaagctcctcctccgccggcgtcatggcacggggctccgcaccgctcgacggtagcgtgctgccgccttcccgcatcgtgagcgagaggcaggccgggctgccgcgccgattcatgccggaatctgccaccggccgggaggtggtcgcgctgggcgagggacacccggcgccacactacccagggcggtccgtcttcttcctctctttcgcaatggcggggctggtcccgccattctctatttttttcatggatattctggagttttatgatctccagatggcgcacctcacccccaacgcgataatgacgttggccatcttcgcgcacctgtgcgagatgtttatcggggtgcgcccatctctccggctgttccggtggttcttcaccgtacagccggtgtcgccgccgacggtagtcggtggctgctacttccagccgcgggggcaggtgttgaaccgctacattccttgcgtcctccgcaaaaagtgggacgactggaagagcgattggttctacacccccctcgccgacgaagcgcgcctccgacttcagagccagcctccggcgcaggcctccagctggcgggcggcggtagatctgggagacggctacgacgccgttcttgaccgcctggcgggtctgcgatcccaggggctcacgggggccatggtgttcggcgactaccttcgtcgccggatcgcgccgctccagcggcgcgcccggggcgcctgggagtacaccgggcccgaggactacatgaggacccaccaggggcgcaaatgggactgggaccctgaggacttcaggatggtggtccaacgggtgctgaatctcagctccgtggaggcatccctcatcccccaaggggtcctccccctctgctgcgatccagagcgcgccaacatcctgaccatcatgcaggaggtcggggcgtcgggggagcgggtcccccgtggccacgatggcgcgggagggagccgcaggggggaacaatctaccccgggagggggtcgtgcttctgggccccgcgacgggggcccggggggcagccgccctgccgacgcccgggggaagaggaagcaggagggtacccctcccccatctcctccccgagggggcggggcggtgcgtgccagcagcaggcgcccggagggtgccgtgccgacgccgcagcccgagggggagcgaaagaagaaacggccccgcaagatgggggggaccgagccatgccgggggaacctcatctcacccctgaggtggtcgtttagccgacctccccgcaggttcgtccccgcgctcgccgcggccgtattcattctcccatctcccaaggcgagttttcactcacccgtttctttttgtcttcttgtttttcttctgcctcagcgagatcccgtcacgccccccccgccattccaagtccggccggtctgaggccgaggagacggtgaccgcggaggcccagaggcgggaagctgaccggcgagaagccgtggaccgcctccgggaagccgaggaggctgcccaggaggccgtccgggttcgccaggctgaggaggccgctcgggaggaggccagactccgccgggccggggagtccgtccgggaggcagaggcggcgcgcgcatgccaggcggcctgccaagcccccgacccgactccgcccgaggcgacgacgacttccgaggccacccacgatgaggccgcgggcgcgccgctcgggcccgacccctcgggcgacgcttgggacgagccagcttcgggggacgcccccaagtccggcacgtcgatcggcgggccgagccgcgcggcacccacatcgaggcgactctcccctctgccttccgctgccccactgagcacggagcccctcctgcaggtcttggccaccgcgaacagcacggtgctggacgggttaactgcccagatggaggccctgcaggcggagcgggcgcagctcgacgcggcgtgggcgcgcgtcgaggaggggcggcgctcggtggaggccatggtggaggcgggccgcaaggcacaccgccggcacgcctcacagctcgaggcccgtcgtagggacctggcggagatcgccagggaggtggaggaggagcgggagactgccctcatcaccaccgccgtgctcgacgaggcgcgggacgacctccgcctaccatacgggagccgggcggcggagctagaggagaagctcgacaccgcccggggagtccttgacgccgccgcttcccgggaacggcgggcggcggagaacgaggcggcgtcccggcagcgcgatgaggcccttgagactagcgccacggcgctggaggagcgcgcccgcgccctggacgcgaaggagagagacttggcggaccgtgaggccgccgttgccacccgggaggcaacactggcggcgcacgaggccacctgcgccgaagaggagtccgcactccgcctccgtgaggacgcggtcaccgagcgggggtgagctctcgaggaggccgaggccgcggcgcagcgggtggcggacagcctgttcctccgcgaggcagcgcgggaggagcaggcgcgccgcaatctggaaggcgtccgcgccgagagggccacactggatcagcgggccgctgagctcgaggcgtgggcgaaggagctggacgcgagagcgcacagcggcggggcggccacgggccacggcgacctagccgcccgcctcgcagccgccgaacacaccatcgccgagctgcagggcgcgctggactcgtccgccggggaggtcgaggccctccgcttggcgagcgaggtagggcccggcatgcttcgggacaccgtctcccgtctagaccgcgccgggcggcaggtgggcctctggggcgggcggtacgcgaagtacgccgccaaccaggggggcctcgcccagcgcctctcagagatggccggggtcctcaagcggctccccgaggagctcgaggagacgatcaagtcatcctcgagggacctcgcccggggggcagtggagctcgtactagcaagctaccaggccagggaccctaacttctccccgtgggcagcgctggaagagttccctcccgaaaccgaggacggcgcgcgcgcaggtccgggacgccgccgaccacatcgtctacagcttcgagggtacggcccctcggctcgcgttcgccctcgactccgacgaggagggcggtgacgacggtgcggacgacagcgacgacgaggccggcgacccgggcgcatcggagtgatcccccaggcccccgccaatcttaataacttttccttctttttccgaggccttcgggcccccttcttgtatagactgatttaatctgtaatcaaataaagaggaaatttctacgtcagttatgtttgttgtgtgtatgagacgaggatggtctgtgccgcggtccttctgtgtcttggcttgaacgagggctcgtgcctaggtcccagcctcaagcggcgcgggtcggggctagtgcctggggagatccgcgtgtcgagactggccaggccgggagcgtggtgatcgagggttatggatgaccctattgtgggcctttgccgatttccccccggagttcaccacgccccggggcacggctcggttctgggccccgtttggcgattttagccggcccgggccactgagggcagggttgagcacgagcgtgctaattcaagccaagattcttcaaaaggaaacgatggcacagacacagtcctcaggaaatcgaaagtgcttttattgaaatacggaagggagaaaggattagtatatgcatgtggtagcccccggccaaccctgcacgcccggggggggtgcggggttggcccgagcccgagacatgacacccgacccccactaggggtagaagcgacgaaggtgttcgatgttccacgggttaggcagctctgtgccgtcgcccgtggccagccgaacggagcccggccgggggacgccgatcactcgatacggaccctcccacattggtgagagcttgctcagtccagcacgcgtttggacgtggcgtaggacgaggtcgtcgacgcagagtgatcgggcccggacgtggcgctgatgatagcgccgcaggctctgctggtagcgcgcggctcggagggccgcgcgccgcctttgctcttccaaatagtcgaggtcgtctcggcgaagctgatcttgatcagcctcgcaatacatggtgacccgaggggacctcagggtgagctcagatgggaggaccgcctccgcgccgtagacgaggaagaaaggcgtttccccggttgctcggcttggcgtggttcggttcgccctgagcaccgctggcagctcctcgatccacgagtcgccgtgcttcttgaggatgttgaaggtcttggttttgaggcccttgaggatttccgcgttggcgcgctccacttggccattgcttctggggtgggcgggggaggcgaagcagagcttgatgcccatgtcttcgcagtagtcaccgaagagctcactagtgaactgggtgccgttatccgtaatgatacggttaggcaccccaaaccgagcagtgatgcccctgatgaacttaagcgcggagtgcttatcgatcttgatgaccggataagcctcgggccacttagtgaacttgttgacagcgacatacagatactcgaacccgcccggggcccgcctgaacggacccaggatatcgagcccccagacagcaaacggccacgaaagaggtatggtctgcagggcctgggccggctggtgggtttgcctggcgtggaactggcacgccctgcaccgccggaccaggtcgaccgcatcgttgagagccgtcggccaatagaaaccctgacgaaaggccttgccaaccaaggtgcgtgaggcggagtgggctccgcactcgccttcatggacatcggcgagaagctcgacgccttgttcccgaggaatgcacttcaggaggactccgttagccgcgcgccgatagagggtcccttccaccagcacgtagcgcttggagatgcgccggacgcgttcactcccttcgcggtcctcgggtagagtcttatctgcgaggtacgcctggatctcagtgatccaagcaatcaatctaggggaactgggagcgctcccctcgggtcccgaggcctggactccgacgggcctcgagggccgttcaggcgcgtccgtctcccctagggggtcgggtcgcgccgacggctgggcaagcctttcttcaaaggcgcccggtggggtctgggctcgcgaggaagcgagccttgagagttcgtcggcgaccgcgttatcccgtctgggcacgtgccgaagctctatcccgtcgaaatggcgctccatacgccgcacctggcgtacgtaagcgtccatctgcgggtcagagcactggtactccttacagacctggttaacgaccaactgggagtcgcctaacaccaggaggcggcggatccccagtccagctgccactctgagtcccgcaaggagtccctcgtactccgccatattgttggtcgcccgaaagtcgaggcggaccaggtatctgaggacgtctccgctcggcgaggtcaacgtgacccccgcaccggcgccctgaaaagacagggagccgtcgaactgcatcacccagtaggcggtgtgaggcagctgcgaggggcccgagctggcctcgagggcggagacgggctcgggagctggggtccactccgccacaaagtcggcgagggcctggctcttgatcgcgtggcgtggttcaaagcgcaaatcaaattcagagagttcgattgcccatcccgccaccctggagcgcgcaggagcgcgcccgcagcctggagcgcgccctggggcgtgccgccattgccgtagacgaggcggcgacgcgccccgtctcgccgtcctcccccgtcgcccgcgggcggcgaagtcacggatcctccgacctccccgagcgcctccccacgcccaagatttcggcgagagggggacggtggggtgcgagcccgacggcgcgggttctgctccccgtcgtcaccgctagcgctcggagagaggctgtgggccactgcccgttcggccattgggctgagcggaagaagcttggcgcacacgaaagaggacgagggctcagaaagacacgcgcgccccctacctggcgcgccagatgacggagcttggggctcctcaccgggagaccgcgcaggcccccctttgccggttcggccgggggcgctatgtgaggttcttcgccctcgatctaaggaacgtcagcgagaagaatcgcacaagacacgtgcgacgtagacaggttcgggccgctgagaagcgtaataccctactcctgtgttctggtggatctgagtgtgaaggaatacagagagctggagagcgagagagagttcaggctttcgcctccattcgccagcctccctcctctcctaggcctgggcctcctttttatctggttaggggtcaccacatgggcctcaagctgcctaaaaaaagaaacattccttttacaatgagggctaatctacagccggaagtgacctctgacaagcacagcacacgccttctgctccgctcgtcagctctcccggtggacacccctttcaaccttcattcaatggccagcgactttcttgccatgcttgcgctgaagcctggcatggatctgaccgggactgacataccaactccaggagtcagcacgccggctccggctagggacgagagccaggaagctctcatcattccgacgggacggggcgaggcgtgtgacaggccgcctgttgccacctaacccacgatctgaccggtctgtgaccggtcacataccgcgactggtcacggaccggataagcatgcgctgcgccgcattgaatacggcgcggcgcgctcgtctaacccgctataaatgcggttaggtgagcgccgctgtgctcacctaacccacacacgtggcgcccacaccacaggggatcggggcgccccagccctcggggccgaaacgggagcggcccgacccctcggggagacagagggaggggtggccacgtgggtgatcgcggttacccaagcctcttgtcacgatacccccggccctatgtcaccgacatacttctaaattgtatttctatatttgtatttctatattgaccttaaatttttcttcccatgtttttcttaatttcgaattttagttatttgaaaattatatttttatacggactctaaactcttcttttaattttattatgtttattccaaattttagttagttttaaattcctatatggactctatactctacttctaatattccttattttttaattccgaatttctttttttttcttaattgtatttctatacggactctatactctacttctaatattccttatttttaattctgaatttcagttatttcctaattgtatttctatatggactctatactctacttctaatattccttattttcaattccgaatttcagttatttcctaattatatttctatacagactctagtctactattctaatattccttattttttaattccgaatttcaactatttctaaattgtatttctatatagactctagtcttctcttctagtattccttattttttaattccgaatttcagctatttctaaattatatttctatatggactctgttttttcttttttctaattaatgtgagaatatctaggccatgagagcgatcgtggagactcctttttctattcctttaataatataatagattaaagatgcttccgccgtccgtcatccgtgtttgaatcagttataaaaactaaagatatttccacggtttgtcatccatgtttgagtcagttttgcaaaaaaaaaaaagctaaaaaaacaaccgagaaaaaaagtccgactcccctacgaaagcggtgaaaaaaaagaaaaagaataaacgtagatccaattccaaaactggaaaactaaacaacgaaaagtcgggaaaaaaagcgcggcctctactaccagtccaaataaaaaacaacctagaaaaaaagagtccgattaaaaaaagaaaaggaaaaccgtagatacgattgcccttaaaaacagggaaaaagaaaagagaaaagtcggaaaaagagcgcggcaaaaaggaccgattttaatttgttttagtagtatgtatatactattctctatctctaatctaatctaatcttactatgtacaaaaataagttttcatcgtacatttaaaaagaaaaatacgtgacaaaatgaaagcggttaaaaaaatatgtgagaaaaaaatgtcaattaaaagcgcaaaagaaaatgtgttggaaaaaaaggtttccttcatccgtaaaaacaaaaaaaagaacgagaacaaaaaagggtttccttcatccttaaaaaagcaaaaaaaaacatgcaaggaaaaaactatcagaaaaacacgccatttcttaaaaaatggtttgaaaaaatcgcgcaagaaaaaaaataccatttataaaaatacaatccgctctaagaaaacggttagaaaaaaaagataaattgatgaacgcttgggtcggataggatccatcgggttttttccatctcctctacgatcgtcatttattctcatgtattggagaccctgcgtatctctgtaggcaattatcaaactatttttgttaagtatagctactattcttgataacatattatatggaaataatattaaaaaataaacatatttttaattgttatttagagaagagtgctcaatgactctattttgtgtagacttggtcatgcgagacagggtaggatttaattggtcctattattggttgcaggaatgagattgaaagagtattttagattatatgtatgttgccacatgaataatccaattattttagataaagcaaacatcggtaaagttgccatcgtcgaggttgggctattatattgaagatgttccaattttctgattgtcttagctacaaacgatctatacaaacattgccattgacatggttatgcatgaaaaatgtatattatcattagaaatttttcacctgttgcaacgcacgggtatttttgctagtctaaaaaaacgaacctagaacttgatgtgccacatcatactataacgaatctggataaatatatgttcaaattcatagtactagaaaatgtcacatctagtactggggtgtagtactggggtgtatttagttcacgcaaaattagaagtctagttgaaattggaacgatgtgacgaaaaagttgaagtttgtgtgtgtaggaaagttttgatgtgatggaaaagttggaagtttaaaaataaaagtttggacctaaacaaggactaggttggtttttttaataggacggagggagtactctgtaggtttcaaaataagtttatttttcgccaattcaacacataccaatataaaactatacgaaccaaaatattcttactttatcaaatcgtattgcaataatcttttaatttatttacttcctgatatatttatctccaaattttataaacttcgatgtaatgattacttaaaacaaatttattttataacaaacgagagagagaaaaaaattaaacttagggcccctttgaatcaaaagatttatgtgcgaatttcataggattcaaatcctataggaaatttttctatttagccctttgattcaaaggattgaagatgtccaaatcctataaaattcctatgaaatgacacattgcatgtggattttagagaaaatgtagcaagaacttcaacctcttggaaaatttcctttgagtctatcgctctcctccgatttctacatttttcccgcgctccaatcaaatgacccgttcatgtgttttgcaattctctgttttgcacttcaattcttattagaattctgtattttttttctatttctctattttttcgaccctatgattcaaatggccccttattatgatacgaagggagtactaccagcttccttacatttgacatgaccattcttgccctgcttggagtgcagcacaactgcacaaggcaaatactactggggctctattggagtatagacttctactcctacttgagttaaatctaccacattattcttttctctgtggttctgatcacagatcaaatttaacattgttcgctactactaatgtatcagaatcctgttgagctcatggattcagtacgatttcaagtctgggtattaatttgattgtagataaaattcatcacaagaatacaagataatgcaggactctggaagggtggatcgttgagggaaaaaaaaggctgagaataaagtatgagggcgttcacagcgcaagtacgtggtgtttagccccacatcaagaaaccgaatattcgatgtcatatcgctaatatgtggagccaaaacaagacactcgttcttcgccttgctcgagggcttgcgagttgcaacacagggaggaacgcgcgcagccgcgttgtgaagggcggagccttacgcagcatggctttgcacatgcgtcggcgagtgaccccctccccccggctcaccgacgtggaacctgtattttagacccgtatctctagcctatgtggcactgtgaggctcctcaaactaatgtgactgtactgtgaacatcgtctagttaaatatatacaaacatatatatttttttcagaaacttttgggtattcacgtgatacccaagaaccctctggatctgcccaagcagcttgccaaggagctgatttgattgattttgccaacgtaatcttcatcgctacctaggaaaaaccgacttcttcgctggaaagaagcagcagctttgctcaacaaatggcaccaaactcaagaaaagtttcattctgaagacaatttttgaccgacgaaaatgcagcaagcaaagcataattaagcatcctctagtcatcagtcaaacgtatgctaccatgctgtcaggaaacttcggagttttgtaagtaaaccaacaactttggatcataacaggaagatggagtatgaaagagtactaaacagatgaagcatatcctcttcagtgatacttttcttgtgtctgaaacaacttggaattagacgaatggcccacaaattcccttttttttacttgatttgctagtcttactcgatcataataaatatagcaacatcaactacaaccggtcaatcgaggtttttgggcactgatcataataaacataatgtcaatcgagtaacatttagtttaaaataaaatactgctaacatttactagtacctggacaaggtatgcagaaagcaagcctgaaatctgaaatctgtactcctactggcctaccttatttaccacactgcttcccaagttctctgttcatgagggccctactatttattctccaggatctgggcccaccagccaggatagcatcaaaacaccctgtccatgatccaaattcatgcttctttgtactagcaaaacaccaatgtcgccttcatgtcctagacagggtttcaaaaaccgccgggggcccggttaccgccacccggcggtacggcggttaccggcggtaaccgcggtaaccgcgcaaaaccgcgacaaatttacaaatcgaaatttgaattcaaaaattcgggcaaaccgcgcggtttgacgcggtaaccacgcggtttggcgcggttaccgcgcgatgtgtaatgggttgcacagtaacgggccggcccatttttttttctttttccaattttcaaatttattctccgttttgctctcaaatttgaataaatattactcttttttgagaaatttcttcaccataaaacactataaatcaagcactaccttcactattttttttgatttttttctttttttttaaatttttgaatttggacgaattttattaaaccgtaccgcgcggtacgggtaaccgtacccccgcggtacgggcggtaaccgcggtaaccgcgcggttaccggcggtttttcacaccctggtcctagacaactgagacacaacttatcttccttggctgttcatgttcttgcagtttgcttcgtcagatacagtcatacagaacttaaatctttttttcttcacaagctgtgagtgttgtctttagctgtggatgcaagctttgtctgaaccttgtgtcctccttggtcattcatccattcattcatggtcatgcactatattccaagcttcaagctggtcttgtcagtggcctgcaacattaaatgcactttgccatgttagcttcagcatatccctgctgggagagaaaggtgaatccaccattgctgcctgcaccttcttgttgcttgctgcttgcattggccatgttcattcagtgagaaaatcagaaagagaaaaataagggacagttgaaagttgaaacccagttagttcattcatggcttcttttgttctcttctccgaatggaaacaaacggcaaaagggtttaccaacttgtgtgttcataatcaaggttaataatggaagttgcatagcattttggtggcaattagcatcacaagggatctgaatgcacttgtctgaaggaaaactgtatactacaggaatggatgcaggtttcttgcaagacctgcactgcattcagttgagttagatttgactataacagtacaacctcttgaatggatctggtaattagcacataattgataattgcatcgagttcgacagtttcaattggttaacttgaccagaactataattgcatatcattccatctctttcggagtttcggtctttcctagccaaatgattattgtcctccagtcttctctgaaatgatctcatatgcagtatttttttctgctgaacttcactcaaatctcatatgaagtataggctgtgtttagatccaaagtttagatccaaactttactccttttccatcacatcaacctttcatacaaacacaacttttcaatcacatcatatctaattttaaccaaaatccaaactttgcgctgaactaaatacagccaaagcataactgtattacccaaatctacataaagtgataaaagatcatgaatcgaaaaataattcaagaacctgttgttctagttgcaaatagtcatcaaaagctcaggcatgtcaccttacaaaatgttactacaacaagacctgccttttgctcaacatctcaagtgagagaatcatctgacaacaactaatacaacagctacctttgaaattaatttctacattagtagcaatacgacttaaacctgcttataatactagataagtttagcaagtctaaacatgtaatctgaattaattttttcgagcttggtttcacatgacgctgcaagagttggcgttgtcgtcgctgaaaaggtcgccgtaggagttcctcgccggcgaggccgcgctcctctgcggcgtcctctggccgccgccaccgccgccgccgccgccgccgtagtagtagtagctgtagtagccgccgtagcggtaaggcgacggctgagactgcgagtagtacggcgagtacgcgtacgagtgctcctgcggcggcgccggcggcaatggaggtggaggcctcgcggcggatgcaggacgcgcggcggcgtagtacgccgcgctcgagctcggccgcgccacgttgtagctcatgacgtgcaccggctgctgctgcaatggcgccgccgggaagtggtggctcgtgtggttgccctgcgttgatgccgccgccgccgccgccgtggccatggtggcttcacctgccttctcctctttctgctgctgcggcggctgctgcttccttctcctcttgggctcactgggctgctgcgccttgaccgtctcgacgccgccgccgccgccgccgccgtcgccggcgctctcactgacattggcgtcggtgatctccgtgccaccgtcttcagccggcgccacggcggcggcgccctcgccggcgaccttcttgggttcttcatgcgtcacctttgggtcgcttggctccgcggcgtcgccggacgccggcttctccggctcagccggctcgccggacatgcccggctcggcagcttggttcttggtttcttcttggcactgaccaccattgggttgctgctgctgctgctcctccggccattgctcggcgtgcttcccggccctcctcagcttccttacgagagtgtcggcgctgaccttgccggtgacggtgaccgtcgccttgttgctccggccatcgacgtcgcatctgtacacgccttcggaatcaacagagcacattattctgtcagttttagtcacgtttttctctgcttttttgaagtgaaaagagaagggaaaaaaaatctgtttccacagatgcttcgccgatgaaactactaactgcagcatcaaaaaatggggagctaaaaatgcatcaaaatgcaggtgatttgatttgatttgatacaaacgcacacaccttcaactctctggagcaccttcttcaccttcttcttgcatccctcgcagtggatggacactctgagagccaaaacctgcagcatgaatcaaatcataatcaatcatttaaaatatctctgattgagatgaaaaataaatgttctctctcattctcaacctcccagtggatgtgaatgcatgcagaaggaagacaaagtagtgagattgtgagtgagaatgtgtcgatgttggtagtctggtaattggtaccttgcattgcagagattctgaagccatggaggaagggaaggtatagcggtggaagaagggaaagtggccaatgagtgtgtactgcactgtcaacggcgcatggacgagggaggagaggttttatagcggcacggagtacctacctgtagttcagaacgccataaagaatcaccactgtttcatgtaaaattcgtggtacaaattttgtaagaaacttctttttttttattttacatattacgtgaaagacacgtacacaacaaaaaacaatgctgttttaaatggactctttgccgataaccgattatgtaacactagtttatatagcggttaactttataactcttttgaaacacattcatatgaaaatataggaatgtgccgcgtgtgtaaaatagaaacacgaaaaggtataaaaaacatttgactgattttttaatggttggtagggaaaaaataggaatactgagtattaagttaatagtagatctcaatgccttgatccatacaacttgaggccaaatatacttttagagaatgctgttgatcgggcgctcgggggagcgcagcaaaaatcgtcccccccccccacccgacgcgcgtggacgcccctaggaccccaccacccacactgccacgtgtccccaccacatactctattgtaataaatcacccacatattttagaaaaacctctattaggagatttcgtttaattttttgtttcgcctagtgtactcacaatgtttcactatgtatagatctaatgttgcaatgaactgaaatattttttttcaacaaatcactcacatattttggaaaccctctattaagggaattcgttttattttttgttccacaaaaaatgtttcatctagtgtactcacaatgtttcattatgtatagattaatgttgcagtgaactgaaatatttttttgctatttgctgaaacattgtttttatataaggtgaaacaacgtccgatttaaacgattaaaacattttcgatctacttagtgaaacaattccgatatacttagtagaacattgtgcaatattttaaaataattcaataataagctaaaaaaatcgtcggaatatatccttgtgtggtcttgtcttgaagatttaattgtaacgaatttaatggtgcaatcggatcataatttggataaataatttaagagaaaaattaatttaaagcggttttgtatgtatgcgtggcgctgatgtcatgctaatattagcgtccgatttttgccaatccggatcgggcgaccgatccgtagtctcctcctatatttatgtcatgacaacctattcctatattttttttagttcccacgtgtttttaaatcatgtgttctaaaagaaccctaaagaatttggcaatttccaaccttagtattccaaacaaccctcataggaaaataaatcctccatatttctcataataataatatttgcctccacccaacacgagctgggaaaaacatgagcgtggagtgggtttaacgggtctggatcccctggagttgagtataactctaccgggtggagttggccaaatctgtgacatccattgtttcctacagctgagatcattcctcatcaatttcacctaataaattaactccttaaattaatggttatgactttcgaggaaactttttttcatgcattttctctataaatagcgatttgattaaattctcaccaaaaaaaaaataatagaccagtgttttgttattgcccaaacaatagatataatcgatcaactctaaagcttcaagcagtctataccaacatgtatagtgctttcacatacagtgaaccatatcaatattaatgtgtgtgattttttatataatagatgaagcattaaattttttgctaattatacagtaaaaatgatctcatgacaagttgttgatgcaagtttatttgttgcatggtcagttactggtttttaagtacaaattaatgtggcttaatctcaacccttgaagtataccgaatggcacatgtttaaccaactacaaattaatgtggcttaatctcaacccttgaagtataccgaatggcacatgtttaaccaactccaccctgtagagttatatctaactctagggaatctggactcgggtttaacatttcctttatttttcctccggaatcacagggaaaggaaaattttatagcttttcttgtgttcattcctacgagaccagacagtcagacaatgccaacaaaaaaaaaagaagactaagaatgttggttatgtttcctgggattgttttatattccagagtttccattaagattgtgttagctgtagtgaatttcctcggtgtttcattatctgtcttccgcgtcatgccgttttgtctgtcatcacgggaaccggaatatccaactgtacaccaaaatatttaactatttatcacttttacacgtgatgtttaacaaatttacgactgaacttacatgtcatatacagtacataaaaccaatgccatatgaatgataaattattaaacatcaaatctaaaaagtgataattagttaatgctccgtccaagataggagatgatatatagggctgcagtgtggagcgtttccagcccacggacttgtttgctttgggaagcccatgaaatgtacaggcttctcctttggtgaatgcgcactctttctaagctggtagagttttgattttatataaaaaactaacatattaatttttaaatactttttgaaataatctttgaactttgtaataatttattccttttttactctcaaataattatcacaaatcattgtcttaaaaaacaaaaagaactcatcagaacctagtatttacgtacttctcatggagtttcctaaaacagaacagcttttcattcgattacccataagacattgattaattaatattgttgtaaccagctttgatatagtgatagttccagaagcttacccgaatattctttttttttttgcttatatactttctccgtttcacaatgtaagtcattctaactttttccacattcatattgatgttaatgaatctagatagagatatatgtctaggttcattaacatcgatgttaatgaatctagatagagatatatgtctaggttcattaacatcgatatgaatgtgagaaatgtaagaatgacttacattgtgaaatggagggagtagttcactaatccgttcgacaataagaccagcagtaggataagaaatccagacctccaaacgaaaattgctatacatatacgacctaactgttcgacttatatattactaaatttgatcaacggttgtaaatgactacagtgtatatggatatgctattctttcattaatctatggttacatgtttcgttgtatatgagttgtacaactagatcctatgtaattaccaaaataaacgaacaatgaaaatgaaaaaggttggaacttgttgctgattgctcataggatcatccataactaagtcagtctgattctttatactcttttttcaggccttgaggggagtcagagaccaacagcagcttctcatttcaagaatgcctacagataatgctgccattatctgttgagagtgggaggtgaactgaaacattgagtagcgatttggcgcatcaaaggaaagaataaatctaaacaagtgcttatcggattcattctcagaagctggttttttcttcggatttgatataaatgtgttgccatatttttcatgaaaaaaaatactccatcctttccaaattgatcatcatataatggaatccaaaatttctcaaattgattatcatataaccacatgaacacggatttcattaaaatacaattaatgccgcataagagaatatgtgcatgctagggtgtaattgacatgatgttttaattgatgcatgtattgcaggagaatgtgtgcatggtgtcttgattgatgtgatttaaattatccttagtcttgatgcataaacatatattccctccgtctctaaatatttgacgccgttgacttttttaaacatgtttgattgtttatcttattcaaaaacttttgtgaaatatgtaaaactatatgtatacataaaagtatatttaacaatgaatacaatgataggaaaagaattaataattacttaaattttttgaataaaacgaacggtcaaacatgtttaaaaagtcaacggtgttaaatatttagggacggagggagtatgattatcattttgggatggagggagtagtcagtatgtatttatattgtactaagtccctaaattatatatgtaattattaattatagtgtatctagaatataagttcctaaattatatgtgtaagttccaaaattacgtatgtaactctctaaattacatatatgtaattaattacacttgatttataatataattatatttgacatatttttacaaaaacctgtggccgtagatagttttctttgaaggagggtacacaagcatatggcacacacataccaaacctaacagatgcagttactgatatgatccatccacaccttctgcaagttcacgatttcaaggatgcatctcccatgtatcctgggatcacgcatactttgcagggccatgtatattcctgtagcaaaaaacaaaataatccaaccaaattacaggtttaatttcgagagcatatataaacatgggatcactcacgctaaattaatttttgtgctgtgcacgtacacgattgcattgctactgccatggctcacatgatgacgtcatcacccactgcctgcgttgtccttgctcttgcctttgtcctcctcgcagtgacgccgacgctctgctacgtcactgacggcgcgacgcggcggcgaggcgcgagcacgagccggcgccatggcgaagctcggacttacatcgtgctcgtcgagccaccggatgccgacggcgatgacgacgaggccgcgcaccgccggtggcacgagtcattcttgcctggcggtggcggtggcggtggcggcgaggagcgggcgtcgccgacgcgcatccgccactcgtacacgggggtggtgtctggcttcgccgcgacgctgacgcgcggcgaggtcgccgccgtgtcgaggaggcgcgggttcgtgcgcgcgttcccggagcggaggttgccgctcctgacgacgcgctcgccggggttcctcgggctgacgccggagcggggcgtgtggaaggcggccgggtacggcgagggcgtggtcgtcggcctgctcgacaccggcatcgacgcggcgcacccgtcgttccgcggcgagggcatgccgccgccgccggccaggtggaagggcgcgtgcacgcctcccgcgcggtgcaacaacaagctcgtcggcgcggcgtcgttcgtctacggcaacgagaccggcgacgaggtggggcacgggacgcacacggcggccacggcggccgggcgcttcgtcgacggcgtctcggcgttcggcctcgccgcgggcaccgcctccgggatggcccccggtgcgcacctcgccatgtacaaggtctgcaacgaccaggggtgcttcgagtccgacgtgctcgccgggatggacgcggcggtgaaggacggcgtcgacgtgctgtccatctccctcggtggcccgtccttgccgttcgacaaggacccgatcgccatcggcgcgttcggggcgatgtccaagggcatcgccgtcgtgtgcgccggcggcaacagcgggccgacgcacttcacgctgtccaacgaggcgccgtggatgctcaccgtggcggccgggtcggtggaccggagcttccgcgccacagtgcggctcggcgacggcgaggcgttcgacggcgagtcgctcagccaggacaagcgcttcagctccaaggagtacccactgtactactcccagggcaccaactactgcgacttcttcgacgtcaacgtcaccggcgcggtggtcgtgtgcgacaccgagacgccgctgcctccgacgagctcaatcaacgcggtcaaggaggccggcggcgccggcgtggtgttcatcaacgaggcggacttcgggtacaccatcgtcgtcgagaagtactacggcctccccatgtcgcaggtgaccgccggcgacggcgccaagatcatgggatacgccgcggtggggtcgccggccgcgtcccacaacgcgacgatcgtgttcaacagcacggtggtcggcgtcaagccggctccggtggtcgccgccttctcgtcgcgcgggccgagcgcggcgagccccggcgtgccgaagccggacatcatggcgccggggctgaacatcctctccgcgtggccgtcgcaggtgcccgtcggcgagggcggcggcgagtcctacgacttcaacgtcgtctccggcacgtccatggcgacgccgcacgtcaccggcgtcgtggcgctcatcaagaagctccacccggactggtcgccggcgatgatcaagtcggcgatcatgacgacgtccagcgccgtggacaacgacggccacgccatcatggacgaggagcaccggaaggcgaggctctactccgtcggcgccggccacgtcgacccggcgaaggccatcgacccgggcctggtctacgacctcgccgccggcgactacgccgcctacatctgcgcgctcctcggcgaggcgtcgctgcgggtcatcaccggggacgccgccgcgacgtgcgcggcggcgggctccgtcgcggaggcgcagctgaactacccggcgatactggtgccgctgcgcggcccgggggtggaggtgacggtgaaccggacggtgacgaacgtcgggccggcgagggcgaggtacgcggcgcacgtggacgcgccggggtcggggacgacgacgacgacgacggtgaaggtggagccggcggagctggtgttcgaggaggcgatggagaggaagacgttcgcggtgacggtcacggcgagcggcggcggcggcgcgggcggcggcgggcatgtggtggcggaggggagcctccggtgggtgtcgcgacgtcacgtggtgcggagcccgatcgtggcggacagtagcgtcggcggccccagccgcaggtcggcacaagatgcttaattagttgccgccttcggtttgatcaacactacatttatatactatcgtcaattaacccatgtcatcgatatttatacatttcaagaggtaaagtttacagcaaattgtctcgaagtttacggtcgacggtagttcgtttacagtgatatggtgccttgaatttttttttttcacaagacggtttgaagttccattgatagagcatgaaaatccttgaagaccgtaaccaggaaaaacgaaaaaattataccacctcccacacaccgatagcgctaacacacaagtctagaagaaggctagcactggaccagccgatgctgagcatgaccgaccaccgctaggccaacaacagaacacagtcgagatcgtccaaaactcgacccttaaatccaacacacagcctaactctatccatgtattcaggatttagggagagagggtgagagagaagttagaacacctcgaccccctaggccctccgacgtggttaacttgtagaaattaggacgctgccacaggaggatgagaatctagagtgtgcttgcatcaattgtttgggtggtttcggcaaggggatgcctggacgacctctccaaggagagaagcgacggaaaaccgccgtcgccatccgtcaaggtctcaatagagccgagactgggttttctcccggcaaccacccttgagggggtgagacggcacaacaacgccctcaggagggaggaatgacactcgagcgccattgttgtcggtccgaccaaggttgggctgggttttcacccgccatccaccacctgccaatctactacaaatgcaccaatgctccatctccatctaatcctccgccaccaatgttgcaccggcaccccccgccggcccgtcgtcacgtgttgccacctcaccgggctccaactccagtgacatcacctcccgctgcggcctcgatgctgctggccgcaactcctccgccgtgccagatgccggccgagtctcccagcctcaccggccatccacagccaccggcgcccgcgcatgccgccacctccgccactcacccaacacctcgaggaccatgggcagatgaaacacaacgaagaactttattgatttttgctatacaggacatgagctattggaagggaagatggtcatcacgggctcacagacaaatcaggagagaaaggaagagagaaaggaagagagagaaccagatgaatggggaataaaatattagtatttacattagctgatgttagaggctgtttattgtactactatgagcaggtacaatagcaggctataagccagctacaaacatattttaaggagataaatgaggagagagaagagaagcgggctacagatttgtagccagctgtagcacagactttaagacacagtgtgtgtatgacaggtgggatcaagtattaatagtgtagtatgtaactattgtatgaatgagctattagattggctatagataaattggagctagtagttgactatactattgaacttgctctacatgttaactactctgttgcctgttggcggtaaatgaggggtccatgcataggattgcaagtgggatgggttgtgggccgtcccgccccaccccacaccagccgcaaactgcatgtgcgggcaaacggcagcccgccccgcacggcttggcgggattgctcagcccgacgggcaccgctggacagcccacaatgtgcacatctctgtttaattaggttcatcaatcacacaagcacataactactccatatcccaaatttagcacatgaaaactgtattattttcatgtgaaagtattctttttcaatgacataacaagtatagtactgaataagaacaccattcttttccttcaacatcatgactaaagttagagtgatgatgatgcattttctcttcatgataaaccaactgtcccaattgacaaagtgacaaacaactgcttccagctccatgagctcttccggtctttttctatattaccttcaacacattaaatttaataaagttggagtggagaaactactaatcgaaaattagaaatgaattcatcaaccgactgatcacaacgttattccatattgtagaatggagtaaatatgtactaagtttcatcaattaagaatgcatccaaaatatgaattaaaggacataattgacaataacaagcagttatcgaggatagtgagatatataacctgctgctggttgttgtgctggtactgcatgttactagaggtgtataggcattttcacctgtataggaagaaacaatggagttaataaaaaagagtacatgctggactgttggatgttaataaaaaagaaacaatgatgttagtggtgtagtatacaactatacaaaaatatagaatagccaagttaattcaaacgaatctcaatttaaatacctgaatgttgcacattttggtcatcactctcagcaagatcacgtgcaaagaaatcacccaaaccttctgccctcatccaatcttgaaggcaaatcaatgcctctacagtactgcttgaaagtctacttctatagtcactaatgatcctttctccagttgaaaatgctgcctctgatgccactgatgttgctggaatagccaaaacatcacgtgccattcgtgaaatcacagggtactttgttttgtttaccatccaccagttcaagatatcaaaatcatacccatcttggaaatcaccttcctgaggcatatcagcaagatatcgaataagctcactctttactttgctcctgcttttgtcatgtagaaactgtctccaatcagcgaattgattacttgcatcaacattctgctcaacacttgtttcgggctgagaattgatgttgtttgagcccccatacttggcagaatattcatcaaacaatttctgcatattactcttgatttccttaaggtaaggagttacagcagctccaaatgcagacttcaaacgaaactcaatgaatttgtacttataccttggatcaaaaataatcgggaaacatatttgcaagtattgagcgtcccagtacttcttaaatttttctttcatttccttgacaatagatgcaatggtgacatcttcatttgtagcctccttgtccaaaaccatctttatcttccaaagttcatgaaaatagcaagttgaagttgggtacaacgtaccagatactgcaacagtagcttcatagaaaactttcaacaaagcacaaagcttctcagccattgtccattgataatcgaagggttgatgcaaataatttatgtcatgccgatccaaggcttcaaaggccattctgtgtcatgcatgtggttcgactttttgtgctcctagatggttgaagggaggcggcgctgcgggcgttgcaggaggaatgtgcgagcgtgctgctagctggccatggcggtcaatttgttggactaatcagcatagcacacaccaaatccgagaagaggaggagcagcactgcgtaaaaaaaatactccatctgcgaagaagagctagcacctaacgcagataggagcatctcgcaagcgatcgagacttcgagagcatggagccacagctgccgaccgtgatatcgatggagtgggatagcaccaccgagccggccaaatcgtcgccgccgtcacagaggtacggctacctggagaggatccgtaacttgtccgtcgtctcggccgaggccggccggtggtggtggccatgctcgtcgtcgtcgacggcgagatccagctactacagcagcagcatgtcaagcagcgtgtccggtactggctctcagaatcaacggtacgtctcttactcttcgccgaggatggtaagactcgacgtccatggtcctcgagacattgcgaggcagatggtgcacgatgcatgggttcatggtgaacttgatcagagacttcgaccgggagcccgaccatgcgctggagaggtggttctccgagctcgacgtcggttgggtactccggtcggcggcggagaaggagctagccgccaagctcggcttggatgatcttgtgcagcggtggacgcgaggatatgccgtgatggtcgaagcactcgtagctacgcagcaaaatatgaaatttcaggatcataccaatatggagctagaagacgacctccgacctctccaagtcactcggttcgtggaggcgaccgtatccaagatgcttgcctttgctgatgccctcgccgctgataacacttggcggccaattgacaagctctcgcggtcgcggctcatgtgcctgtgcacctcgatcaacgagtgcggcatacgaatcttgtcagaaataatagtatttgagtttgattgcatattcagcaaaatgaatggtgctttctcagccatatacaggatggccaaggatgctgaagccatcacttgaaagaccaagaacgactatagagggggggggggtgaatatagcaattcaaaacttgtccccaaaaatactcatcaagccggatttctcaaaattcttactagaactgtggctattagagaagccggatctagaaaagaagagagatggaattcccgaaactagaagtgaggtgaggagaagatagcaaaacttgtcatcgcaaaattcaaatcgcaagcgaaatttaaattgcggaatttaaaaggcgaagacaaaacgaaatgcttcaaatcatttcattcatcagtgttgcaaaataacagctcaactaggagcaaacatacaccttcagaggaacattaacacaaacttaaaaatcactcggacaaacacactccaaactaatcctaatacaaaagcctctcgggcaaacacactccaaactcacaccgaaactctctcaccgagcatctcaaaaggattacaaaaggagcaacctccacccttgcatccacctctctatttatagcctaagaccccctaaaacattgtcacaaatgcccttagggcgaaatcctaactcacatgcaatctgggccatacgttgttccttacatcctaaggaagtagcctggatggaagccacgtcgcttgccacaccaggatcctcttttcacaaagaatccgcaccaaattcctcccatgtgcgtgcccgcgtgctcctcaacgtgagccccgtgatccgtgagaaggctcctccgagccaatcagcatgcaccgatcgggagatcgatccgcgtcgtctccgtcttgccgaatcaaaacttgccacgttgctcagtagtgctgtgcacgtcccgtctccttttcctcagcgcgcgcgcacgctcgcgcccagtccggagccgccacgtgtctcgccgagccgctccgcgcgtgctcgcgaaaaccgcgtgggtcccacgcccgtgcgcgccgaattgcttgccgccgcgtgtccactgtgcgcgcatgcctcgtgcaatctcccgcgcttgcccgcgcatggtgccgatgccgtgggccgtcgtcttgtcttgggcctgctcggcctggcctccctgccagctgatccatccatcatcttgagccacgaggaagggctagattggcttggcctccctgccaaccaatcacaacacacatgcacccatgggctagcaagctcctcatgcacacatgcatgtcttgagcccgtgcatggcattcggccatgtgcacgcatgcataaccgaagcaccactccccatgcttgcatatgcacatgccagtgcatgtatgcaagctcctcttctattctccattttcttcgcgaacccggcacttgcacttgaccttgcgaactccgttgcgaagacctcctcacacggtgtccgtccaccgtgtgcaaccttgtgtccaatcttgtcacccagcatccttgatcgctctggacctcaacttctccctgagtctagtcccgatccgccgttgaccaagatcgaccccgatcacctgcacacacatgaaccaaacaaccgttgtcttggcacatatgtcgcaacctgaccaatgttagtccacacacatacttcttgcacttccggtacttgtcaatttcccatcactaaagaactataaccacacatggtttcacaatctccccgttgatgagaacaatgacaatctcaagcaacattttgaaaatttaattttgattcacaaagcaaaccattttgcaaaagtcgaactttggtcattttgaaatcgcgaaaaatcaagaccaagtgacaagaagaaaagggatgcaaatgcaaatgcaaaaatgctcccccttgtgccaaaactccccctttcaccaagatctaaagcaagttttaattttcaataagtgcaaatttctctccctctttgtcaatgatgccatcaagatcaaaagagacaaaaatgagatgaaacttgcaaattttagtgttttgagagctttgagagttatctaaaggcatcaaaaggtagacatggatcacacagatataaacatgtgctcaagcctagctaagcatgtgcataagaagtatgaaacatgtcatggatatcaagatagtatcggcagcaagcaaaaagctttcaagtgaattagtaatttagtgtgcaaagctatttctagaagaagcttaaaaggaagcaaaccagctcataatcaagcaagatttacataaccaaagcaatgaacccatgctaatgtgctaatgcccagttcataaagagtatcaacatgataacaaaacatagaacatgagcttttaaacttttctcataacttttatttttatgtttttttaatttctttaaagacaatagcacaatcacgacggtccacctgatcttatcagtcagcaagtcatggttgtgccaaacactgccgtctgacctcaatcaagttttccagctagagttcccattacaggctgtctcagtgctatcttcggtactactcatgcgtaaacgcactcagtagcccgaacaaaaacagagataaagcttgtaaaacatgattgatacaaagtatgaacacataagcatgagcattcatgagcatgtactgacagttattgcaaaaagaatgtaaacatggcatgagtatgagatggatactttaacttaaacaaacttctagagcaaccattgcacattgattaagttcaaatgaatagtcaatttaagcaggtttcaacaagcttgaacagcataacatgatcacacaagctacttaagaaaatgaaagctagacaagagatcaaactagcataagagtgatacatgcatagcatagtgatgaccaagagataacaagcaaagctcaattgaagagtgtataatacaatgcataaagtaaacatgatgcaatatgttacaaatgcatgcaaaagaaaaacaattccccctcaaatcaagccataggggtggatcacccctaactcactccgcaagaactcaaaacgagagcgatcaagtggttttgtaaaaatgtctgccaattgtttttcagattcaacaaactctagcacaatggtacctttctcaacattgtctcggagaaagtggtaccgtatctcaatgtgctggtcctggagtgttgaactggattttttgcaatattgattgcacttgtattatcacaaagcagaggaacaccagagaaagacagaccataatctttcagagttaaaatcatccaaagaacttgactacatgcactagcagcagctacgtactcagcctcagctgttgattgagcaacagaagactgcttacgagaggaccaagaaatcaaagaagtgccaagaaaatgacaagtgccagaagtactttttcgatcaatcttacacccagcaaaatcagcatatgaaaaagctcgaactgaaagggcagaagagcaggagtaccaaataccgtactcaagtgtagacttgatgtagcggaagatgcgcggaagatgcgcttgactgcttggcgatgtgatgctcttggagaagcctgaaacctcgcgcataggcacacggagaagtggatgtctggccttgacgcggtcaggtagaggagggagccgatcatgcttctgtactcgcgttggtcaacttcttcaccgtcctcatcaggaccaagcgatgaagtagttgccatgggagtggcgattggcttgcagtcggccatgtcgaacttcttcaggagctctttggagtacttggtctgaggtacaaagattccttccttagtttgcttgatttgaagtccaaggaagaaagtcagctctcccatcatgctcatttcgaattccctactcatcacatcagaaaactgggcaacaagtgcacgagaagagccaccaaatatgatgtcatcaacatatatctggacaagaagaaaatcaatgccactatgaagagtaaagagagttttatcaatggcccccatttcaaaaccattttgaagcaaaaaggttttcaatctttcataccaggctctgggagcttgttttaaaccataaagagctttatcaagtttgaacacatgatttggaaattttggattttcaaaaccaggaggttgtttgacatagacctcttcctcaataactccattcagaaaagcacttttcacatccatttgaaaaagcttgaaaccttttgaagcagcaaaagccaaaagaattcgaatagcttctaatctagcaactggtgcaaaggttttttcaaaatccaagccctcaacttgggtgaaaccctgtgcaaccagtctggctttgtttcgaccaattgaaccatcttcacctattttgtttttgaaaacccattttgttccaatcacattaaaacccaagggtggttctaccaaagaccaacaaactttgtttctttcaaaattttctaactcttcatgcatggcattaacccaattctcatcagataaagcatggcaaacatttttgggctcaaaataggcaacaaatgctaaattgacaagttcataagaccgatttctagttaccctttcacccaggcctccgatcatcaagtctggcggatgtcggttctggatgtatcggggagctgtcggtcctgatgtgccaccatcaatctcctcagctgctgaagatgatgtagttggtgcatctcctgaaggcgatgtagtcgaaggagaaccggtttcttgcactggtggtgaactgtctagaggtggaggaatggaatcatcgtcatcttcatctgaatcatcttctacaaagatagtctcatctgaaacacctgaaatttccggtctagctcttgggctagcctcttcaaaagtgacttcacaagtctccacaattttgttagttgaaagaacatacactcgataagcccgagaatgagtagcatagccaagaaaaatgccatccacagatcgagattcaaacttgtccaaatttccaggtttaagaa

SEQ ID NO: 8655 - DNA, 2610 bp, Oryza sativa
aaggacagctcccgtccggcatgtgcaggagcaggacgacgcagccggtggcgccggaagggctcgcggacatcgccacccggcggtacatccaccgcctcgcccgccgcgccatgacctgcctgacgtcgggggagccgcccggccgccggccgaagtcgacgtcgtacgcgacgccccggcggccgccgtcgccgggggagaagacgaacctcctgcccctgacgcgcccgagcgccgtggccggcgggagcgcggcgcgggcgccggtgagcgggttgagaaggtaagggttggcgtccctgtcgcttgtgaacagccacccgtgcgccgaaccgacgacgccgctggccgcctcctcgtcgaggaggggcacgcggaagtgggcgccggtggacgacggcgagtagaggcggacggcattgtcggcggcggcggcggcggcgtacagcaggcagggcgggtgcggcggcgaccggaggccgaggcggcggaacgtggcgaacgccgagtgccacgatctgcagacggcgccggagtggactaggtcggggagttgcatcgcctccatggcggtgagcaggaggtcctccggcagcccggaccaatcccggaagtcgtcgccggcggcggtggacgccatcgtaagttcgtgaccggcggcgagtcgcgtcgcatgcataaaactcggcgtcgtgtttacttcaaaactcaactggggctatgcgcgttggattcggatccaaatagaaaggggaaagttcaactagactccctcaaatataggtcgaatttgattcatacccctcaaccgcaaaatcaggtataacaacgcctccaacagtttaaaccgtacaaaacgactcctaaaccggtttttatatatggtggttttctatgacatgacacatcgaccctggtctttggcatctatataggcgccggcgaggctgagcaggcaggaggagagacgagggaggtggtaatgccaagtcacaagcccagcatagcgttgcacgcctatgtcttcatgacgttctacactggcttcgacgtcgtgcaacaccgtcggtcttggtgggtgccaatattgaagaatgtcggaatggtgttgcttgcttcgtctttttcttcttcattatcattccctctcgtctctctccccctatctcctctctctcattacagtgagcccttaccgttcgaatttgggattgtgctagattgcatcaagcagagatgaacaaaacctgttctaagtccaaaggatttttctttgacttcttcctggatcaaaagatgcaatcaacaacggcaattgtcgtagcaatgccatcatggtctcatggatgctagagacaggagacgtcattctgcttccgtcctcactgggagttgacgcctggaacggtgagcggaagattggggggaggatggtgtcaaggcggcactagaaggagaaaggagatgggacagctacaagaagaagagaagggtagctgacggagcgtggggctcctcaccgggagaccgcgcaggcccccctttgccggttcggccgggggccctgggtgaggttctaagctcttggtctgtggaaagttcgcgagagtgaaatcacacaagacacgggcgatgtatacaggttcgggccgctgagaagcataataccctactcctgtgttttggtggatctgtgtatgaagaagctacaaagcgcgagccagcccccgatcgttctgggattgtttttccccccttcaatcccctttctaagtgggcaaggtcctccttttatacctcaaggggataccacatgcaccatctctctcttttttgtggggacttatcctattttattcataaacagacggagacttgtatggttgccgtccgaatgaccttctgacgggaccgcccatacctacctccacttccgccggaagcaggcgcgacgtgggaacatggctgtctgtcgcgcccagaagttcttttccctagcaaaaattcaattaataaatggttggaagaaattatttctttagaggcaagagagaaaccctaaattaataaatgcaaataataatcggaatcggcatgtggaatttttcttggattctacatgtcaaaatatgctaacaggatttttagtggaattttcagagcattggaaataattttaaccaattaaaataagcaaagtgcaatattaaatccctgggaaaatcctttttccttttatcttttcttttccctcctttttccttttcttgggccgccggcccatttcctcccgcgccggcccgctcctccctcccactcccgaagttcacccggcctccctctccctctcgggcgctgacaggtggggcccacctgtcagccctttccctaacctccggccgcccacgcccgcgccaaccgccgtcgaaaccaccgcccacgccgccgcgtatcccgctgctcccgcgcccactccgcccgtaccgcacgcccacgtcgccgcccactttccccgcacctcccgccagctcgcgcgcccgcaaacggcgggggatttgaaatttcccccactctctctctcctcctccacctcctccactactccgg

SEQ ID NO: 8656 - DNA, 11193 bp, Oryza sativa
ggtcggcgggtttgaagccgagccggaccgacggggcgcctcgccgctttccccccccccttgtgacgctgcccggtgggtcccgcttgccagccgccccctctccctctctcctgtgcctctgacccgcgggtcccgcgtgtcggcgccacccctccttgtgctgacgtcagccctgggatgaattattgcgcaataaattgattaagggtttttcttttatagtaataaacacatataatcttctaaaaatcataactaattcaccctaaccaacgacaaatgggagaagatcaccttccgttccccagcgtcgcagaagtccgtagcgagtctgaatcaggctgctattgagggtcagacagaaacagtggagaaaagtcccaggaagttggaggatattcctatagtacaagaatatcctgaggtatttcctaaagacctcactacaatgccaccgaagagagaaatcgagttccgaattgatctggcacccgggactgctccaatttacaagaggccgtacagaatggcagctaatgagctagcagaggtcaagaagcaggttgacgaacagctgcagaaagggtacatccgaccgagtacttcaccttggggtgctccggttatctttgtggagaagaaagacaagaccaagaggatgtgtgttgattatcgcgcccttaatgaggtcacaatcaagaacaaatatccgttgcccagaattgatgacctgtttgatcagctaaaaggagctaaggtgttttccaagatagacctgcgatcaggctatcatcagttgagaattcgggaagaggatattcccaagacagccttcaccactcggtatgggttgtttgagtgcacggttatgtcctttggactcaccaatgcaccgactttcttcatgaacttgatgaacaaagtgtttatggagtttcttgacaagtttgtcgtggtattcattgacgacatacttatttattcaaaatcagaagaggaacatgagcatcatcttcgtctggtactcgagaaattgaaggagcaccagttatatgccaagtttagcaagtgtgacttctggttatcggaggtcaaatttctgggtcacgtcatttctgctcaaggcgtggcagtggatccatcaaatgtggaatcagttacaaagtggaccccaccaaagacagtttcttagatccggagttttcttggacttgcgggctattaccgtcggttcatcgaaaatttctccaagattgccaggcccatgacacagttgctaaagaaagatgaaaaattcaagtggtcagctgagtgcaaccaaagttttgaagaactcaagaagaggttagtctctgcaccagttctaattttgccagatcagacaaaagacttccaagtctactgtgatgcatctcgccaagggttgggatgtgtgttgatgcaagaaggcagagtggtcgcatacgcttcgcgacagttgcgtccacacgagaccaattatcccactcatgaccttgagttagcagcagtggttcatgctctgaaaatctggcggcactatcttattggcaaccgctgtgaagtatacactgatcacaagagtctgaagtacatcttcactcagcctgacttgaatctccgacagcgaagatggctagagttaattaaagattatgacatggggatacactatcatccaggcaaagcaaatgtggtagcagatgctctgagcagaaagagctattgcaatgcagtatgtaccgaaggcatgtgtgacaaattgcagcaagatcttgagcacctaaatttgggcatcgtagaacacgggtacgtagctgccctagaggcacggcctacgctcgtggatcaagtcagagcagctcaagtaaatgatcctgaaatagctgagctgaaaaagaatatgagggtcggaaaagcccgagatttccatgaggatgagcatggcacaatctggttgggagaaagattgtgtgtgcctgacgacaaagaactgaaggatctcatactcacagaagctcatcaaactcagtattcaattcatcccggcagtactaaaatgtaccaggacctcaaagagaaattctggtgggtcagcatgaggagagaaatagctgaattcgtcgcactctgcgatgtttgccaacgggtgaaggcagagcaccaaagaccagcaggtttactccaacctcttcaaatcccggaatggaaatgggaggagattggaatggactttataacaggactgccccggacatcatcgggtcacgattcaatctgggtagtcgtggatcgactcactaaggttgctcacttcataccagtacataccacgtatacgggcaaaaggttggcggagctctacctctcgagaatcatgtgtctacatggggtacccaaaaagattgtatctgatcgagggagtcagttcacttcaaaattttggcagaaactgcaagaagaattggggactcgtttgaatttcagcacggcttatcatccgcaaacagatggtcagaccgagcgagtaaatcaaatcttggaagatatgttgagagcttgcgctcttgattttggtggagcttgggacaaaagcttgccatatgcggaattctcgtacaacaacagctaccaggccagtctacagatggcaccgtttgaagctttatacggccggaagtgccgcacacctctcttctgggatcagacaggcgaacgtcaactgttcggaacagaagtgttaaccgaagcagaggagaaagtcaggaccgtcagggaaagactgcgaatcgcccagtctcggcaaaagagttatgctgataaccgccgaagagagcttacttttgaagcaggggattatgtgtaccttcgtgtcactccgcttcggggagtacaccgcttccaaaccaaaggcaagttggcaccacgctttgtgggaccatacaggatcttggaacgcagaggtgaagtcgcttaccagctagagcttccacctaatatggttggtatccacgatgtgtttcatgtgtctcaactgaagaagtgtttgagggtacctgaggaacaagctagctcagagcacattgacatccaagaagatttgacctacgtggagatgccaattcgtatcctggaaaccagcgagagaaggaccagaaacaaagtaatcagattttgcaaagttcagtggagccaccactaagaggaagaggccacctgggaaagagaaaatgaattaaaggccgcccatccgcacctcttcgccagctcttccgaatctcggggtcgagattccgtttaaggggggtaggtttgtcgcgcccagaagttcttttccctagcaaaaattcaattaataaatggttggaagaaattatttctttagaggcaagagagaaaccctaaattaataaatgcaaataataatcggaatcggcatgtggaatttttcttggattctacatgtcaaaatatgctaacaggatttttagtggaattttcagagcattggaaataattttaaccaattaaaataagcaaagtgcaatattaaatccctgggaaaatcctttttccttttatcttttcttttccctcctttttccttttcttgggccgccggcccatttcctcccgcgccggcccgctcctccctcccactcccgaagttcacccggcctccctctccctctcgggcgctgacaggtggggcccacctgtcagccctttccctaacctccggccgcccacgcccgcgccaaccgccgtcgaaaccaccgcccacgccgccgcgtatcccgctgctcccgcgcccactccgcccgtaccgcacgcccacgtcgccgcccactttccccgcacctcccgccagctcgcgcgcccgcaaacggcgggggatttgaaatttcccccactctctctctcctcctccacctcctccactactccggggaaattgcgccgttcccggccacgactcgccgccccccctcctatttaagcacgcccgcaccttcctctctctttttcctttctcggccgagccctcccgagctctccatcgctcccgcgcctctcatcccgccttccgccgctcgccgccacgctccggccgcactccgccaccgctagagccgtcgccgcaccgcgccgacgacgccgccgggttcgccagcttgtgcgccaccccgtccgccgtttccccggtcaatcccgccgccggagcttgcttctcctcgcgcgtcggtgagtaccccatggccgccgccttcgaccggcgaatccgctcgctgttaaccacccctctccctctaatacctcccatcttgttccctaggaggtctcggagctcgtccgcctatcgtcgccgttccccggtcgctcgccgtcgccgttcgccgtcgtcttccccccccacgccggccaactcgcggtgaggcgcccctccccctcttttccccttcctctccctcctagcgccgtgccgggccgagccgccgcttcggctgtgtgccgccgcctttgcgccgccgtcatccgccgtcgcttcccgcgcctccggttgccgtcgccggcgaccgtgcgtgcgcggcaccgccctcgccataaccggtcggccggtttgaagccgagccggaccgaccgggcgcctcgccgctttccccccccccttgtgacgctgcccggtgggtcccgcttgccagccgccccctctccctctctcctgtgcctctgacccgcgggtcccgcgtgtcggcgccacccctccttgtgctgacgtcagccctgggatgaattattgcgcaataaattgattaagggtttttcttttatagtaataaacacatataatcttctaaaaatcataactaattcatccgagctccgattaaatccattcaagtctcagtaaattcataaaaatgtgtagaatccattaaaaatggttttgtttcctgttacagtagtcttatagcatgttttgcttgtgtgctttgtttgtcgcgtagatttcggccgtttcgtcgattcgtggtttctcgaagacgttgctgtggttccatcagtgcgagagcaaggcaagtcatacattgcaattgatcatattgtacctaatttacaaatgtcccgcatttctattaaatattgcattgttttacaatatcatgtgggatgggtcctattactcagctatatgttgtttcccttatgccattgataacttgggtattaaaatgactagatgttggtttaggagatgcttagccatgcttagttcaactagtgcacaaaaggggaccacattaaagcatagacttgattattggcaatagctttggattagtgccaccgcaatggtgttggctaattaaaatacactacatggtgggctgtgggtgcatggttttgctagacgtgcccatggcgattaaggaccggttcgcgggatgccctggaagaacttatcgtacttaccacaagccagcgtgggcaacggctgggcttgtagtgtagcttttctctagccgacgtacccaagcgagggtgggcgtgatggagttgggtcggccggggtgtccggttgatcggcttccggattcaccgcggcacgaaaggggggctgcccgttgcctgctggggacgggggcgaaccctaaggtgtggtgcgatcggttagagagggttatgcgaagggtcctgacacggcctctttccggtatgtcgtggtggcatgtcggcgcacgggaacgtgtcgtggggctgtgtcttgtgggtacagttgtacacctctgatcagagtaaaactattcgaatagccgtgcccgcggttatgggcggtcgaccagattcaccgtgattagtttcaccctagttagcttttggaactggttagttcaggtggtggtttgggcctgttgcaacgtggtgtaacgttggacagtgattggttaatatggattaattactacaactgttttactgctttcaactactgttttgaaatgccggctttatgcaaaagaacctttagcctcccttggatatatcttgcatcatacctcctcttccggtatgacttgctgagtacagtgggtagtactcagtcttgctctcttttcccccacaccagagttgaagtccttctcagttgaagatgtctcgaagaggttggtttcgtcgctgccgtcaaggatgcctgtggaatggagtcgcccgctgcaggagtcaagccttcaggcttagctcgcttttatctttttccgttgcatttgtaatcttttatatttttgtaagacgtggatctgtatgtcaacaattgtcgtttgtgtaccctggctggtcctggacaggggtttaatacacattcagcttagaaattctggttcgtgaatttctgggcgtgacactgtctgctgacgacatgaccagtgtcagaccggtcacaaatcggtcattcttgtccaccacgcgtcagtttatcaatctgcatgttcgcccttcttcatacaatatcttgcctgtaatggttaggatgaagcctggcatatatctgaccggaaccaacgtgccatctccaggagctaacatgccggttccggctagggacgagtgcttggaggctctcgtcctgacgggatggggcgaggcgtgcgtcagaccgcctgtcgccacctaacccacgatctgaccggtctgtgaccggtcacagaccggataaacgagcgcgctgcactgcgttacatgcggcgtgacgcgctcgtccaaaccgcaataaatgtggttaagtgagccccgctatgctcacctaccccatatacgcggcgcaaaacccacaaggggtcggggcacctcggccctcggggccgaggcggtagcggtccgacccctcggggagacaaagagaagggcggccgtatcaccctcgggcccgacccccccgagggggttaggccacgtgggtgatcgtgtctgcctcaagtctctaagtcatgatactcccggtcccatgtcactgacagtagcccccggcgttatgccaaggcgatcgctctcctcgagggaagcggtcgggcgtgacgccacttcctaaggcctggtgacaggtggggccggtctaaaaatcgggacaagccggttcgtttttcctggagatatgatgatggcgcttcggtcggcgagcgtaattaacgcgcgcacgagatgttccatctcaactgccacagccgcatatccacttcatgcaccgcaaacgggcgaatgggattagtggaagcgtgggcgcgagaaacgagggagcgagatagtggacgcgagaagcgaggagccgggcgcagcgttggcaagggtataaagacgccgaggaagagatttgcttccttcctctcgccattattccccttgtcttcgccgcttgcgccctaactccttgtttcctgtgccctaccttcgccacacgcgctcgctcttaaacttctcttcctccggcgtcatggcacggggctccgctttgcttgatggtagcgtgctgccgccttcccgcatcgtgagtgagaggcaggccgggctgccgcgccgcttcatgccggaatctgccaccggccgggagatagttacgctgggcgagggacgcccggcgccatgctacccggggcggtccgtcttcttcctcccttttgcaatggcagggctggttccgccattttcttctttcttcatggatgttctggagttttacgatctccagatggcgcacctcaccctcaacgcggtaatgacattggccatcttcgcgcacctgtgcgagatgttcatcggggtgcgcccaccccttcggctgttccggtggttcttcactgtacagccggtgtcgccgccgtcggtggttggtggttgctacttccagccgcggggccggtgttgaaccgctacattccctgcgtcctccgcaagaagtgggatgactggaagagcgactggttctacacccccctcgccgacgaagcgcgcctccgacttccgagccagcccccggcgcaggcctccagctggcgggcgccggtagatctgggagatggctatgacgccgtcctcgaccgtctggcgggcctgcgatccctggggctcataggggccatggtgtacggcgactaccttcgtcgccggattgcgccgctccagcggcgcgtccggggcgcctgggagtacaccggatccgaagactacatgaggacccaccagggagtcagatgggactgggctcctgaggacttcaagatagtggtccaacgggtgctgaatctcagctccgtggaggcatccctcattcctcaaggagtcctccccctctgcagcgatccagaccgcgcctccatcctgaccatcatgcaggcggtcggggcatcggaggagcgggctcctcgaggccacgatggcgcgggcgggagccgcaggggggaacgatctaccccgggagggggtcgtgcttctgggccccgcgacgggggcccggggagcggccgccctgccgacgcccgggggaagaggaagcaggaaggaacccctcccccatctcctccccgagggggcggggcggcgcgtaccagcagcaggcgcccggagggggccacgccgacgtcgcagcccgagggggagcggaagaagaaacggctccgcaagatgggggggacagaaccatcccggggaaaccttatttcccctccaaggtggtcgtttaaccgtccccctcgcaggttcgtcccacgcccatcgtggccgtattcattccctcaacgcgagttttcactcatccatcttgtttgtcttctggtctttcttctgtttcagcgagatctcgtcgcgtccctcctgccattccaagtccggccagtctgaggccgaggacccggcgaccacagaggctcggaggcgggaatctgaccggcgagaagccgcggatcgcctacgggaagccgaggaggccgcccaggtggccgtccgagctcgccaagctgaagaagccgctcgggaggaggccagacttcgccaggccgaggcggcgacgacttccgaggcagctcgcgacgaggccgcgggcgcatcgcttgggcccattccctcgggcgacgctcaggacaagccaggtctgggggacatccctgagtccggcacgttcatcggcgggccgagccgcgcggcatcctcaccgaggcggctcttccccacgccttccgttgctccactgagcgcagaaccccttctgcaggccttggccgtcgcaaacaccacggtgttggacgggttaagtgcccaggtggagaccctgcaagcagagcgggcggagcttgacgccgcatgggcgcgtgtcgaagaggggcgacgctcggtggaggccatggtggaggtgggccgcaaggcacaccgccggcacgtctcaaagctcgaagcccgtcggaaggtgctgggggagatcgccaaggaggtggagaaggagcggggggctgccctcatcgccaccaccgtgatgaacgaggcgcaggacaccctccgccttcaatacgggagctgggaggcggagctagggaaaaagctcgactccgcccggggggtccttgacgctgccgctgcccaagaacggcggacgccggagaccgaggcggcgtctcgccggcgcgaagaggccctggaggctcgtgccatggcgctggaagagcgcgccggcgtcgtggagagggacctggcggaccgcgagcccgccgttgccatccgggaggtaacgctggcggcgcacgaggccgcctgcgccgaggaggagtgcgcactccgcctccgcgaggacgcgctcaccgatcgggagcgagctcttgaggaggccgaggccacggcgcaacggctggcggagagcgcgtccctccgtgaggctgtgctagaggaacaagcgcgccgcaatttggaaggtgcccgcgccgagaaggccgcactgaaccagcgggccgctgaactcgaggcgcaggcaaaggagctggacgcgagggcgcgcagcggcggtgcgggcacgggcgaaagcgacttagccgcccgcctcgcagctgccgaacacaccattgccgatctgcagggcgcgctagactcgtccgccggggaggtcgaggccctccgtttggcaggcgacgtagggcccggcatgcttcgggacgccgtctcccgtctagatcacgccggccggcaggcaggcctctggggcgggcggactgtgaagtacgccgccaaccaggggggcctcgctcagcgcctttcggagatggtcgggactctccaacggctccccgaggagctcgagaggacgattaagtcatcctcgagggacctcgcccgaggagcggtggagctcgtactggcgagttaccaagccagggatcccgacttctccccatggacggcgctggacgagttccctcccgggaccgagaatggcgcgcgcgcgcaggtccgggacgccgccgaccatatcgtccacagcttcgagggttcggcccctcggctcgcgttcgccctcaactccgacgaggagggcgatgacggcggtgtgggcgacagtggcgacgaggctggcgacccgggtggatcggagtgagcccccaggcccccgccaatctttaaatagtttcttcttttcttcttccgaggccttcgggcctccttcttgtatagactaatttaatctgcaatcaaataaagaggaaattttttgtgtcaattctatttgttgtgtgtatgaggcgaggatgtctgtgccgcggtccttttgtgtcttggcttgaacaagggctcgtgcccaggtcctagtcctcaaatggctcgggtcggggctagtgcctggggagatccacatgtcgagactggccaggccgggagcgtggtgaccgagggttatgggtgacccgattgtgggtttttgccgattcccccccggagttcaccacgccccggggcacggctcggttctgggccccgtttggcgattttagccgacccgagcccccgacggcaggattgaacacaagtgacctatttcaagtcaaaatccttcaaaaggaaacaacagcacagatacagcctttaggaaatcgaaaatgcttttattgaaatacagatataagagaaatagggggatcc

SEQ ID NO: 8657 - DNA, 5238 bp, Oryza sativa
atcttgaattgttgaattcagcacaaatcacactcattccgaagaaagaagcgccaaccatgttgaaggactatgggccaattagtctcattcatagcttctccaaattggcaacaaaagtaatggcacggcggctggcacaaggttggatgatctggtaccccacacacaaacggcattcatcaaaggcagatccatacatgaaaatttcatatttgtcaaaggtatggctcaacagttccaccggcaaaaaaaggaagttttactcctgaagcttgacatctcgaaggcttttgatatggtttcatggagctttctgctgaacatgctgaaatacagagggtttggcccgcgctggaggtcttggcttgctgcacttttcttgacagcacaaacaagcattacaataaatggggatgactcaagggcaatcaaaccagcaaggggactgtggcaaggagatcctctgtcgcctcttctcttcgtcttggtcatggacacacttcaagcaactcttttacaggcaaagaggcaaggaatactttcagaactgaacaccagaaaacgtctgccaaacatttcagcttatgccgatgatgcaatgcttttcgtcaagcctcagaggaaagaagtgctactgatcaaagcagtcctagacctgtttggagcagcatcaggtctgaaagtcaacctcctgaagagctccatcacgcctatacactgcaaccaacaacaattagatatggtctctgaactgctcccatgtaaagtcgaggaatttcccattatctacctgggactgccactatctatgagaaaaccaaccaaggcagagctacaaccagtcctagacaagttagcaggcaaggttgcaggttggaagccaaaattactgtcacctgatggtcgactttgcttaatcaagagtgttctgatggcattacctgtgcacttcctatcagcgctgcaaatgccgaaatgggcggtgaaagaaattgaacgcaaatgcagaggattcttatggaagggacaagaggatgtaagtggaggacactgtctagtggcctggaaaaatgtttgtgcgccagtacagaatgggggattgggaattcgaaatctcgacgcctttggtcaagcgctaagactaaaatggttagccaaaagtcttgagcaaaaaaatcgaccgtgggccaagtcaggatataaacttggagaagacgtggagaaaatctttaactcagctgctgaattctgtgttggaaacggcaaagacacaaagttttggacagccaattggctaaatggtggaagcattgcttggcgatggccggtattgtccacttatgttggccgctcacagctgacagtggcacaagctttaaccaacaacagatgggtcagagatctgcaaggtgcactctccaatgaagccatggcacaattcttccagctctgggatgaagtacacactgtcgagctaaatctagaagaagacaccattcgctggaagctttcctctgacggacttttcactgtatcttcagcctatagccttttcttcatggcaagagagatttgccctttcagcgaacttatttggcacatcaaagctccatcccgagtgcgcttcttcctatggttggctgccaaaggtcgctgcctaacagctgacaacctgggcaagagaggatggcagcatgaagattgctgctccctttgtcagagtgaagcagaggactgcctacatctgttcgtaacgtgcgctttcaccaggagagtatggaggatgatgcagggatggattggaatcaatttcctcttgcctacagagaacgaaccagccctggcagattggtggatgaaggcgaggatggcttttcggacgggctacaggagcatcttcgacagtgttttcgcgctaacatgttggctgctgtggaaagaacgcaatgcgcgtgtctttgaacagaaatttcgaagcatggaacagcttgtgcaagatatcaaggaagaggccattgtctggaagacggcaggagtgttcacaacgtgcaatagcgagatcacgtaatatgcattgtaatttgtagaagttttctagcttaccgggtcagggcttttgccccaatctgttttcgacagcatactgtcgttgtaagctctttaattgtaatgtacccttcttttcttagtgaaattggtcgaccgaacctttcggccgacccggcaaaaaaaaactttgcttacccaaccatagatgttggggaatttatcagcatcactgtaaagagcccaaatctggccagcttcaaacttatcatgcgagcggtcttgttcgatgttgtagaattctgaatcagggcatgcataacagattaattcgatatttgttttcttgtcaagagccatgtaggattcaagagtaatggaagtaaatgccgaatccaagtcacttggaagagctgcagtgtctagttccaggaacccttctgcaacacctaccctttcatttccattcgtcctatagaaggggatactgtgagaaaaacgaagtacctcacatgatgatatcgaaaaacatgactcgttcttcgctttcgcaaatagactgacaacccctgcaattctgaccagcggtgaaaccgtgacaccatcatccattgagccactggaaaggacttgcacaatatcatacccatatgattgatatctatccgctacgctccggcccaagcctcccggcgacgggcctccgctccactacggcagaagctggcctttattaagtgcaaatgaatttggatcacaactcaacaaactgcatgctccatcctttataaagagcccacacggccacccctcaccattgttaggatttatatcacacgagttaccatttttgcctgtcgacgaaacactgtgggataagtacctcgatggattgtgcaatacatctgtttctcctaagcagaagttcccacaagcaaatggcagtttttcattggtcgatttggaattttgttcatttactgtgttgtgcaccagccaagtgaactgcactttgaggttggaaggatcgacatgatttatccgggcataagctcttggcatgcaatcatggccatcatagactgcccagatctgatcaaccgcaatttgggagacatctctggacttgtcaaaattaaagaagtctggagaagagtaggcaatcacaggattggcagaatcaggtcgcttggagtccagccgacggaggggcgtcgttgctgtagaggccacgtgttggcattgcttgggagtcagtgaggtagtggcaagaggggcattggtaggtgctaggcgaaagccggcccaattcttgggcagcaacggcgacgtctttgggcgttgcaaccctcttgagggcgttgttgaggtgcctccctccccctcttcaaggatcctctaggtgaaaacctcatcctttcgggatgggcgatggcggcgttttgaatgtcgtgaccttcttgaaggcatcgttttggaggtggccgtgtgttcctctcggtgtggtggtgtgtaggcacgtggccgggtgtgttttctcttgtccggttcccctgtcccctgctgcttttgcctttggttgtaaatggctgttttactcctctaaatgcaaaaatacgctagaagcgtattcccaaaaaaaaaaggattggcagaattctgagaagaagtatcagtatcatctttcctatgactttgttgattgtctccatgtttttcatttccttcctcttcactgtccacttcgatggggacatgttgtttggcaaattgattctcagtaacagcaacatcatcattacatatttgctcattactccaatcagcatcagatggagaattatacttccttttcctctcaatattagagttcatagcacggctgctgtcagagctatcacagagctttctccgacccaatatctgaagactggatgatcctggagcatttgtccctgctgatacactttctccagtcaaattctgcacagcgatggagtttggatcaggactccttggtaccaaagttccgggcatatcattgtcagcaggaggcacatgagatttagcttggctaatttctgaaaattgaactctgtcacttcttgtcaccaggcctttaccttccatgtcaccagcccagccatactgttttatggattcatcagtttcttcagtatctctggatttgccaaaatcaaagtctggataagggtaggcaatcactgaattgagatacttctgagcagcagtatcattaacatttttctgacaagtttgttggttgcctccatgtcttgcatttccttcctcttcactgtccacttcgatgggaacattctgtccagtagattgattatcaggaacagcaacatcatcattacatatctgctcattactcgaatcagaatcggatggacaaatatacttcctttgcctcttaatattggagttcataccatggctgctgtcagaggtaacatagagctttctcttacccaatatctgaaaactggatgattctgcagcattttcctctgcaggtgcactttctctagtcaaattcttaacagagatggagtttagatcagaactctttggtaccaaagttccaggcttatcattgtcagaagagcagatgtgagatttagtttgcttcattgctgaaaattgaatggcctcgcttcttgtcaccaagcatttaccttgttgatgctgattaccatgctgattggggacactacttcgttgaaatgagaacatttctgacggtgaaagctgagacctttttgcagcagttgataggattcttgagggcacagactgctcacgcagtttgattgcaaagaacttaccacaatcattgcagcgggccaaaaagttccgttggtagtacagagattgcttctgacaatgcggacatatctatctatctatctatctatctatctatctatctatctatctatatatctatctattattctattatattattaaaacagctttgagaaaaaggcactacgttcgctgtgggggctagaaattcccacattaatcggagaaaagaagaaaaaaatagaccgttagatcatagtagatctatattatagtggtgtagattgattgagagagttgtatataaaatacaatcatttatatggaaatttaaattaaataagagatact

SEQ ID NO: 8658 - DNA, 4388 bp, Oryza sativa
tacatctttagccctcttaattagtaaagtaagcatatcagctactatattaaaaagaattggtgacaaaggatcaccttgcctcaacccttatacgtttgaaaattattaccagtttgatcatttactttaataccaacatgacccccttgaataaaagaagctatccactcacaccatttaggagagaagcccttcatcctcaacgtctgttgtacaaaagaccatttaaccttatcataggatttttcaaaatcaatcttaaaaatcacaacacttttatttttacgatgtaattcatgcatagtttcatgcaaaataacaacaccttccataatatttctcctaggtataaaagcagtttgagtaggactaatcaccttttgagcaacactcattatcctatttcacacctatccattatataccactacttacccctttaacacattttccaagatattatgaccaaattacccatatattcttcttcatcggttcgtcccctcccctctctatcttgctcgtcgaacctgacatcctagcgaacgagacgaggtcacgggcgcaggggatgttcccacctggccggatgtgctcgcgctccgcctcacgcacttgctgctctctccggcgcaaccctccgtgcccatggctgccgtgctcctgcgctgtttcatttccgccagggtcacaggacacgggcctccacgtcggggatccccaagtccatttggaagaagctctcctactccaacaggaaaaggagcagcaggtgcaaccacctgctgcttgcttgcatccttcctaatgccatccaataggaagagtagtagcagctgcaaccaccggctgcttgaagggagaaggagatggaagatgaacatggtagagaactagagattggaagaggatgaggatgaagatagggacaatttggtcctataagtttagaaaatgtgctgaatgggtaagtagtggcatataatagataaatgtgaaattataatgacatggtttcaaatagataaatatcaatggcatatttcaaaaccacgaaagttataatggcatgggtccaattaaccctaaaattaaagatcttgaaggtggatgattttaataataacatttttggggaaaatatatgctagttaatgacatgcatgcatgcacgtcttatatcatgaaacaatattaaaaagtagttgtgccttatattatggaactgagggaatactagttaagaagatttacaaaagttttatgaataaaagcctaactttatggacagaaactatcaacatataaactttatatattcatatctctatctctatttattataaaaattgaagatgtttatgtcggtactttggtacgtcatccgtatttgaatcggttttaattttatgtttcggttttaatctcttatctctatcttctctacttaaaaagaacaagaaatttccataggcggtgaaaaaagaaaacaaaagtctgactaaaaaggtgaaagaaaagaaaaaaaaagtccaactcaacaagcaataaaaaaggggaatgctaaatagttgtcgacgtcgcatgatttttgatagctaaatcattgatgtttcaatatatttagaaccgttgtttcatatgttgtagcaaaatgtttcacgaggtgatttaattgtgtttcagcttttaaaaagattgaaacatttccaatctacttggtgaaacatttacggtgtttcagctttctaaaaaattgaaacattttcgatctacttggtgaaatatttttgatctacttgataaaacagttttaatctacttggtgaaacactgaatgatgaaagactaaaaaatcatgcgaatcccatatagatagtcccataaaaaaagaaaaggagaaaatcccctatgtacccatgaaaattcacctaatcccttttatacccctgaattttgctcaatcccttacatacccctgaattttagtttggatcccttccatgccctttccgctagttgaccgttaaattcttttgaaaaagttcattttgccctttgctatgaagaaacataataaattaatgaagtacattgttggaatgtaaaaatttattggatcaaactattatatttatgagtctgtgatgcaccatattatttgtgacaaatttacttttacatatgatataaaaagttaatacttatttattggttattaaaagtttatttatgtagcatatgtgttttcatagtaatacaacagatttgtttattactatcagaacacatatgctaaaaaaatcttttaataactaagtattaattttttatgtcatatctaaaagtatatatttatcgcaaataatatggtgcataactatctcataaacatagtcttatataacaaatttctatgctccaacaatatactctattaatttatatgcttctttataccaaagggcaaaatggactttttcataagaatttaacggtcaactaacggtcaactagcggaaagggcatggaagggatccaaactaaaattcagaggtatgtaagggattgagcaaaattcaggggtacataagggattaggtgaactttcagtggtacacgggggattttctctaaaaaagcttatgtgtcgtcagtaaaaaacaatcgtccgactccagaaaaaaaagaaaaaatagtctcaccagtaaaaaaacaaaaaataaacagttttttttcaccggtatttttgcgacttgtttttgcacgcaaacgagttttttttgtgcgcattggttttttttcgtccatttttttaaatccgttcaccgcgcccctcctagatgcttttggttttttttgtcaatttttttcaccggttttttctcccttgcagttttggtttttctcatccggttttttaatccgatttgttcgccgcacttctcccgagttgaacctcggtgccatattgattgtgtgttttctactacaatttgattgaaaaaaatcgattcccactcctctctcatcatttctccatgattttcctagctttatttcgtcagatttaatctaatagttgccgatgatgacgctccatatcgatcgtgcgttttctattccaatttgattgaaaaaaatcgattcccactccttcctcattattttctccacgattttcctggctttattttgctggatttaatctaatagttgccgacgaacttccttaatcgtttttaccccgagtttgattttaggaaaaacggaaagagaaaatcgagtggatcaaaaaccctcaaccaattttgggtggatttgataggtcgaaggaagcaagccaaacggagagaggtagcggactggcctagggctgaaaaggaaggaaggctttcggcctaatacacaggaaagattttcattaacttttttaattataatctatagtgatcccaacattataattttcattaactttttttaattataatgtatagtgatttcaatatttcattttattactcagctcttaatatatcattgacaatcatctttacccgttgcaacgcacgagcattttttctagtaaatttaaaagtcaaggttcgaaagacataaacaaagcccatatcaagaaaaggtccacttcaccacaagcacagccacacaaccatgcaaaagcaggccgaagaaaaagcatgaatgctaattcgtgtatacgtgctagcaaacaaacttgcgcgcggtcctgaccacgtcacgacaagcaccgaggtagggttagggtttcgggagtagggaggggaagtggaggatcacagttaaagggatggcctagggaggcggtgggcagtagtggcggtgccgaagcggcgaggtcagcagcaggtggtgggctagtgttggtggcgtgggcaaagcaaggtgaagggtagggccagtgttttcctcgttttccgtcggttgccgatgcctgaagaattcaagagcgaataactgaatatacctcctcaagactcaaagttaagaccctgtttagttcccagaaacttttcgtaaaaacaacacatcgaatttttggacacatgtatagagcattaaatatagataaaaagaaaaactaattgtatagtttgcatggaaatcgcgagacgaatcttttgagcctaattaatccatgattagctataagtgctacagtaacccacatgtgctaataacgatcgacttaattagctcaaaagattcgtcttgcggttttcaggcgagttatgaaattagttttttcattcgtggccgaaaaccccttccgacattcggtcaaacgtccgatgtgacacctaaaaaattttcatttcaccaactaaacaggccctaagatc

SEQ ID NO: 8659 - DNA, 15054 bp, Oryza sativa
tcaaagacaataaataaaaagaggaggcgcggacgggccatagaggagtataatggcaacgtttgatgggacttctaaaatttataaaaatgtaacccaacgagaaataaactttgaaaactataaggtccaatttttaaaggttctaaaaagaaagaataaatataatcagtggtggatcgagcaagcacataaaaaaggcgtgacaaagtaaggtgtagcagctgatatgacttaaaaactataaaattagaagcacgaggatgataaggttttgtcttttaaaatcttaagacaatgagatagctatttaataaattttaagtaaaaccatattaaaaaatagataattttgtatgggtgctagccgcgtaattgcgcgggccacccagctagctgtccagaatacaagcacagaagcagatggtggcatggatccagccaaattgtttatgtttgcttcagtcttgtttggtggttgtgtagcctccttggccacttctcttgaagcacgctgcctttcggtgtcatacagagacctcttcgcatgatcactcaatactgcatgagcttctgaaacaaatctgaatgctgcttcggcaccaaacagagtattattatcaggatgaagccgatacgaaagtatgttgtactgctttcttattactgtttcgtctgccattttatccacctgaagaacaccataccaatccaactctccagatatctttgcctcagctgaagaaagaacttcacagacagttaacagctgggagatgttctcaagctcaggaaaaagcctttgagctttaatcgcgatcttgcgggcaccgacaaagtctctattttccagcttctttacagcaatttctctggcactgaaggcctcctctctgttgcattccatcaaagtattccagaaatttgaccaagaaacccttcacatatacttgttccagaatggcattaacatgctctacctatcatgttatcaagatctataaaatgtgagaagaactttcagtgcatcaggccctgcatgcatacaaaagagcatttttattaacagaaaaaatatatatggcaaaattatgaatactctgggaaaaaaaagaaagcacatttggatatactcgtgtagtcttattcacttcagaaaatggcaatttggaaaaatgacatacagttccttcaaaacaaaagggatccattttgaaatgttttgaaaaaaaaactggatggcatctttccaaacaaccatattttgaagtggcatatatacattcataaaaatctttaaaaaaattgccgaaaaagaaagaggggaaatatttcgatcctactcgatgtctactaccctagcctcctaaagcacctaaattaagaggtctgcacgatcaaatcgctggccatatcctcgcgaagaacacactaacccccagaacgcaaaaccaaacctccgatccaaaaaaacctaacacgcacgcacaacctggcataaaccaacctacccaataaagaggagaactcggggcaatgggacgcaaatgctgaacagatgctacctccgagcagatctggggctagagcgtgatccgcagcggccggcgccggcgagccaccggggtgggcagtgggtgtcgttaggttcttagaggaagagcagaggcagaggtgaggtgagtgacagagtgagtagtctactgtggtcgaattggacacgtgtcatgctaggaagtgaagtcctcgagatcaaggataatttttcaatatatgccattcaattcgtcgcactttcagattttgcccctcaattcgtcacacttttagaatatgtcatcgaggacgtgaattgtttcattccgtgccactccatccatccaacgccacatccgtcaatctgtccgtgcccgtgccgtcgttcgtccattgggcggggagcagctcgtctgtcctccctgcgcgagccgccagccgatgaggtccttcctgcacgcgtcgccggctgcagtcgaagctagtggacgcggaaggagttggagttcccgcactgccgacgcgagcgttcatctcctgcgacacgcactcgccgttccggccacgcagcgtgcacccaacggccctgtccctgtcaccagcaccctcctcgtccccatgtcgtacaacctctgcccatggacacgagcaagaacagcatactcacaaacaagaataccccgtgaaccgatgaacgacatgaagtaatgtgtgcatgctcgctggtgatgtccgggatgttgaggccattggagaagcgaccggcggcggctggacctcgtcggccagcgagctgcgtgcgggggacctcgccggccgacgccgtgcgcgaggagcagctcgtcgatgacggccgaacgccccaatgtgccaatcgggaggacgtcggtagctggcggttctcgacggcggccggatgcgtatgctgggaagacatcgactgctgatggcgggcagatgtgtgcgcatggaggacctcggcggccggaggcgctcgacggtagcaagatacacgcgcaagtcattgccggtcggcggcgagcgctgggaggacctcgccggctggtggctcgcgcgggaaggaccgacgagcgagctgctccctgcccgatggacgaacgacggcacggcacggaccgactgacggatgcgacgtcggatggagggagtgtcacggagtgaaacaattcgcgtctctggtggcatattctgaaggtgttacgaattgagtggcaaaagctgaaagtgctacgaatcagatagcatatatactgaaaattctcgagatcaacggaagtgagtgataggggtctttttttctagggttaatttttttttgaccgaaaaacagtgggggagagagatggcaacgggtgcatatccatcgggttcctttgccccatacccacacgcatgatatcaaaatatttccacttaaatacccacacccgtcgcgggtacaaaatcgtccccatacccacacccatgcggataacgggtatccaacgggcacccatacccatataattgacttgtagtatttatagttttgtactctaattagctatattagagttgtaaaccattaatattttctctagcaacaatgctattaatattagtgttcaaaggcgagtaaaaaattatacaactacattacataatcaagaaatcaactaataattttatataactagtctagaacaatgcttaaggtgtgaaaagagttttatgctatgatttagtagtcgttgagacctatatggctctgttttaggctcaatcaacaggtttttttttacccacgggttggtgggtacgggtgggtaaagaacatacctatatccatgtatctaatgggtaagagttttcacccgttagtagatccatgggtataagagttagaacacgattagctcctaatggagtaaaaacccgtcgggtctcgggttatgggtccccattgccatctctagggagaccccacgtttttctagggttaattggatctatgccattacaaatatgcatatttagataaatgtcattacaattcgtcaattcgtaactatgccattgtaattttataaaattagaattgtaccattgctgttaggcttccatccatcttcctctttttttccgtttcttcctctttttttccggtctttttccattgagctaccgatttcttccggggggatcgatccacctattggcggctgtggatgatgtctggtggaggttcaggggcaccaacgccaccgtggccagtgcgttgattcttcctcctgccatgcgcggttggtggccagcgcacggcggcgtggcggccggcacaaggcagcgctgcggctgacggcgagcgcacggtggtgtggtgtccggcgcaagcacggcgggcggcggactcaacgcggtttcgacacggacttggcgagcggcggccggggcacggcgcgtgcaacggcgacgcagctcgggcatccggtgctgctcgccgttttttcttttttttttttcgttttctttttcttatgtgatggtgccagtcaccgtggggcggtgcgccgcaacccagcggctcggcggcgcaatgatggcggctcagcgaggacgtgcgacggtgtgacgcatgcatagcgggcggcaccttggcgcgctgcggccttggtgctgcttcggggcaagtggcggcgcggtgctgcagcctggtcggcgctcggcgtcggaatgacttcgtgtgtggcggctcctagtttgtcacccagacaaacatcaacaagacggcgtgttacctcgtggatttgatcggtcgattgcccagccagacatggtacttcatgctggcttccgatgtgaggccaatgagctgcagcctgcagcaggtgagcagggactacatggcggcgaccgtgccgccctgccctagcacgaggttctccgccgactgcatcgtcgccgcgtcgaggcgttcgtggtggcggcgcagcgggcgtgacgtgccacgccgccggatttggccaccgcatcgcccgatttggccgccgccaggccaggtgccgcgccgagccaccagcctgcgtcgaacccgctccagtggcgcgtcggagtggacggatgggaagaagatggaagagagaaggaacaaaacgaaggagatggatggaagaagacgggagaaaacggaaaacaagaaagagatggatggaaacgtgacagtggtggcatgtttctattattgtaaaatttcaatgacacggtatgaatatgcgaattgtaatgttatttatctgaatatgcatatttgcaatagcatgatccaattaaacttttttttctactcctctgaagtttatatactaggagtttatatatatttttttcgttggccacttgtgagtatattgactgactgcctgcctgcctgacgctttctatgattacttgtggatttaatagttggatttaatagttgggtttcttttgcagtaatttgtatcgtgatgtacaattaaggaaaaatgaatgtataactgacagaaaaataaatgaatgtaattgagagagagagagaagtaatgtttcatgaaattattagacaggaaacttctcttctttatacttaaaatgtacgttgtaacgggtcataaccacagaagtaggaatggactatagggtgatttgagataaaacattgatctggtggttgccttcggtgtaatggaccatgcccatataaatagatataggttataaggtaatttaacataaaacattgatcgggtggttatgggaggtggtgcgctcggttggaggataaaggaggatgatttagcttttaagattgtagagatattggatgaatcttctattcaagccatctcaagaaagggaattgtccatgctaaatgctactatctctatttttagcaaagtaacgtgtaccaaaataaagttatttcttcacctacctttttctcttaaccaatcacaaccattctcttctcctttaatcataaccctcgtccaatcatttctatctactttcgttatatccgtgtctatctcaaaatggtttcattatgggacagatggagtattatctacccatttattgccaattaaatgaaagccacgtatggacgggtgtgcctaatggatgaatgttcaagcacgaacacttttggcccggctcacatgcatctagcctaacaaaaaaagctatttcagaaattttttatgtgtatgtacaaacttttaatataaaaaaatatttgaatccaaatcaaacatataaacttctgttataaatctctactattttaaaaattgaagatgtttttgccggcactttggtacgttatccgtgtatgagttggttttcgaaatacagatccgtatttgagtcgggttttaagttcgttcgtttttggaaatgcagaaggagtcgtataagaaatttaaataaaaaattcgcatattaacttgagatgatcggactcctacttacagctcatggtttttttagaaaaatatatatccaagcgaattctcaagtgaatttcaccttaattaaaccatataacgataataagataaccttcacccgttgcaacacatggatattttttctagtttacttaaaaatagaacctgtacggtgccaaaaaaaaattaaaggaaagaacatggtgtataaagtgtctaagccgcacgcaaacttttgcacgatagcctttccggaccgcacactacacatgcgtgtaccctatttggcacgtgctcgcacattacacatacgtgcaccctatttggcacgtgctcaaaaaataaaagagaatactcttaatgtgtaaaagaaacgcgaatattatataatgaactaatattaaataaatagaagaggtgaggcttcgaacccataccgactagcccaccacattgtggagccagaaaacccccaagtatttttcatttatgtgtaaaagaaactccaatatataaaattgggaaaattgtaaaaaccaccccaaatatcactctgagtttaagatgccccctcataagaagatttgtgcaaatccccaccttctaattcaccttggtttgatttagacaccttctctccacacgtgcgtgattcctggagaatctcatggcgaaatcaacctagtcccacttagagtgaattaggaggtgggaatttgcaacaaatctccttataggggggcatatcaaacttagagtgatatttggggtggttttttgcaatttttcctataaaatttaatattccatatcacatttatatagacctgtggtcattgtctgtctcactgtctgcatgaggaaactccatactgaatattgaatcaccaccatgccactaacactgagacctcatcaggcatgcggtagcaacagagtagcactataatttgaggatttttatggtataatatactagtagtatatattaccagtataaatgatctaatggtttagattaatttgatcttccactcaattagcttgtaatataaattgacaaagggtatatttgtctttcaactaggtgaaaccccgcgcattgctgcgggaatttagtatgataacaataaaaaaaataacgtgcaagatagctagataacatcagattaagtaaattaatgtggtttatgataatttaaatttaaatagtatgtagaatggtgattgaaatgtaaaaagtaaggtggtatgactttatggaagaagaaaagtagagagatagtttggacagtagattaatcatttaaagggtaaaaacaattgatgtgatatgacttaattagaggaaaaaaggagaaagataatttaaaccatagattaatcatttaagcactaactaagtgaggatgaactatataagtatacaggatatcataaaacataataaagatatacattaaaacattatgtgaattatgttggatgataatttaatttaacatatttgtatttgaaaagctcttaaattctaaaaactataaagatatagcgtatttgcatgatgtttaaatgtgatgattgatagtggatgatggtgtggcatcttgttaattagtggatgatgatgtgtcatcttgttagtggatgatgatgtgtcatctttacatgttaagcttaaatagttagtatagttagtgggggataactttatagtaagataggaaaagggagatttttatttttttttcctttgacggatcccgctcgagcgaaatcctaattgagccgttcgccttccttcgtcacggcgatcgaccaccgcgtgcccacatgccacaggcaccctgcgccaccgcaatgtactagtaagatggtattttagccagaggaattaatgaacttcacatgccatattgaaaagcaagaataagattactgtgcccatggcggagattgagaaacagcatttttcatcaccaacagaagaattcatttggtggacacagtatatacaccaggtagagtataacagatccaacagattcatctatcaattttatggatcatggttctgcatgttagaccttaacagtgggagcaagaggtcggaggtgggaggcgggatgaggcagtgggctcgacgtggccaacctcgctgccatggtttggagaaggcagaggttgaatacgggggagaaagccggcggctagggtgggagcctacgaggcatggcgccggggacgcgggagaagccgagtggggaaggaatcgggccgcctccacgtgcatcgtcttcgtattctggaagagcgctaccatgaccacacgacgagatcgacagggtactcccgatagaaacaattgtgaacttcaaatggctaaaaagccctttccagatttttaccaaataccaaacatacccttctatatactgctaggatatacttgcaatacaatgtaccgtaaatgaattgtataattttctctgtgtaaacatgaatgaggatttgcacagaaagttaacatggccagacgaatctatgtttgggtaaatttagataaatcaggtgttgaacagctgaaatttgggtggaaatcctccattccttctgtagaaaaacgtcaggaactgaagcagggtcgagctcatagaagtcactgaacttcaaacccttttcttttaccagagagaacgaaggtatccgatgcgaaaacctgaggttctctttctcaggtatctccagtatctccttcccaatgtgaagcttgaacacagctatgtatccatctagtcgtctacttcactcagaggagaaaacagtgtgtgctgccttcagagcacctgatgatcttgccaatggcatactcaagacagctattgaatctggaaggagcccaatcaggtgaccagttcttgtagatggctcaaatctcacctacctttgggaaaaaaaataatttgccgatttgaatcacacatggatttgcagtttccaattctaaagatgccgcaactgataggtgtatcctgctccaaccattgcttctcctgttcgagttcagggcaaatctctagctatgtcaaatgcaatctgagtggatccagctttgatttcggctatccagagatagagattggggaacttatcatggtcactgtacaatgcccaaatttgctgatgttcaaacttatcacatgaccggacttgtggaattcagaaacaggatgcgcgcaactagtgaattcagtgttcggtctcgtgtcgagagacatgtaatgggtgagagcgatagaaagaaatgttgaatccaactcacttgaaagatgagctgaagtatctagctccagtaacccttctacaatgcatgtttctcctaaacagaagcttccgcgagcaacaggcaattcctcatcactccatttcgcctcttgtgcattcatagctttgtgctccagccaagtgaactgaactttgaggttggatatatcaatgtgatctattcgagcatagactcttggaatgaaatcatggtcgtcatacagtgcccagatctgatcaacttcaatcctgttgatatctctaaacttgccaatatcacagaagtctggatagtggtaggcaatcacaggattgttcagagtcctgactcctgagaagcagtatcaccggcttctttttggtaattctgttgatcgccttcatgttctgcatttctttccccatggatgtccaatttgatggggacatgatgttcagtagatagacttacagctgaattatcatccaatatttgcacataattagaaccagcactaggagctcaagctgcagctggtgaaggcaccatgatctgctcaacatttgaacttgtttctgtatccatgtgttccctcggttgaagaaagcttaatatactgggtctgctgtgatatcggcgcgaaaacgcttctgacgaagttcggtaattgctgctgaagctaaaaggaatctcgacggcacagcctgttcatgcagcttgaatgcaaagttcttactcccttttgtttgagagatgttcagatttgtgtgctgctttcatggaagcatactcccttttgctgtcatactacaaagatctcttcatatgatcacacagtattagatgagcttctgaaaccaagttgagagcagattcagcaccagaaagagtgttttcatcaggataaaagccacaaggcaaagcttgtcatgttgatattttaatgtggtgtcatctgctgttgcctccacttgaagaacaccataccagtccaaagtctcagtaggttttcgcctctgctgaagaatgaactttgcagacagttagcagctgataaatgtagtcaagatctggaaaaggcctttggcacaaaaaatgtccttgttttccaacttcttcactgcaatttatctgacccttacagcctcttctctgttgcattccaatatgtaaaaaagaaaatttagtgcatcagttcctgcatacatacaaaaaaatcactaatagagaaatgtcaactgtgtgacacatgcacccaaaaaacaaggcaaaatttcttgtgcacaaacaccacctcctatttcaaagattgactaggaaacaatcttacaatactacatggataccaacatcgcatacatgtagtagtgtagcttggaaacaatcttaataaaaaaatcactaattatcttaatacaattttgctatatatttgtcgacaaattttcccccaaaaatttgacagatataattacagtacaatcgtaatataattacactgtaacttgcatgtcattacactgtaactataatgtaacttgtacgtaactttcaaaaatctctccgtaacatgttatttgggtcaaatggaggtcgtgggaataaatcctttcacatatgtgtgtgctgtgattttttttcttcctcaccataacaaatcttgtatttccactgtttcacaatgtaagtcattctagcatttcccacatacatattgatgtttatgaatctagacatatatatctatctggattcattaacatcaatatgaatgtgggaaatgctagaataacttacattgtgaaacggagggagtaataaatttaacgattcaaaatcacgtgaaacttacatacaagttacactgtagttacatgcaagttacaatgtaattacactacgattgtactataattacatctgttaaatttttaggagaaaatttgtcaacaaatgtataggtggtcccatcaagatatgttctgggttattagtaatttatgaatcattccatttatcattctctgccaaacctagcaagtaggatttgttccaagtcaatggtattggagtcgacacagaaaaagaaaaggctgtattttctggacgagtaacagaatgacagaactacagaaaaccaaaaatgagtagcgtgcatcttcgatgttcttacgtttccaattaaatcactgaacacactaaaagctgtgtagagtactacagttcctggcctcctctttttcgggaaaatttgggtacactaatttgctgattacaatgtactgaaagaaagaaaaaagatactgactgcaagtctgcaacccttccatgggcatcgttcagtaatcagtagcagaggcctctgcaatggaatgtcaggatgggttttgaacataacttatccctgggtaaaacattgatggtattaaggttaatacagaaagtacaggctcatacatacaggagcatgctgccagacaacactatatgccgacaacagttccaacagtagtcagggctcaggagccaaacacaacttatgtcattttgacaggatttcacaatagcatttgaaattaagaaaatcactaaacacataaaacacttggagaaaaaaagtactgattgcagtgcagccccttccacagggtggcagccagcagaggcaactgtaatagaatgcatgttatgatggttttgaacagggcttatccttagcaaaacatggcatttgacaagtaagagaggccacataattagaatgttagtacaggtttctgaatagattacaggtaaggcatatatgtacacagaaaatgagtagaaccatacatcaagatatatcataattaagaccgaatttcagttctactgtctcaagagtctgctatggcattcgtaagtcatggagtgtctgttatgggtggaactaaagtgcttggtgaggttgcgaaggctataggagtggtggatgggtggctgaggccctagcactcatggacaccagagcgtcagccgccactgctgcctttgtgcctggcacacctctcatgccacgccggtaacgctggtacgttatccagcccataacagtgttcctatacaggaaaacgtcaggaacagaagctggatcgagctcatagaagccacggagcttgccacctctttcttctgtcaaaaggaaggaggggattcggtgagaaaacctcaaacgatctcttgtaggtatctccataactgcactttgcttgtcgggcatgaacaccgctctgaagccattaagttgggtcagaagatagattattatacttgcttccgtgcgcccaacaatctcaccaacgacaaactcgcaagtatctactctgggaggagtccactcagatgtccagttcttgtagatgcaccaaatttcacctacttgcggaagaatttcaatctgccggtttgagccattctatcctgtatgtactaaatgagaaagaataatttctctcatacttggttttccagtcccggattttaaatttaccacaagagactggtaagtcctgctccaaccaccgtttctcctgctcatattcaggagaagcctcaagccagatcaaatgcactatgaacggttgtcgctcgactttgcttatccaaccatagaacttggggaatttatcaacatcactgtataaagcccaaatctgcccaggttcaaacttctcacatgtgcggtcatcttcgaagttatggaattctggatcaggatatgaaaaaatagttggggttggggaagggcagcctggcccagaattattgccaaaaccattggcaacgtggccatttttgggcaaggatgagtttttttcagaagaaagactctccttttgtgcttcagaaagattctccgtttgttcatttccaggatcctttctactacttctactgtcagtcgtcaaatcaatgagtgtactgccctttttcttgccaagggagatgtaagagtccagggtgacagaaggaaatatcatatccatgtcaatggggagacaagaagtgtcaagttccataaaccctgccggggcacctactttttcatttccagttgtcctgtaacaggggatattatgagaaaatcgaagcaactcactcgatgctatcacaactgcagatttgtctttagctgccgcaaataaactcacaaagcctttaatcctgactaatgggataacagtgataccatcattaactgagaaacctgacaatatttcaacaacttcataatcataagaccgatggctgtctgcatctgaattccactgcatgctccaatccttataaagagcccataactcacccttattaagatatacttcataggcaatcctctttttgccttttgtccatgaaacaatgtgagagaacatgagtctgtcatgttgaccctaagcaaaacttaccacaagcaacaggttgttcttcatcagcccatttcttctcttcttcacttgctgcattgtactccaaccaagtgagatgagctttgaagctggatgcatcaaaatgttcaattcgagcataaaatcttggcatgccatcaaggtcgtcgtaaagggcccatatctgaccaagtgagaacatattaatatccctgagcttctcaaaatcatagaaatctggatatggggacggaagttctaaagaacaggaatgctcattctgacgaacagtattagtagcttcagcattggcattgtccttatcatctgtgtctgaagtttttcctttaccttgaatgtctacttttcttgtcataggaggtggattatattgtctgtcagctctatgggcagtatcaccgaacgttttcttacgattcaagtgaacagaaaatggaagatcattcttcttttacttccttttaccattggagttcagtctactgttgccatcaacatctttctttctgttagctggtctggagacaccataggaggccgcatatatactgtgggagagacagattggctgagaggaatcaccaaacctgttggaactatcactattcttctgaaaggttacctttttttgcaaagaaagatcttcatgatgttctgcagacagcaggcgacaaacatgtgcttcagactgattcacctttagccgaatagctacacgatttgccattctttcctcatggctgtccactttgctggtgactttatgtccagcgggggatgattgtgacacatgaaacttgcgagctttttttgtctttggaccttctgaatgatcaccaactgatgacaaccctttgcaaccatcattgttattttcttccctattgaggaaaatgtcaggaacagaaccaggatcaagctctaagaagccacaaagctcaccacctctttcctctgtcaaacggaaggagagtatttgatgagaaaacctcaaacgatcttttataggtatcttcagaactcccctacgctggtcataaggaaacttttatagttgcttccgtgcgctcaacgatctcaccgatggtgaactcgcatgtagctttgctggaaggagtccagtcaaatgtccagttcatgtagatggaccaaatttcacctacttacggaaggatttcaatctgccaatttgagtcaatatgtcccgtatttactaaatgagagaaaacatcatttccgtgatacttggttttccagttccgaattttaaattta

SEQ ID NO: 8660 - DNA, 6880 bp, Oryza sativa
cacataagcacaatatacttctatttcatatgacatttttttatatattatatatactccatcagtttaggtcgatgttactgtgtatgaatagtagatctggttgagactttattttaaattaaacataccatataggcaatcctttagttcttttattttgttttttttagtttagtcctaaaggaagattccaaagttacaacttgcaacttattacttcctaatttttttaatatcaaactaaaaactaccaaactgagagtaaaatagaagaacaaacatgaagtgattaatttcagaaatattaaatcatgaaaaattttataattgttactgcaataacagtataaatcgatacttactaattacaaattttagaattacaaaataatgtaaatccataaatgagactccaaaccaattacaattcaatagttattagatattattttagaattattaaatcatgaaaaagctaacattaagttattaaatattacaattcaatagttattaaatattattttagaattattaaatcatgaaaaagctaacattaagaccccaaagccttttctctaagaaaaacatcaagaccccaaactgagtacaactcgatattttctaatcatgaatcgtaaatcattttagacttcaaataatatacaattgtatactaactaaccatgcatattaaattattatgtcacgaaaagctatgatggaggagaaatatcctgtgcacacaagcttttttatacaccgtacacactaacaaacaaattttattgaaaaatgtaaaaaaaaatgtacatgtatttctaatattgttgcacttatgtgtaaagtcttaaccttaaatttattatattttagcagcaacaaaaaatataaaaattctgatagttttaaaattataaatctatcagatttttttattccctatatataatgtatttgaagatgactgtttatacatagatgtaatattactaaaagttaaatgtatgtgtacattattttctaaaattttttattatatctttagttggtgtgtataggatatgtttccataattgagactgtaaacatagtaaaactttaaatgtttgagaaattttagttaacataaaagttgtaaatgagactacaaagtgagtatagcagtactcctttaactatatgtttctacattaaattgtacctaatgagtataaaccgatacttattagttcttattttttaataattaaattaagaatataaaaactaacaaaagcaataataggatggattctatatacattgttaattattttgttttacattattgtaaataaaataaaattcttccgtctttataactttagagcaaagtctatcgataaattcaacgaattttaataacatctatattaaaaaaattataactttagagcaaagtctatcaataaattcaactaattttaataacatctatattaaaaatatgattaaatttttattatttttactatcataataatagcttgtgcaacgcatgagtcgccggctagcgtaattaatcatgcgccagtgatccattcgttttatgagccgtgaacagctccaccccaactgtgcacataaagagcctgtttgggggagcttaagattctgagaagtagctgctgagaagctaactggtgagaatctggagaatctgggaaacctagttctggcttccagttcattttccagattctatgactacagattctcagaatctgtgtaaaaagctagactgtttggggagcttctggcaattggagattctagaagaagctgcagctgctagaagctcctccaaacaaacgccaaccgcatagatatctgtgataatccaggatatgcccaatcactggttatcttgcggtcaatcttttggtggctagatgttcatgttcaaaagaagaggcatcttacatctagccaaattctaaatactctgcattagtgtgcagcacatgtggattcatttgcgcatcttattataccaattgggagagcagaggccctggtcctttgaaatgagtaattatgggccctgattggaattttaacttctaaaatcctaataatctattaacttattaaagaaatagaaaaagaagcatccatgttcgctctcatggcttaaaaattctcacattaatcggagaaaaagaaaaaaacagagtatatttaggaataaaatttaaaaatagctgaaattcggaattaaaaataaggaatatagaaagagaatactacagcccataccggtatacaatagaactaatggaaatttggaattaaaaaataagaaaaaaaataaaagtagaggttagagtccatatagaaatacaatttagaaataaaaaaatcgagatttaaaaagtaaagaatataggaagaagaatatagagtccatatagaaatacaatttaaaaataattaaaattcgaaattaaatatattgaaagataagtttggagtccatatagaaatataattttgaaataatataaattaggaattaaaataaggaatattggaagaagagtacagagtccatataggaatacaatttagaagtaactgaaattcgaattaaaaaaaatattgaaagatgagtttagagtccatatagaaatacagttagaaataataaaattcagaactaaaaaaataatcaatattagaagaagagttacatatagaaatataatttataaagaacggaactttgaaattgaaaaataagaaatactggagaggagtctagagttcatataggagtataatttagaaataactgaaattttgaatttaaaataagaaatataggaataaagtttataaataatataaatttataattataaaaataaagaatgttggaagagaagtctggagtccatataaaaatacaatttaaaaataattaataactatcacatatatacaatacattacgaatattacacattggttagtttgatcaagttagtacaaaatttaaaattatgttgccattttaatatattttaataataaaatgtgataatatatatgctactatatctctactattataaaaattgaagatgttcccgcggtccgttatccgtgtttgagtcggttataaaaattgaagatgtttccgcggttcgtcatccatgtttgagtcggttttaattttatgttttggttttaatctatatctcttctctatctctactattataaaaattgaagatgtttttgcggatattttgatacgccatccatgtaagagtcagtttttgagttcgtttgcttttagaaatacatatccgtatttgaattgatttttaatattattcacttttggtaatacaaaaggaatcatacaagaaactgttaaaaaaaccccgcatgactcctaactgcagctcatgattttctaaaaatatatatatccaactgaactcccacagtaaatttcatctaaaataaaccatataacaataataagattaaaataaactttatccgttgcaatgtaccagatattttatctagtgagagaaaaatataaagatgctagttgcgtaatttgcgcaggccaccataatgggacgctacatttaaccatggaacacagcctcctacctgaagttctgcccactatccacgccctcactcatcacagtgccacggggacccgccccaatccacctcgccgccggtgggtcccagggctccggtcactgctcccgccaacgacgaccttgttagccccctagcacaggtgactgttggctctagatccctctctctttctctctcccgttattcctttttattgggaatattggggtcgattctgtgcagctcatgttgttgctgtttgatttcctggggttctgggatggcagttggaggttgcgcggtaattggaaattttgtgcaacacttcttttaaatagggattggtggaaaatctagaaaacgatggcatgcattgcaaggtcgcaaggaggaacggatagggagaaaaaccctcttttttttttggaatacgcaaggagcgcatctttgtgaaacccctcttttcttgcgtcaaaaaaaaccccctcttttttatccccaagattcgtaatgtaggattgtagggagttgttaagattatgaatgcttaatttagatggtgtctgtgtgaaagtactagttttgttgtaagattacaacccacatgcatgtgacatttaaggcaattctccgaaatataaggtgaatgttttgcacaaactgagttcttctgtaagataattgtgcaggcaattcctgtatatctcgtattgctttgttttttacgattttgttggtcctgcattgcatagatgcctctgctggttaattgaattcattgaacttttcagtgagcgtgaatctgctagtgtgcattttcctttttcagcctgtcaattacttcacaagctttcaattgagaccactgccacatttataggtacgtgtcaactaaagctagctcaaaagacaacatgtacagatgaccatagtatataacatggaattcaatcttagattattttatcctctctactttttcttaacctgcacgctcatgttgttgttttgtgaagatgcaactctattttctctccattttctcccttccatgttagcaactacttcctccatttcacaatgtaagtcattctagcatttcccacattcatattgatgttaatgattctagacatatatatctatctagatttattaacatctagatttattaacatcaatatgaatatgggaaatgctagaatgacttacattgtgaaacggagggagtattgaacgaggcacttgctaagacagcacattgatgaccaccgtgcatgcccttatagtctcaatttacttatgatgtgctaatgcctaatggaatcatatttttattctgtctttgtatagtcaccttgtgaataccttctagccaggcttcagtgaatagtagctattaattcttctgttttaataaaatgaaaagaaatcttgtggtacacttctctgttttccatatattgtagaatattgatgagtaaccaatgcaataatggatagtgaaacacttgaccttgattttagccaatgcatgaaattggtatctaaatattgtttctcatacaggtttatactagtgaagttaatggatatacggaaggaagtgcagtgccctatatgcttaggtaggaatttgctttccctaacttgcttccagatgtagagataaaaaccctctttactttgcacaattccctctttacagttttacttcaaattgtctattgttctgtagatgtaagatttttttaatcaccattttctataaaaagtgaagcagcaaagttaatagtccacatatttctgttatccaagtatgtatatagttcgtataaaaaagatattgtgtataattgctgtccactgataaataacaagatgtctaagagaacatgcatgttttactttggaaaaaggtacatcactaagctcatgttctacatattttagagaagcacaactagacagagtttattacactaggttgagtaagcttctcatctgtggaattttaaatagcatctctgcacaaactgtgcatagctgatcatctgaatgccttatggccctattgcaggcattatccagaaggcaaggataattacggagtgtttgcaccggttctgtagggactgcatagaaaaatccatgtggcttgggtatggtccctaacattattcacctaaaattctgtcaatgccatttcgaaagaatggacctgactggggttttgaaatagaatgtggtacttactttttatgttaaactgagtgatacattgtttttatagaaatgatgaatgcccagcatgccgcacccttgcaagtagtcattcgttgaaggttgatcctaattttgacgctttaattttgacgttgtatccagatcttcacaaggacgaggaagaggtgatgcataagttttctggttgttgcacttagctatttcatttagtttcactacactttgcttgaccacacaggaacttgctttcactgaagagaaaacttgtcgcaaaaaggtgggtttatctgactgtgtcatagtatatttaatgtagggaaattattttccctgcccatttggaatttgtcttctgtttattgttactgaaattagcttttgtttatcaatggaagatccaagcatccaccgatgaggcacctcatagacgaaaagaagcacttgggaagaagcgctccgctgcaaaagcaataggttcttcaaggtctcaagggaatatgctggcaaggaagagaggacacattggttttcctgatattgtcccatctaaagttggtggtaaggatagggaagaaaatgacaacagtggctgcgatgagtggtctttatttgatgagtattcacaagatataaagaagaaaagagctcggaggtgtcttgtgccacgatcatcccctgctggacataaagtacccagcaaagtggaccaccatgaggaaggaaatgcaacacataaagcagaatcactctaagacacatatttgctgcccgctgtctacagaagatcagatggatctttcttctaaacaagacacattcacgacaaaaactgttataatgccaatggttttaacaatttctctgtgccaaggtattcctcctccagttattttgccattcctaattcagatttccacaactttgaagaaggacgctcatgcaagaagttttgagtgtggacaaatttgggctttat

SEQ ID NO: 8661 - DNA, 21360 bp, Oryza sativa
ctgcagcccagcttgctaaggcattcacagtgcgtcatccctattcgaaaaaccttagagtgccacgtagacttggctacaagttcaaaatttagatttctcatggtgcaagtggctctaagggtggctttgattttatatttcaacccctacaactctttgttttggtcctcatgtttttaaaatttatgtggaggtccaaaatttacaacaaacaccctagaacagattatcaaatcccatccctccccttccccaccccttctctctcccttatcccctccctcgcgttctctgttgccagcccgatccactcatcgcctggtgcacacccctcttggcctcctctccttctcccctgaccagcagccctccttccttggcagcctccgcgtgcaccacccctcagtggtgggagactccaagcgggagatggtgaggtcggcggcgcaaagtgtgggggatggcaggggctcggcagcaacgttggggatggtaggagcttggcagcgcaggagcgtcggctcccccctctgcttccacagctggcgttcctcctatgtcatgacttcctctctcctctcctttcttcacgtcacggcggcagtcaagaggccgggaccgtggcagcgaaggaggccaagtcagggtggagccactgagctctccggcatcttcctcgcgccctggctagcttggtcacctcagcgcgaagtggacgacgggacgacgactttgccgagtcggggatgacgacgagctcgatggcgcatgacggggatgacgccggattgagcttctcttccctccccttcatggtgaatcaagcttctcttatcttccctccccgacgaagagcttatccacttctccattctgcaggggtcgcaggggcggtgagggcatctccttccttctccactttttgccttttaggtttcagcgccaagctctgacctccacagtgcggtttcgtgcctctccccatgcgcccgcacgccatcaatcaactcggagaacgagtgatcaatttgggctctgcattgttcactagggggcacgcgaggcggacgtggcaacgaatattcgtagtggatggctcaggcccaacgacacgtgtgtattgtgaatggccttaagctatgtttttaagtccattttcctaactttacccctcgtttttcgcgcgcacgcttcccaaactactaaacaactagttaggtgcccatgcgttgcaacgggaaaaaaaatactgtgatagctaacctaataaggacaacaaatgagaggctcacttcaatttcttgagtgttaataacaacaaaatacagtgaaggcagagaccagtacacatagttcaatttatctttgcttcctattcttattactgtaaaaaatttaccgtcagtaacatgaaaaaacagtagctatatgtggtgcagggcaattacaccgtgtgcaccaaactatcaagacaaagatatatatagcttgatgtactggttctgaagttcttaaatctccacaattgtggttccattgtccatgtaaatatcattaaataaaaatggactaatatacaaatttcagaagattgataaatcatctaaacatttgttccctacaaaagtgcttttcatcatcatattcatatggtacttgactatatgttgaaagacatccacatttagaagtgctctttaccacagttttgaggtcttctcttccctaatctataaaattacaaaaacgtctggcatcatctatcctcttgtctcttcaaaattgatcggattagtggcctcttaacacaaccatagctacaccgccgacatgaacaataatacatatatttatctaaaattgatcccagaagtaaactgcaataattttagtagagctcagtttacaaaacaaacaccgatgatatagccaagagtcaggagaagaacatatatcatttaggtgagataagaatgacaaaactgcgtattactctgtacaagtagagattgtattctctgcaaccttttcccttcacccaactcaggaaaaatttgtaaattgtcaaattttgctgaaagttttttctggtttgaagaaagaagaaaaaagagcatgaatgtctgatatacctgctgagttactgcagttcttctactgacagaactttgtcaaacaagaaaaaagatctccttccaacgcctcctcaaaattaaaagggactttctagtggccagttgatgattccctgaccatagtcacttgaatgatagcaaatgtgaaaaataaaaggatcaggttgaaacccctctacaaaattacgagagtgagcatctatgtagcatgaaaatagatgcagataaatcaagaagtacaaacctcattatttccaattccttgcgagcattaggaaatatgagcaaaccaatcgatatgttgcacatccccaccattaatgaaacacaatgctgaaaaaaattgcatttagaaacaataaagataaatatgcactgcacatttccaggtcattgtggagcagaaacaaatccataacaaatcagcaagaggaacataccagcatccagcaacaacaaaaacaagagccagggaggacgttgacaccaggctcttctttctgccggtgacgaccgcagcgatgggggtggaggcatcgtgagggacaggtggtcctggcgacccgcggcagccagcagcggagggcgaggaatttattttattcacttacatctaatccacgatacaattttccttttctcttacattataactttgtgtgtaagcttgttgatgtataaactttatgcacatggactttttaccgtagaaactttgtgcacaataactttatagctatgcacatgaagtcttcatgtccccatcccgtcataacaaaacaaatgaattctaaaataaagaaaagcttaaatatgttttagttgaagctcgaacaagaaacaaaacaacgttcttctggccaacgaagttgcctccattgaagagacgatttaaaagtaccaataaggaaaacagaacaaagcattttaacctgagcggtcgttaagccaaatctcatgtctaagtaaagaacaagagcaaatggcaaatccaccaagagaaaacttaaaaaacttgcaatttgaaaacttaatatttgaatacctgagtcatgtattgttaacagatttgaaaacctgagattttcaatcaagcaaatgtctttaattatctaaaactggatatttaaatatctttagccaattctcaatgagcactattgaccatatcacagaaactgaaccggacagcagaagtggatataccacttcagcatacatggcctaaacagactatgttttctaatttttcatctcagataattaatgattattgctcagaaataaaaataatttccactgtatataccacgaaatggacctgaatagctagtaggatataaaatgtcaagctcaaatttataattgaaatttgttgccgttgttgtggttgtggtggtgctaaagaagtcagtacaacctcaactcaacagagcctagtagctgaggtttcctttcaatatggataaaaggaatatgcaaaagatattattttgaagaatatgcacaaataaggttttgaaggaaaggtagtaagttctgcatctcaaggctaacgtagaaatgaagcacatcaatagaactgattcagtattagaggaaaaggatcatatttaatcatctcgtgacaggagttcattttgttagcaaacctctgcatctcaggctaaaaaggaaatgaagcacatgaattgaacttcagattcaggaaagggaatttagccatcttatgacaagagtttatttacttcaacggtatggaatattcaaaattttatcgttctaacaattaaacatataatgagatttatatatggttcacacaaaaacgatgaactaatgtacgctagcacaacagggaacgggaaaaatgcacaaacatggtactgcactaataatcttacctgttcctccgtcgccgctgtccaggcagcgagggaagcgtcgaggatgtagggaggtggcagggcggcgtcagaggtcgaagggcagggtggcagcatcgacggggctggggcagtttgtttcggggataagacagacttcacgactccggcgagataacgcccttaatgaggaatgatcgatggccgcagattaggaacggattccagggcaagcaataacagaggatcgatggcggcgtcggtggcacttgcggtgggcggggcacgggccggagggaagggaggaagctcatggtggaggacagcaagggcggcggcaaggacgccctttcttgcggcggcgcaagtgatttggaaggggagggggcagtgaggggaatcgacggtggctcggcatcaaagggggaggagcggttactttgtgcaagcgtggatggaggcgcggggcttaggaaagttgctttaaaattaatattaatctatttttaagttttttaagctaatacttaattaatcaagcgataataggtcgctccattttgtgttcccagataaaaagaagtttccaaccataacaatatgtgccatttcagtagccaaaccaataacaatcaagaagcgtgttgttttagccaaatatcgatcaatgtttgcctgtactgcccattgtgtccctagtaacgtcagtctaaaattaagtgcccacttgtctgaattgggattaaataccaagctcgacgaccatatcatgtttttagtcctaagagaaatacatacgtttaatcttaaatatatcttagtatttgtctatataattacacatatacatatatagacaaacttatattattttactaaatgatgcatcaatattgacatgtaccataatatactccattaacataagcttggatctccccgacacccccccccaacggccatttggcacgttgtcatgaaacattacaattggtggtgtttgaatctcccgaagatgaagataaagattaagtgttttacgcaaaactatgtggtaataacgtgtgattaattgagttttaattattacgaacttgaaaatggattaatctggtattttagtacaactttcatataaaaagttttcgcacgaaacataccgtttagcagtttgaaaaacgtgccataaaaatcttcatcttcatccaactattgttggagaaacgaacaggaccaatgagtaagctcaagattagatgtggactcttgaagcaacttcacagtacattcattgtggtcacatgtgaaaaacatctttggtgtgtaaaaacaaccacgctgatcgatatcatcctgagttaagagatatgcaaggataggaaggaaataattgttcaacaaagggcacaagttcttttagcctattggcaaaaacgaagaagccatggtaaagacaattgctaaggctaacctaatatttaccttttggagaatagccttttaatcctactttcagaggttagttagccctagtttatacataagcctaattttctccctactttatataaggcaatttattttgttggtctattgttgtataatactgtattttttaagagtcataaatttttgtaactatatgcatgtgcaaaaataagtaacttggaaatcacctttacaaaacaaacatgcaagcctactttcgctatgaaatatttataatttaattggatatgagtttaaaagggcacactactaatcatcatcgtggtgttctgaaaattagtaagtactcgacaaattattaaaagaacccattctacctgcaaattttcttcagttcctagtaaagtttatttagtattgacaatatatatatataaagaaaaaccaacatgcaaaaaaggggcgtataaaacatattttcagccaattaaatattatgctagagtggatcaaatttatgaagtgtttttttttcattgtggccaaaagaaaccaactccaagtaatatttgttaatgcaatcatgcttgaaagttgaaactaactctaaaaatatgattagaacttgcgttaattgtaaaacagtcttaatctctcgacgagtttaacgtaaacgaggattaattcatagtcaaagattacatcaccaatttagacatatctaatcatgtatgttttttattcacaatttcttgacattgtatttagttttacaaccttttgctcccttaaaacttgacatgtatggtaaataaaaaaacatcaatgtgtgaaaattcaagtgccatcgatgagctttaacggaggaagccaaactctattgacaatattttagaacaaagagagtagaaattaacatctgaaaaatgctattggtaaatttctcataaaaaaccaacgatacttacaaatatatatagtttggaatagtaataataagatattttgccactttcctgaatctcgttgtgtcaaccttgctgtaccgtcgacgtctaaaacagaaaacgtaaattgagaggggtggaggtagcacaacatttggaccgaacccgacccaccggtgcgaacccgtcccggtcgtagtcgctaggctcgcgcacctcttgcttcagcttcactctggttcacacggggaatattccgctccccccacaaaccacgcgccccctcctcctcgcgccgcctccgcgccccgaatcaaagcacgcgaacgctagggtttgctcttccgctctctcgccgccgccgccgatggcccagcgctggcgctcgagggcgcggcgcgacccggacgtggacgacgaggaaggctcgcccccggagcggcggcgcaggggggctcgaagcggcagcgacgacgaggaggcgggcaacgaggacctcagcctcgagatcgtcgcgcgggcggcgcggcggcggcggcggcgcgaggccagcgccgggttcgcggccgacgccttctcgtccggggacgagatcgacgaggatgccgtggtggagctcggcgaggcggatcccagcagcaggaagcggcgcaaggagaagaagaagcggcgcaaggagaagaggaagcagcggaagggggcgccgcccgagggctcgccctcgaccgccgccgccgacaaggaggttcacgtgggcctttctttcccctgatattgcttgtgctctatctctgcatttagttcaccatcccatgccagaattgagttggattctttttattttgagactagaattgagttggattgtgagctgtacgtggactgattaactaactattctgttggatcttggagttcatatctaccgcctctctgcgaatgcagccgtagtgattgttagtaagcattcgatatattacgcccaaggggagcaaacacgtatactgattgatatcggtttatgtaaaatgtttaaaactttaaaaggcaatataaatttttttgttgaaagggtctttcgattctgtagacttcaagtgaaaataatgttttatgttgctgcttcttagaaagtatacgcgtattgaactatttgtgaatttattaatggtatggaaaccttacaaatagataactgattttatgtttgtgagtgagcattggtattcgatgtttctttgttgggaatggattactaacgctaatatgtttcggagttactaatgcgcggatttgttctttcagtctcaagttgctgggacccaggaggggcaaactggcacagcacaatcagtgctcactgaagatgggcctgatgtccctttatctgacaatattgttttacggaagcttcttgtaagtaccaagtgaatttccttgcatatgcacatgtggcacaagataataatactcatgttgcttttcctcatgatccagcgcataccaagatactttgatcctggtgaaactttattggaaacatgctttaattgtggtgaggagggtcatgtagctgtgaactgtccaatggaaaagcggaagaggccttgttttgtttgtgggttgtttggacacaattcaaagcagtgcacgcaggttggtctccctagctccaaggcattattgcttggtgacttgggtatgtatgctcatgcccttgacaagatcatcttatttagttttccattaattacatgatgttgctgcatttgttatttcaactcataagttaacatgcttgccttgtttagataggttccagacttccagttcattaatcacacatatttacttgcccctgccaatgcttcttgcctgtgtggcatggcctgccaatttcaggaatcaaacatttgttaatcatttttgtagggtcaagactgtttcatctgcaaaaaaggaggtcatattgcgaaagactgccctgaaaagcacaataggaatactcaacagtctactttttgtttacgatgtggagaatcaggtcatgatatgtttggatgtgccaatgattatccacgcgatgatgttaaggtcagtattgttttctcatggagggatacttgcctaaggaaaaaaaaatctaactcaacatatctttaaagccacctctcacttttaatatgctgtggctacaatctaaatcctactgttaatgcaaactgtgctgcttcagaatatacctatgaatgaattgtggttttgtcatttacgttgatccagctttatgtgctattcacaagcttggttaggttttgtgagccagcttaattttacattaagccccttccttatccttctgtgttagttgaatacctgaatccacatgttttgtccacttaattaacatgcaatataatgcaagtcattctcttatgtagcacaaaagtcctgtagcagcgagtttgcattaattgaagtcatagtattatccaaacttattttccccctccatctactttgttggtctgtgcaggaaataaaatgctatgtgtgtaatcagaaaggtcatctatgttgcgccgacttctctgatatttgtccaaaagaagttagttgttataattgtgcccaacctggtcatactggtttggtaagtttagtggttattatggcttcctttgtttctatatgttacgtctcacaacagctgatcatggttatggcttcctttgtttctatgtgttacttctcacagcagctgatcaatgtcttctgaaacagggatgtgccaagcaacgtagggaagctagtaccgcggcaactccaactttgtgttacaaatgtggcgaggaaggccacttcgcacgtgggtgcacaaagaacaccaaggttgttagaagcatcttattaattgtctactgataagagttgcttggggtatttatcctgtgtacatcctgtttccctttctgcagtctgatcgtatgaacggtgaatcatctgcatatagtcggaaaaaaggcaaaggcaagaaagattttggcactagatcagctcctcatgatgctcgcaagacaagtaaaaggaaaagccccttatttgaggaaagaaggaactcatctcattttaagtccaaagctaggggtggttggattgcagacgatgcggatgaccagccatacaagaagtgcaaacccaatgtgtgggcttctccatctacccctaagaagcaatacaataaccatcagttctcttctggtggtgactactcaactcctcagtcttcaagatggcagaaacacggtttcgcatcgccgagcgcaacttactcaccaaacacaaggaagcatagcttttcatcgtcgagattcgccagcaacactcatgtccggtttggaagaagctagctggaagctagtttttgacatttttttgccgttctgtttacaaacacaattgatcatcacttgtgcctgcaagggctgtttctgtatcttaaattacacatgtggtgctgtcgtgctgctgctgctcagttccagcttccttgcttcccccttccagctccgagcacgctttccttgtgaaatctcgcggctgtggcgagcagatttattaccagacacttgcatgcgcgcctggtcttttgttatcgttgtgtgcagcctacatgggcaacctactctggagctctttgctgcatcgaatcttacctctcccaacgatggctcgcagtgtaggtatgcatccacaaggcttctcaaaactagcccagtcatcctaccaagtgcactcagtttgggttaaaaaaaatcactgcttccagaactgttaacagtgtgtttactgaaagttctctgcatgttttccatgtttagtaaattaattaattgtgcgctatcaatttttctcgtttctagtgctctggaaatcttgtcgaaatatactccccttcccataaaaaataaatctagtacaggatgtgctacatactagtactgtgaatctgatggccccattatttcgcttatccgtggaataagccaaatgacatatttacaaatgaaaagctacagcctcgtcgagcttgctctatgcagcctcatcgcgtcggagaccgaggagatgtgtgttagtggctgcatcattgagcttgagctctacggcctcctcgcgttggaggccgaggagagacacgccagcggtcatcgaggttggagaggctgggaggagccatgcgcaatgaccgtctacttgaactcgagctctgcagcatcctcgcgtcatccacgaggcgtgcacactactaggaaaacgttttttccgtgctgttgactctgattttcgcgtgcgggtgcatatgtcgcccgcacggaaaaatccggaaattttttttcaaaaatccggtggcggtgccgctcccggccgccgcctcctcgtcgtcgtcgtggtggtggtcggccgaggatgccgctcccgcactcgtcatcgtcggcggcggcctccgcgccgccggcctgagggaaggaagaggaggggaggggagctggatcctgcggggggaaggtggccggccgctggatctgtgctcccgctggcctccgggctcccttccggccgcaccgccgccaatgcccctcccctccgctggatttggggagggaaggaaggggaggggcggggaggggagcaggatctcgcaggtgagagggtggccggccgccggatcggtgcggggacggccgccactgctggatccgtgcgggggttggccgccacccgccggatcccgctcgccatcgttgcgctgccactgccgacgagttccgtcgcggccgccgcgcgtcgtcgttgccgccgccgtcatcgcgcgccgtcgggactcggggaggagaggacaggagatgacgaggaaaatgaggagaggagaaaaagaggagatgagggaagaaaaagagatagagaggagagatgagaggagagagaagggaaattttaaagtggataggacggaaagggagggtgggtatttttgcgtgcggctctcttaatagatccgtacgtgaaaatatgcccatttttgcgtgcggtccatttaagaggaccgcacgaaaaaaccaattttttggtgcgatcctcttaaatggaccgcacgcgaaaatgagccctattttctcagacgcgaccagttatgtatggcctatttgcaattacaatgagtcactgtccaggaaaatcttttgtgtagtagtggcatagaggaaggggaggatgtcacctaaaggttctcaagatgacggcgtgaattctcacttcttgtggtaatgaaaagtgaaggtggaggttggctactatctctagtcctagaccatccaattctttgctgtggtgttgcgtcccttcgtgggtgatctagttgagtccatgctgcttgatttttggcgtgtccaccgttgtcacctcgggaccttcgccgttcttagagataggcggcgagagggtgagggaggaaggagggacaaggcggagaagatggtgtagatgtgttgatctggtagcaaattggtagcaaagtacgaagggtggtgtcgagctgacagctgcatcgacggcatcgagctggggctagaggcagattgctcttgtcctccatcttgccattatctcgaatgagggtaggtcagagactcagaggcgaagctcatcgtacttagtggagatgcgctcaatgagggcccgactcttgtcatatctgaaggagtctgaggcatcttcgatggcccctctcattgttggcgggtagaagccttaagcctatagtcacctggtcgcgccacttctaaccttgcctatcctagttgtaaggctcctggacgacgataagttgatgagcgagcatcccactctctcaggaggtagggaggtgcagataacactaatacgtggaacctattattactttaatcatgtaggacgagtaccgccttgaattttgttaggagggtaatttgtctgatttgaaaagtttaggcgtacaaaatgtatgaaagtttatggggcgatttagaccttttctatattcttctatacacacataaatgtgtgaattatgtattttgtaggtgatagctacaccgagttagcgtattaatattaaaattttcaatctctactagctagtggagtcgagcattcacgcaaccatgacctgtatggtatatgagcccatttacattatacactaatcgtacaactaaaataaatttatatcaagttttagctggtccatatgcaacaaagaacacattctgaatgagagtcctgaatagaactgtagcctaaacaatagaggttcatttatgcgtgaaattaaattccagtccaaactataatgttggtatggggtagcctaaacaataaatgttcatttgtgcacgaaattaaattccagtccaaacgataaaaaaaaaaattttcaataaagtcaaaggataacaagttcaatcgggcctaggatatatgcgaaagaaccagctgtcgctcaaaatacacatacagaatctcaagtgctcgctcggctcaggagagggtgtttcactcattggcgttcccggcctcaatatataagatggtgcaatgtttgttcagtaggcgaggtgggactaaaaggagagcttactagctcagtggcttcatcgtatgggcctcgaaactcggcaagcgaaagggccgcagcccatacgtgtggtcttcggctcttcgctgctgcagacgattttgaaattgattggttgtttgaatcttctaatcgcttacgatttgtctcatcgctacgatacgatgccccgccgccgcgaaccctccgcctccgcagccacacgaccgcagcgacggtggcgcaggggctctcccgccgcgccgtgcaacctgccgacggcgtgttccgggaggaggctgccggtgatcgtgccgttccacgggggcgcgttcgcgaggggcgcggccgacagcgacgccatcgtggtttcatcgcgctctgggcatccacggccgcgccgtccccggcgccatcggctgttggccccaccccggctgctgcggcggcggagctcctccgccgggtcgcggcgcccggggtcgacccgtgcccggcgctgcgtaagctcgcggcgttcctgtctgacgacgacgtcgacgaattcgacaagaacgcgctcgcgagggccggtgggcggtggcgcggcggagaccgtggcgtcggtgctccggaggagggggaagggcgatgatgatgatggcggcgtggaggccgtcgaggcggccgtccgggtgctcgcggtgctcgccacgtcggactgcatcgaggaggagaacaggaggcgcgtcgtcgccgcgctcgccgcggggggcgccgccccgtcggtggcggcgtcgctggcgcgcgtgatgcggagcgggagcgggctcgaggcccgcgtcgacgcggcgaggctggtggagtcgctgctccgggacggcggcgaggatgatgaagtgcggcgggatgggcggcgcggaggcggcggtgtccgtgctgtgggcggtgtgccaccggtacagggaccggcgcgcggcggaggcggcggcggcgtccaagggcgggctgacgaagctgctcctgccgatgcagagcgggtgctcgccggcggcgaggcagatggcctcggagttccttaagatgttcaaggtgaacgccaagagctgcctcgccggccatcctgcaccgagacctcttcaacggcggtggcggcggcggaacgcgtgtgcgggcatggagcacgcgcacggcgaggacacccgagcgccacgccacgccgtgtcgtctcgtctgagcttgctgctgccgtcgccggtctggatgaggcggcggaggcggagacgtgcaccacaagacaagactgggcccccacattactggtgggccctgaccggacaaccagaccaaattccgccacctccgcttccgtcgcttctagaagccgacggttatttatacccccggctctttcttcattcctcgcctcgcctcgcctcgcctcgcctgagccccaagcccccaacctcaatcgcaccggcgaccggagctcgctccacccccaccccgctgccgccggcaagagggtggcgctctgctgcgacgtgcagagtccagctgccgacaacacggccgcgcgctcgctccgggagggcagggaggccaggcaaagaggccaagaacacgctcaaaaatcaagaacgcgtgacatcgatctgcgcatggcgacgccaccgccaccagctgttcaaaagatcaaggtagactaggtgtccataaccttgatataaaaaatagctgcttattaagcaaatgacttttccagttgtttaatggtgaaggcctatggcaagaccttttgcgaaataaatacttaaagggtaaacctctctctggtatgtccagtaagataggtatttctcagttctgggccggtttaatgaaagtcaaagaccaatttcttagatttggttcttttagatgtggcaatgggacaaacataagattttggaaagacacgtggttgggatcgcgtgctttcaaagatcaataccctacattatataatgtggctcgaaaaaagcagtatacagtggcagaggtcatgagcacaacgccgctaaatatctcttttagaagagctattgttggccaaaagctaatcgagtggaacgatttgatcctcaagctagctaatataactctgtcaaatgaaaaggactgctttgtatggtcgctccataagaatggtcaatttttcgtcaaatctatgtatgccgcgatcatgaactgtaatgttcggataaaaagagaattatgtgggacttgaaaattccactaaagatcaaggtctttatgtggtttcttcgtaagaaagtaattctaacaaaagataacctggctaaaaaaaaattgggggggggggagacaaacattgttctttctgctatgcacaagagacaatccatcatcttttctttgagtgtcatgtcgctcagtttgtttggagatgtgttttttttttgcttttaatatctccccaccccgtaacgccaaaaacattttcggtaattggcttagaggggtatctaggtccattaagaagatgattctaattggagctagcgctgtatgttggttaatttggcgttgtcgcaatgataaagtttttaatggtaaacaattatccaaccctatgtatgttatcttcatgtcttcctactggctccacttctggtctacaatgctaccacaggaggagcaggatactatgcacaatggtgttacactcttggaattggtagccaatggtctcttattccactatgggtggcgtagttctataagaattgctagctaaaatattttatgtgtttaacgctagtcaataatcaaggggagttggagatttgtcccatcaccttatttctcattttgatttacttttatcttacctttttattactattaaacttatggctgtgtgtcttatgacagaagccggagatgtaatccatttccattatctcaaaaagttggtagcttgaccaagattcactaattattctcagaaacgacatatcaagattcaaattcagattcaacctcagggctcagggtatagaagaagagagcgaagctatgccatgtcctcgctgatgtggcgtagaagctgtcctcgatggtcaattcacaggttccttaaatttgtcgaagctgtccgaaacgtcaaacagaacagaacggatgtaatataacatatacagtatgtggttgaaggggaagatgacaaaaaggaaaatggcgaggagattttgatcaagcactgtgaagttgttgtgttctctttttgacaggaaggggcttgctgttgctgacatgcgtctcctgggttgccagacaaggaataattcatcgtagtctgctagcttcagtaggatttagcttcaatagttcatccctccatttttgcagaatctgtcaatgtatttcagaacgcgaccacgcttccgtcttctgtcttcacgagatggaatcgtattccgtttgattcagagtcctattccgatccagagtttagatggaattctgttctgacgcaagcactgatgtttggtcggattccctcctgctcggattggggagctataaatatagggggatcaggtcacgttggttccaagattgcgagtttctcttcagaaatcacaacagaactagttcttccaggattgcaagagccaagagccagggttttactgtacaaactctgaactctgaagatttgccaacttttgcaaatccaattctgatccagagtttagacggaaatctgcccatgttctcatttaaccactgaagttggtgagatttcctcgtcctgctcgggttggggagctataaattcagagcgatcaggtcacattgcatcaaacattggagtcttttcttcagaaatcattccagtatagcaagacatccaccaagagccaggctctttttaacaggcaatatgggctgtacaatctccaaagttttcccaagttttgcagagaatttcttgaaaggggccaaggcaggaaattcactggagctgccgcaggatgtgctgatggagatctcggataaaattttttttaaatttttcaaaagtgtccgaggacaaaccaattcaatcgggccaagatgaatcaaggatgcacaataaagaaacccacgtgttcgacgtgctaggctcggctcaggggagggggtttcacgccgtggcaatccctgcctcagtatataagatggtgcaatgtgtgttcagtaagagaggtgggactaaaaggagagcttactagctcagtgactgcctcgtatgggcctcgaaacttggcaagcgaaagggagcccatacgccaccgtggtggccgtcgggtacctgctcaccccggcgctgaggtgcaacgcatgtaaaataataggaaaaagtacaccgaaggtccctcaacttgacatcaagttacaaaaacgtcctcaaaccgcaaaaccagatatccggtgccccttaactaatcaaaaccggtcactttaggtcctccggtggttttgactccggttttatcctacgtggcagctgagtcagcgtaggacccacgcagaccccacacgtcaggtgtccacgtcagcacctctctctttccctcttctctttctttgtttctcctctcgtgccagatctcaccgagaacgtggtcggcaccctgggtgcggcgcgttctcgctgccggtgagggcactggtgccgctgctctacacggtgcgccgcgtgttcgtcgtcgtggactgggtgtacatttgatggcacgaacatcactgggaggatcatgaacatcaccaaggaaatccacccgccatgacgcacctgcgtgaggacggcggcaaaggacatcccgagaggaagcgcgagatcacccggcagctggcgctagcggagcgggaggcgacacccaaccacacgctacggcgggtcatccaggcagggtgcgccacgcacgccttcgagcggttccccaccccgtgtgcgcccgttgactcctgccgcgtcgccgcgctcattgatgaggggacaacgatgctcggcggcggtggcaggcagcggcagctcaccgcgctccgggagatcaaggccatcaccaccgagagcgaccgcaacaagcgctgcgtcgaggccactcctggtgccgtcgagttcctcgtctccgtcgtcgtccagagccacgccgccgcctccacctacatgtcggccaagtcggacgatgacctgctcgactcggtgatcgattcccccatctcgacgagctcgccggaggaggaggccctgggcgtgctctactccctcaagccgttcgagcccaccctgcgccgtatcctcggcaaggacaatggcggcttcctcgacaccctcgcctccttcctcctactgaaggcgatgatgtcagcgatgccgccggagcggctaggctgtcgccccatccgtcgcagcatccggagccggacccccttacgctgccgatggcgagcgttcctcgaagaagcaggtgagccggacgacaaggcatccgcggccgtagccgccgctggcgaggagtaggaggatgacgctgctgtgtccatctcgcggcagcgactgacacgtgagatttgggggagaagaccccgtgatctggcatgctagctgcggccacgccgttcgggcggtccggcgtcctgccgccgcaggcgctcggccaccggcacgccgtcctccatcgtcatcgtcgccgccgaacccgcggacgctccgggaagccagctacttcttgggctccgtctcggcggctcgccgagacagctcgtctcgtcccttgagcgaaccggcagtagtagcagcaacatagccacgacgccaagaaccaccaaatcccccaccgctacgacggagacgaccaccacgacgccgtgtccagcgtcttctccgtggacgctggctcatggccgccgcctcctcgtccaactctttatgctcgaggcggcgcgagctcaagacgtgggtctccgaccgcctcgcagccaatgacgcggtcgagctcgtcggccgcctaggggaagctcgcgagaacgaggaaggaaggagagaaatagagaaagagaaagagaaggggggaagacaggaagagagaggtgctgacgtgggcacctgacatgtggggcccttgtggggctcatgctgactcagctgccatgtaggataaaaccggggtcaaaaccaccggaggacctaaagtgaccggttttgattagttaagggatgctggatatctggttttgcggtttgaggacgtttctgtaactcggtgtcaagttgagggaccttcggcgtactttttccaaaataatatgcatgacgctacttcaacatgcgttctgccagtggagtggttagttacttttgtttgttgtcctcggcccacggttcgagtctcggttgtaccctctttttacagctccttatatcaatgggttaattggatccatgccattataaatatcagggttttgaaatatgctattaatattacctatttggattcatgccattataatttcacaccttttttagataatggaataaatatcccggcctttgctcattagagctatagccaattattacaaggaatcacacaaacaacgagtgaagttcaaataaaattaaacacacccaaagataaaaaaaccaaaccaagaaaaggagcacacatttattcaaatctatttgtgaatctccatccatggttcgcaaatatttgcataaccgtcgtctccagtttatggcatgcaaccttcataaactctccatcatcttcacacttttgcagctttgcccaaaaccggagccaatatgttgccttgaatattacctgcatatatgagatagatggtgatttgtcaaaaactatatcattcctactcaaccacagagcccaacaaatgacagatgctttaacaagtatgagtttactcatcttcttgtcaatccctaaaagccaacaatcaaacatattagatatggtactagggaggtttaaaccaaaagaaaactgtactactctccaaacaaattttgcaaaatgacagtcaagaaaaagatattgaatggtctcattttccatacagaaacaacatcttaacctgccattccaattccgtcttgccaaattgtccttagttagcaccagccctttaagcaagtaccacataaagatcttaatattaagtggcatcttaagcttccaaacaatcttatttctctcaatataaccattattaattagagcaagatacattgacataacagaaaatctaccattccgatgataattccatctaaaacaatcagaggattggttcaactgaatatgtataatggaagcacacaaatcatgccaatatataagattctgaccaactaaggatctcctgaaggaaacattaagtggaacagaactcataacattagcaatagtagaacttttccttcggacaatagagtataaagatggatatttatctttaaacgccaagtttcctagccatttatcttcccaaaaccttgtttgattcccatcattcacaatccaagaacccatatgtaagacagtatctttgaccttcattagacctgaccaaaaatgagaatcaccatgtttcctactttctctttaataaagtctgccaaacaccttcctcattaattaatttaaacaaccacttacttaagagacacttgttttgtatttccaaattgtggacccctaaaccaccctgatccttgggttgacaaactatatcccatctagtaagtctatactttttttttgtggtcatccctttgcccagaaaaaacgtgatctataataatcaattttttgaagaacccctttcggtatctcaaaaaatgaaatcataaacataactaaacttgaaagaacagagttaatcaaaaccagtctacccccaactgacaaatgttttcctttccaactacagagtttttcctcaattctttgctcaattacttcccaatctttattattcagcttcctataatgcatcgggataccaacatatttaacaggaaacgagccaagcttacaaccaaagatgttagaatactgatcataaaactcctttgcgtgaccaaaacaaaataattcactcttgtgaaaatttatcttcaaaccagacaacttttcaaacacagataaaatcaatttcagattcttttcttgttgtaaatcatgctctaaaaaaataatggtatcatctgcatattgcaa

SEQ ID NO: 8662 - DNA, 22829 bp, Oryza sativa
tcctgcagccccgaattggttagaagaatgtgctttaaactatgaggtcatgggttcaaatcttgaatttggtaatttattttttttatttttccagaaaagaggaaacaaatgtttcagggagaaaaaaaagaaaaaaaagaaataaaaaaagagagagatcggtagagagagagaagggaggggatcgggagggagggaggggggcgatcgaaaagagagagatcggtagagagagagaagggaggggatcgggagggagggaggggggcgatcggtagagagggggagggagggagggggggcgatcgaaaagagagagatcagtagagagagagagaagggaggggatcgggagggagggaggggggcgatcggtaagaggggggatcgggagcgagagagagaaaagagagagaagggggagcgagagagggagagaagggaggggagcgagagagggtggatcgggagggaggggggatcggatgagaaggggagggggggtatagaatattcttaccacacacacacacacacacatatatatatatatatatatatatatatataatcagaatataatcatgtaagattttgttgtaaagatttaattgcaacgaacacaacggtataatcggattataaatcggataagtaatttaagagaaacttctctaagaaaaaaattgagtgtactagtattagttttttttttttggaaagaagggtgtctctctttagcactattcagctagtgctctcgatgtagtcgcgtccctaatctatcatatatatattggctacgcacaactactctctgcaggtatcttttcgcttcaaatcaggatgaacggtgagtcgttcacagcagctgtagctcgtcggtggtgaaaataatctcatgcaccaccgttcgccgttcgcttgagttcgcatgtgttctctcgtaacgaaggtagggtcgttcccatctgtggtgattttttgttagatgatacagagatatgattcgtttgttacagtataaagcacgtacaatagtcagatggaatagtccgatgggctttaaatgtaccgtggtcagatgggtttaaagttggcccaacatggcctttaaatatatatagggggggagagagagaggcggtaaccgaagacgttgttaggatcgccgtgagtttgagaaagatgtggggtacaacacaactgtcgtgtcctgaattggttgccgatctctccatatatatggatgagatcatatatcttgtttcacaacataaaccatctaattttacacaacatggaaaaaacatgtctataataaaaagtcccataaaagggaaaaataaaaaatgcgccgtctgtgaaaaagttaaaaaacacctttttggaaaacaataaccatccgattctagaaaaaaaaagagacaaaaaacatgtaaaaaaaccgttccacagaataaacaaagtatgattcaaaacctccataaaaaaagtttcctccgaaaaaacgttttcgcgaaaagaacctgttccgtgcaatgttacgctctatatatttctatctctatcaaaagcgaaataataaatttcttcttcgcattggttctcgacgtacttgttaagaaactacgggtgaaactacgggtgatgttatccacccaaaaaaaaataggaacaatggttactaatctaaccggtagagaagaggagatagctcctctctctccctttggtgtccctgtcgacaaccgacgcgatgttcctaaagatcgcatccctacggttggcaccgcttcacattgtataattgtactgttgatcaatgagaaaatatccgctcattcgctctattgtatcattcaattctctctcgctccaatcaacttcatccactttcaacggtactttttttattttcattcgtgttaacctactttctgagtcccgtgggtgccccccgcacatcaccagattaatttacttcaggttttttcgcacgtatatatccagttcatgatcacaatttgatttgatccgtcttggtccattttgaattttttttttgtccgttggtagagatcacgtccatcgctaaggatcgaccacgtcggtgccgatcaaatacgatgcttgcggcacacaaactttccttgagctgtatgtgccaaataaaagcagcaagcaaagtcttatggaaaaagtacaaattagccccctaactattttggtgaccgaattacccccataaactcgaaaatcagacattgctaaactttcaataccggataattacccccctcgaccgaatctagagcggttttatcctacgtggcgtacacgtggcaatctagtaagcattttattttttaaaatatagtgggacccactcgccataccttatcttcccctcttcttcttccttttcctctctctcgggttcagagtgtgcacggcgagcggcggcgcgcgggggcggatggtcggtcggcacgcggaggccagcgatggatagtgggcggcggcgtgctggggcggacgggcggttggcgcgcgtgggctagcggcggaatgcggagagggcacggcggaatgcggggagggcacggcgggcaacgggcggcgccgaggaggccaggagggtgttggaggcgacgggctacggcgacgagtcctcggctcaggcgggcgctgccgaggtcatccttcctgccggaggcagcggagagagaggtgcagagcctcttctctggttccgatgtggagtcggcgggatccacggcctccccccgtctctctctctctctctctcggctcaggcaggcggctggcgatgaatcctcctcggggagggcgcagcgagcggcgctcgtggcgcagagggcacggtgggtggcgccaaggagggcattggaggcggtgcgctacagcgacgagtaattcgctgcccatccacgtcgtccccatcgaccgtagtcgctgtcaaccggagccacacagccgcaccacacagcccaccgctgctcgccgccgctaaagatgccacctgattcttctgctgctcctggtgttccccgcttcgctgctgctcctgtaaaactccccgtcacaccggcaagcagcacacatctgtacatcctgtacatgcatgtacactgttcgtcgattcaatttctctcagaattcttccgtgacattgccacgggtagatcgcgtcattgccgcgagcagtgtgccagcgtccaccatgctgatgccaccctcgtccggtgggtggtgcgtgatggcgatgcccgagcgagctagccgagcagcgtcgccatgtgcaccgccgctcgctacccagctccgccctccgcctccgcatctcgcactgtggcggcgggtcttcgttgtgggaggagaggagcagcaggagacgcgcgagacgagggcggcgagaccggatgcgggccatgcggcctccacttccatcgacgtgccggagggcggcggggcagcagggggaagacgaagcagattgagcgccacttcaccgccttccgctcctgccacgacgccctccgcctccaccctcgccaagtcgccgtcgccctctgccatggccagaccaggccgctgcttgtcgccgccgccatggatgaggctgctgctgtggcgcatggggcagatggaagggtcgacgaggatggacggccacgcgtttcaggtctgcaatttttccccttcccttctttgcttctctcgttgacgtggtggaggcggcgcacggtccgtcgtcctggtcgtcggcatcgtggccgtccaaccacgtccgccagcgaacgcagagcaagctcgggtgaccggcgatggaggcggcgagttcgggaggtcggcggtgggggcggaggcagagcgcgtcgtccttggctcaccgcagccgcatgctctctcctctgctcaccgagagagagagatagagaaggaggagagaaaaaaacgctgataagtgggccccactagttttttttattggggcaattgtgtttttacctttgctttacgtctcaattgtgattttacccttgctttttagggttttgtgattttgcccctgcttttttgaaacgaagcatccgtctgccccggtttggacggtagtttggtgggcccgggatttccaaattaaacgaagaaagaaaatgctattataatttgtgaatgactattctacccttgcttcaatgaaacaaccaaatccccaaaccttgctgtcccgatccaattgaaaaccctagcatgctgggttgcaagcggcggcggcggccgcttacgcgacaagcggcggcgcgcggcagggaggagtggcggctcgggccagcacgcgatggagtcgggcgcgggcaagcgcggcggctccgtcagcacggcggccccgcggccgaggagcggcggctccgtcggcgcgtcggcgtttgctcggctaaaaactctgggttattacatgctttccataagttgtgagagcaggctgcaaaaacaaatagggccagctttgaggtgatctggtgatgtggtcattacttcttccacgaaattgtatgatattgttgctgcttactgctcgatccgtcgatatagatttgagctcttccagagttctccagccagtttacatctgagaaggatgtggtcagatggacagatgattctatcgtcggacaagtctcacagttggtgtttaatctgtttctgaatgcgagccagagggagattctgcaggtatttgggattgctttgggttacagatttgtaagtaaagtatagtaggcagctgaagttgtttgtttctgttgaagctaggaggacagttcttgtattttgctgaatttgatgctccgatagggctgcacctattagcgtttgaagtttggggcaattgtgtttctgcccttgctgtcaaaattttgtcaaaaatattgtgttctgacatcgtttataaactgtgttcaaattattgcgaaaattctatcaaaattgtccaaaatattgtgttatgtcaacttttataaaatttgtgaacatttaggtcccgtatgaaattcgcataaaattaacttgaaacatgtatcctgtgcaagccaaaacatgtccaggggtatatttgtccattcaccacacatttaacaccgttaccattagttaacagagtaggggcaggcaattgcttcgtttcaaaaaaacaggggcaaaatcacaaatcctaaaaaaacaggggtaaaatcacaattgagatgtaaagcaagggcagaaacacaattgccccttatttgtttttgctgactatatcgctacgtgtgtgccacgtaggatgaaaaccgcttcgaaccgtgttagggtggtaatttgtccggtattaagagtttggggtgttaaatgtcaggttttcgagtttagagggtaaatcagtcgaccgtaatagttagggggtaatttgtactttttccaagccttattggaacttaaactcctctcgtcacctagcttcttgctgctaccaagcagccaaacccaatcactgtgaatgcgacgtgctcttgacgatcgttcacgcaagatttgaggtgagagaaagtttccatgatttatccatatttttagattggttcaaccaaactacatgatatcaaacccaactagctctatatgtcgtctaaatagtgtcgagtctaaatttcagatctaacatattagagaggtccataatttaaaaaaaatcaattgctcttattacaatttcagatcaactagcgatattaatttgacttttgatattccatgcgtagtttgacataagtagctaaatgtggtgtagttactaattttgagtctctccggttctctcacttgcttttattgtagtcttattcacctttcacactttctctaactacctaggatttggtgtaccttttcccatagcaatgcacggacactttgctagttcaataaagaattgaataaaaggtgaaggatagaagaaaaatgatatatgtatttagatttggttaaaaattcagatccaaagttcaagatttgatttgagagaaagtggattaaatttgattagggttgatgtttggcatgagtgatgattttgacacattttctcctgaaacatatacgacacattttctttttggtgctatatgacatatttgtaagacatgtttctgccacaatgcatggaagaacggctaacagcttctgcccacacgtcaacccacaagcatcaccatttcctctacagtttgtgcaggtgcacagagaaaattctacagagttagcaaggcaggatactatgacaaatgcagtttcagaattacacccctgaaaccatcaaatattttcagagttattccgcggttttctttccctggctctgtacagatgaagccaaaggagtcatccggactcctaatttcatcatgaataccaatcaaaccactttggtgtgctgcattccactgataacttgaaacaaactagcaatagaagcgcgctacgctgcgccgcccgaatcaattgaagtccaatatgttcgatgaataatatgcatctactattcacccatagcattggtttatgctttcgtctatatcccataaactacccttataaaaaaaatttgcacatacaaaaatagtgtataggctaaaggagaaaaccgaaaggtatcggaagtttgaataaatagaaaaaaagggcaaattacatgccaatttcaatgagtttacagaggtttcaatgctacccctttttcctctgtacgctagaatcacattggactattggatgctaaaaacagaagacctaaatgcctactggtggtccatattaaatatatgcaaagctaaaatgaacagatggaaaatgatgttttttaagtgcaacatgcaagtgcactactcaacaacaatcctccgttatgtgcagttagtgacatcagtacacctgaaaaaaaatatactacctccatcccaaaatatatcgcaattttgagctgtgtacctaaacatacctttcaagatatagggctagaagtttttacattttgggacaaaggtagtagaaaattttaatagtaatgttagtacagctaaaacagtatagtatcaaccacttatatagagagataatattttcagtttggcatcacaattctaaacacatgaaaccaatttttctaccaaaagttctagcttttttggagtggagtagtacaaagtgctgctaccacgtggcaaagtttatgagcgaaagcatgcataatcaattaaccaaagtatggatgcaataacataagccttatagttctacaatgcatatatacttcttcaggtaggttccatttttttcttccctgttccttttaagtagcaggcaaaatatacaatgtggaaacaaagagcttgtaaaagcacaacggcagcaggctacactacagtttgacgaaacagatcgactgcacaacttttaggatttaaaagtgtgctttcacaaataatgaaaaaacatgtgtaaaatagtctggtgaactaaacagtgaaataatctctctgagcacagacatgtaaaagcaaaccaactgaaagacaaaatataaaaaagattgactcatgatattgctttacctttgcatcgtaacggttaggatatgtctagcaaagcattcccattgaaccagttgatgcacccttcaaaagaaatttacgtccgtctcagatatgaacaggaaatcagctttccgtaatggatccaatccatccatgtctttttcgacctaataaaaaaagaacatagagatatgtgatgaagcatgaataaatgaaggtcattctcgagactgctaatgttttcatgactcaaaaatggaaccatacttcttttaaagaaaatgattgaggacatatcctaacagtgtgtatagtcataatcgactgataacattcttttggtgcctttcgtgcagtggcgggcccaggattttgaacttgtgtattcgaaatggcgagaggaaaaaattttgttcatacacctaaaaacctaataattggcttgtatagtatcacacactaataattatataatatatagcgtatataacataaaattgagcataagttgcacacattgatagaattgatcatcacgtgaaattgtttaacatatagaaatactaattgataaacatatcaaagtaccaacatatggaatacaaaaatgatagaaaatgataaattgggaagaaatcttacaatttagagattaacttttcgacgcttgatattttgaaaataatcgatgatgtccttgtcctggcttgcaaaaagaattccctttcaatgaatgtaaccaaacaatcattcaagcatttttgtcccatcttggttctcaacttgtttttgatgtagttcattgaagaaaagaccctctacaaactaagcaaccaagcaagtatactaaatcaatcaattgtagttcccaatcctaaaatttgcattgcaattattcaaaattcgtgcttttgattcaccgtgtgtatgtggcagtgtggtggcggcgtggcccgttggcgtcttcgcggcctcggtcgtcggcggaaggcgggaaggggaggaaggcggctcagcgcccagccacccacacggccatgccgtcgccagcacaccacacgggcacacaggccacagcccacagcacgccgcgtgggcgcgcggcccgtcgctggagccggcgacgccgagtcgacgacgtgccactacctgcttggccgacggccgctgccggcgctgcgccgcagctcgcgcctccgccggtgcgcccagccggcggccgccccttccatgctgtggtgctgctcccgcgcagccgcgctggcgcggtctccggctcgctgcgacgccgccgccgcacgccgcgcccgccgcccacgccacaacacacgccgccggctgtggctgtctccaagcaaaattagggttagggtcttagggaattggggattttgggaggaggagtggaaagggggaggggagtgtaaaatttaggtccaatacagcagaaatggtaaaacaaggcccaaatgagtagtttaactctttttctttatctttttcatacatatatgaactatagagtaaatatacctattttttatccaaaatcttaggtatacatctgaatacccttgaattatagctgggcccgcccctgccttcgtgttttgtagagatggcatgaaagatacacatcaatgctagtctaaaattccatctcaagtgaatcttagggataaatgtgaaacaataaaccttgatgaggtaactaaagtagaaattaaatatttgaaatgggtgtaactcaatcatcaatgacataatggagctactgaaatggtgagaatcatttcctccattagctacttaaaagaggctaacagagcatgaatactcaattcacatcatatcacactggaagaggcattggcaacacatggatgaaaaaattcttcgtactcggcaacaccaacagaaaaaatctcttcatgcaagcaagagaaagctttaaaaacgaattggtgagatcaaatagtagagacacgaaggctatcaaagtacaatgtatatatggaagaaatttcatcagagcatatgagagcagtataataacgccggttgttatgttaccaatgtaactcagaagttgtactggatggtctttacaaaaattaagctcaattatgtagttatgttgttatacaacaatttgtgtattattcagcagatgaaatgcaagatgcatgacgacgatatacataattaaccttaatcatagaatcattatcataagattaaagatcaagcaaaatagcaatatagtctatatggctctggggaacttgaacggagctggcaatatttttcccttacatatgcaagcagtgtaagtaacattttacacttgatggtgtaaatatccatgtctaaataattttttgtataaaaagaattagtaagaatagctaatcaggttgtactggtcgaaaaagaattaaaacaataacaggagcatctgtaatatagaaacctataaagggtgaaggagatgtaacaatgtaaaataccttcgatagctttgataataataactgcatgcaacacccactaaaagtatgatctaacattgttaacgttatgataggatactttgcatagagatgaagagatcaattaaagaacacatctcaacaatatatggatttagaatacttcaagggaatataaataactctgatgtggtgacatacatatagttcttatgtagctaaaaataggaaagcaacctaggtaagttaaaaatgcgaggcgactgatagagaggattttgacattgaactcataaatcccttccctaagaaatgtgccatcacttgctatatacttttttgcttgtctgatgcaccctactgacatttttatgatcatattagacataaaagactaatgaattaccttcagtcacttactgattgtactttgagataccggccgatcaatgcagtaaacatttacccaatcaagttaattaacatgtaaagcaaagcagaatgggtatctacatccaagtggtgtatgtgtatttgcaggaaaaggtattaattagcaaacagacttacatatgtgatcctttcgtttatgcttccaaaaataaatgcaggcctgcacataaaaaaagttttgaatcaacggaatatggccttctaacaatgaaatctgtgcttcgaaaaatagatgcaggcctgcacataaaaaggagttttgaatcaacgaaatatggccttctaacagtgaaatttcagaagcataatgcaggcaaagcatttataacctcatatcttcagacttattgaccatgcaccacagaaaaatcaagtagaggtttctgttagatagatctcccacccgtacggcccaacggcacaacggaccttgaccgcgccctaatcgggggcgtccagcccaatggctggtgggctgtcacgtcctgataaattcatcccgaaataaaaatcattccctaaaaggaataatagaattaattaaaattcaaaaagaaattgacaaacactaaaatacgtgccagaaagattcgaatgtggtccggagaatttttgttaaattctccttggtctaaaaggagccctcaaattttacttgaattttcagagcaccgaaaatatttattaaacaacaacaacaattaacaaagtttattaaaaagaaaaagctaaaaataatccccctcctccctttgggccaagtctggcccaaagtctccctctctccccctcggcccgcagtccaagtccctctcccctccctttgtttttctctctttcctcccggcagcccactccctcctcctccttcctcccggcctgcctcggcccagcagcccggcccaagccaggtcgagccgagccagccgcgtgcacgcgcgccgcgcgtgcgctgactgcgcgcgctgaccgcgtggggcccacgcgccggtcgtcttcctcctcccgcacggcctcctctctctcccgtgaaaaccctagttcgttcctccctcgaatccgcgcgatttaagcgttggattccaaaattaattggggagaattaatcccctttccttcctctcccttttcccaataatctcccctttaatcgtgcactattttgaccggaacggctgcgccattcatggccgtcttccatggccgccgggcgccttttccgccgtcgttccccgctcctcccgtgctcggctcgcttccctccgctataaaacggaaccccctcgctccgttctctcgttttagccccctcccgcgccctccccgtggctgcaccacctctccccgcctcctccttctctttcctcggtgccggccaccctccagccgcccctaccgccttgcccgagcgccggtcggccgtgccggcgcctcctccagcgtcgcagccgcctcctctgcgccggcctgccctctgttgcccgcggaggcctccggaagtgcatccccgccggcaacagtggcgttgccgccactgttccgtcttcggccggctgctgttcatcgccggtacgccgaccgacgtcgccatctcctccgtcgacgtcgcagccgcctcctctcccccagtcagcccttcgtttcgcggggaaaccactggagacgcgtcctcaccggcaaaacagtggcgttgccgccactgtaccgcctgtgccgccttgccggtgcagcggctgtcgtcatcgccatcctccctcgacgtcgccgcgtcgccctccaccctggcctgccctcggtttcgccggaacgccgttgcccgcgtcggtctcgccctccgcctcgccggagttccttcggcaaccccttccgctgtgcccgtgcgccggccgacgtcgccatctcctcctccggcatcgcagcgtcaaggttgccctcggcctcgcctcccctccatccgaaccccgccggtgttcgttatcgtcgtctctgttcgtcctcgttgacgactcctccggtcggtcgttcgtcctcgccggctcgtcgtctcgctgcgccgccaccctcgtcgtcatcatagcggcgtgttccgcgccgtcctcgtctccgtgcagctgctgccggctgccctcatcgcctcctcgccggttcctgtcgttgtcctctcgtcgttcccggtcgtcgtggcattcgtccctccgtcaagccgttctcgtccgtcgtccgtgtccgtcaagtgtgccgctgcagccccgtcgttgtcttcgtcctcgcctccgcgtcgccaagcgttgcgccggccgcgtctcgccttcgtccaaggatcgccgccgaagtcgtcccctcgcctttcgtctccgtcattcccggccgtctccgccgcgcccgttcatcgttgtcgttccctcgcctcgtcgcgtggtggtaaggatctctccttcgctgccccgtcctcgtcctttcggtatcgcccgtgcccgttgtgcggttgtcgaccccggtacccgtgtaccggtgtcggtagttgttcgcttgtgcgtgtggtgaccgtgttagtgtgcccgctcggtagccgcgtggtttccacgtgtgcagcccgtgtggtgtctagtggagtccgtttgtcggccactcgcctcggttgacacacgggatctgcttccgtcgacccgtggactgtctctgtgtactcggtctaccgcggtcctttaggttgacatgtggggtccgcatgtcaacggcgcagccttcctgtcttttccaggctagcgcttacacatgttttatagttgcaaaacctaattataataatccgcaaatctccatgtaacagcattaaacttcggatgatcatatcttggtcatacgagctctgaatcgatccgttcaagtctcctaatgtttgttataacctaaagaaccctgtgctttctttttatgtattgttattgcttctttataggcttgtagctttgcttgtgtgcttcgcgtagtcttcgtcgttccggaggttcccgaagcgtggtttgcggtcgtcgccgaaggttcggaaggccgttatctctgagcaaggcaagtcacatcatccttaagcatattgaatcccagtttataaaattattttgatttaaattaatgcattatcgctttatttaaattcctgcgttatcactgttttatttagccatgcctatttacctttgttatgaccttattattattgctattgttattattaccttgttcaccctaggataaacaaaaccccaactagtgggtactctattcatggttccactagtatgaatttaggtagatgcttcgctgattaattaggcaacattaggtggttttataactttagactttgggaattctcatatcatttggatactatggaatggttggcttatgttggaattggacacacacctccccctctattcaaaacccccaaaatggttttaggctgggctcgaggtgcgtggttgggttttgttagtcgtacctcgggtactataaggattaagctcgggcctctgttgcaaagcactaccgtacttccacatgtctagtgggtaaggcttagtttgtggctcagtctggttataaacaaaagtacacggatggagatggacgaagtcgggggtcgatggacatctctaggacaaatgaaggctacacgagctgcggcccggtagtcgagatgtcatggcacagggctggtgtcctgctgctaggggctcaatcctgcctgcctgtcccggaggttccggccgtaggtggggttgggtcggtactcttgtttatggctaggatgggttgggaactatgtcacgtcttccgtccgtataccgtggtggtatgtggcacgtggttacacgtgaggaagatgtgtcttgtgggtaaagatgtacacctctgatcagagtataacctattcgaatagccgcgccctcggttatgggcaagcctagcaatgtacccaagttagtgttttaattcttaaaatttgcttaacaactaaaatgtggaatggttggcctgggttggcttgggacgagctgggacccagggtcgggttgccagttcggtctgaatcatcgtaggccttgggttaaggcaggttcgtgagggttcacggccttgattaataacactgtgtaactctaggatcgtctttataaaatggctttgggcaactaagtgacttttaaatgctgttttctgcaaaacttaacccctatattattaccccttgtacccccttgcattaatcatgcatctgccggtgtggcttgctgagtactgtggttgtactcattcttgctcaatctttcccccccttcagtaagagaagctttagagaagaagtcttaggtggagtcctggcttataccccagttgagcgcctgtgaagatggagccgtaggcccgctagtccgctgctgtttatttttgattgtcaggccttaagtgcctttgtaataatgtaaatattatcgatataataaagatgtgtcttttatatcatgtttgtgtggtgtaccccggcttttccttggacggggattaatacactagcgttcgggaaaatgtatttttctcggtcgcgacatgggcccccgtcacactgcgccatataaaagaggggtggaggccggcacggcacaagggacgagattcaccgccgccgccaactccaccctacaaaccctaatccgatcgagaggggccgtagccagtgacgggaaatgccaccgccgcgccacgacctcgccgggatcgcccacgaccaccgctgttgcagccgtcatcgccgtcgacctcaccggcgccgcatccatgacaaccgagtgccaacgacgacgatggccggcacttcttcatcctccaacacctcaaccggtcggtctatctaaatcctctcccgttttcaatctctatagttcaaacatcaatcccaaatagaaccacccgactagatctaacctttttcccgcgcgcgccaaaaggccgtgggccaccgggaaaaagtttaaattaggtccctcggggggccgaaaaagaaaggaaaggaatagtagcatttttccttttaaattttgtcaatttttcatgcaaatttcaatagaattttgaatagatttttgcatgttttacctctgtttaaatttgaaccaacgggagaatttttacagagagtaaattacagagttttgctactgttcatatgatttttatatagtttttccgctgcaaatagataaaattgatgaaaattagtgtttctaaaattaaatttcgaaccaacgggagaatttaatttttggaacattaattatgtgctatgatattgtaattttctgaccaacgttgataattgcaatgttatagttatggttatatatgttatgtctaattctgcccaacggtgatataggcttaatgcataatattttaatgttaatgttgttctcaccgtacatgattattttaggtagctacttcttgatgggttgcattaaagatattccgaccctaaaaggagataactacgcagaatagaaaagaaaactcgaccttgctttcatcttgggagaggtggactgggtgttgactaccccatgtcctatagaacctgctgaacttatcagaggtgaaaatgagtcagatggtgactggcaaaagagacagagggacaatgctcctctcgtcatgtcgtatgacattgaacaaaagaaatggtccttagccaacaagaaatgtttggctatggtaaagaacacgattgagcctaccatattgggctcaatcccagagtgtgacgctgtctcagagtaccttgaaagaataaagaggcagtttactggctcttcaaagacttatgctacacagctgatcaagcagcttgtgaccgaaaggtaccatggaggtggtgttagagaccacatacttagaatgagcaacatggcttccaagttgaagccaatggatttgggcataacagatgactttctggtccatctggttatggcctcattgccaaagcagtttgacaattttattgtcaactacaacataagtccagagaaatggaactttgaaaaactcattgctaattgtgtgcaagaggaggagagaattaaagagtcaaatggtggttcaattaactatgttaaagataacaagaaaaagaaccacaagtctcccacctcaaaagctaaacagtctcagcatctgcctcagcaacaacagttcgctgttgagaaagatcagtgtctccattgcaagaagacgggacattacaagaaagactgtcctgacttcttgaaaatgatcatggcaaggaaaggtgagaacattgttacatttgtaaatgaatctcattatgttggttactctagatccacatggtggattgattctggagcaattattcatgcttgtaattgtttaaaggcattccgttcgacgaggactacgcaaagaagagaaagctccattagagttgccaatggagttgaaaaaaaagttgaagctgttggagatcttcctctagagctcgcgaatggcttcacacttttacttcgagatgtcttttatgttccttctttgcaaagaaacttaataagtttatcaaagttggattttgatggatatgattgccgctttggaagtggcaaatgtgaactatggtataataatgcatgtattggtcttgctgtgctgtgagacgagctttatttgttatctctttttgagaatgtgaatgttgtgtcctcgttgacaaaagaaaacaagaaaagaaagagaactcccgatgtctcatcgaaactatggcactgtcgtttgggccatatttcgagggggggaattgagagactagttaagaattaaattcttcctccattggagttctcagacttagaacaatgcattaaaggaaaatttgtaaagagcatcaaaaagggtgcaaaacgaagcacaggaattttagagatcattcatacagatatttgtggtccatttcctgtgaaaagtgtggatggctatgactcgttcataacattcacagatgattactcccgctatggttatatttatccaattaaagagcgatcagaagcattggataaatttaagatattcaaagctgaagttgaaaatcagcatgatataaagattaaagtagtaagatctgaccgtgggggggagtactatggttgacatacgccttatgggcaagtccctggaccttttgcaaggttcttgctagagaatagaatagtagcccagtattcagcaccgggcgaacctcaacagaatggggtagctgaaaggcgtaaccgtacccttatggatatggtgcgcagcatgatgagctactccacactaccactgggtttatggatggaggcgttaaaaaccgctattcatattctcaacagagttccaagcaaatcggtgcccaaaacaccgtatgagctatggacaggaagcgtaccctcgatagctcacctccgtgtgtgggggagtcctgcagaggctaaagtatttaatccaaatattgggaagttggatcccaaaacagtcagttgccattttattggctatcctgaaagatcaaaaggctatcgtttctactgtccaaacagttatacaaagtttgtagaaacgagacacgccgtcttcttggaagacgaaatgattagggagagctcggtagttcgagaaattgatcttgaggagaggcgggtgtctgtacccgctccgtcgactcaggaacctttcttctctctacctgctgatgttgtgcctgcaatacctgtcattgaggtactggcacctgttgttacctctcctgtggcaacaatgaatgaaaatgataaacctgttatacaggattcaacagaaatggttgccacactaggaggagctgcaacagcctcaaatagataatgtgctagtacaggagactcaacaagagcctcaggtacaggatgtgccaaatgtgcaggcccctagaaggtctgaaagagtcaaaagatcggttatccgtgatgactataaagtttataatatagaagagtcgcatatggaggatgatcacacctcatatgaagaggccatgagaagcgctcgctcatctgaatggttggaagtcatgaaagatgaaatgaaattaatgaaactaaacaatgtttgggatttagaagaaattcctaaaggagacaaaacagtaggctgtaagtgggtctacaaaaccaaatatgactccagagggaatatagaaaagtttaaagcgcgacttgtggcaaaaggcttcacgcaacgagaagggattgattacaatgagacattttctccagtctcttgtaaagattccttcaggattataatggcactagtggcacattatgatttggaattacatcagatggatgtaaaaacgacatttctaaatggagatttggaggaaaaagtatacatggcgcaaccgaaaggttttgtcatgaaaggaaacggaaatatgggatgtcgtctaaagagatccatttatgaattaaagcaagcttcgagacagtggtacttgaagtttgatgggacaataaagaaatttgggtttcaagagaatgtcgaggacaactgtatttattcaaagtttaagaatgggagatttattttcctaattctgtatgtggatgacattctactggctagtagtgatgtcagtctactgcaggaaacaaagaaatttttgtcctcaaactttgacatgaaagacctcggtgaggcttcatatgttttgggcatagagattcaccgagatagaacaaagtatgcattgggactttctcaaaagacatatatagaaaaggtgttgaagaaattcaatatgtacagatgcagtgctacacctgctcctatagtcaaaggggaaaagtatggggcatcgcaatgtcccagaaatcagtatgagctcaatgaaatgaaaacaaagccatatgcgtcagctataggaagcctagagtacgcgcaagtgtgcacacgacctaacttggcatttgttattgggttacttggcagatttcagagtaatctaggcccagagcactggaaattggtaaagaaagtcttgcattattttcaaggaacaaaaggcctcatgctgtcttatagaagatcagaatcgcttcagattatggggtattcagattctgattttacaaaagataatacaaagtcaacatcgggatatgtgttcaccctggcaggaggagctatttcatggaaaagctcaaaacagactatcactgcagggtctactatgtatgccgagtttatagcatgctatgaggcaacggggcaggtgaactggctaaagaagttcatactcagtttaaaggtggttgacagtattgagaaaccactaaagttatactgcgacaacgaacccgcagtaatgtacgctcacagcaatcagtcaagtggtgctgccaaacacattgacataaagtactatgttgtgaaggacaaagtccgggatcaaacaatcagtctcgagcacattagaacagaaaggatgctcgcggatccactcacgaaaggcctaccacccaacgtgttcaaggaacatgtagccggcatgggtttaagggaagccttatgaatcctggactacagggcccaaaagtaaagtatatgtttctgaatagagatgtgtatagtggctgtcgaatccatcggtgattgactgtgacgatgaaacatgctctattcacaaatctgtgatggaatagaaaaagctaaaagaaatagtgagatcaagggggagaatgttagatagatctcccacccatcgggcccaatggcataacggaccttgaccgcgccctgatcgggggcatccagcccaatggctggtgggcccccgtcacactgcgccatataaaagagaggtggaggccagcacggcacaagggacgagattcaccgccgccgccaactccaccctacaaaccctaatccgatcgagagggggcgcagccagtgacgggaaacgccaccgccgcgccatgacctcgccgggatcgcccacgaccaccgctgctgcagccgtcatcgccgtcgacctcaccggcgccgcatccacgacaaccgagcgccaacgacgacgatggccggcacttcttcatcctccaacacctcaaccggtcggtctatctaaaccctctcccgttttcaatctctatagttcaaacatcaatcccaaatagaaccacccgactacatctaacctaggtgatcctagagcaaagtctaacagtttccaccagtcatataagcctgatatgaagaaagcatgagatgcaggactgtaaagagaactgagaaatcaatttgaggagtagtatcagcaggaggagatttggctgctgccacccatgtcgagtttcacctgttggttaccgcgtgcttgtaggcgctcgatgcggcacagatcttgcagaaccaagttcgcgtgggatggagaaagagacggtatggcggcgacagtggacatcgaacttgcaagaaggtggcagcagccgctgctagctcgctgggaagacgatgacggtaaccactggctccgcacggcggcagcaacggctggctcaacgagcttgagaggaaggcagcggctccggcttcgcgagctcgaggggaaggcggcagctggccacaggctccatgagaccatgagcaggcgtcggaggatttctgggaggggaaaacgtgagacaaaggaaaaaagaatgaccagacaaccatcgtcgccgagccgtggttgtcttcgtcgcagtcgtggccgagcctacgcagggtggtggcggcggcctgctgaccccgtctgggcagcggcggctctcacccctctttagggcatcggatccgctggtaccggcggttctcattcctttctctgggctgccggatccgccggcgaggagaacggggtcactggatccggcggccccggcctcctcacggggagatccggcgactcgttggtagggagcggcaatggtggcatggcgagtaggttgagggagtggaggagaagggaggctgcaatggcggcacgacgagtaggttgagggagtggaggaggagggagctgcggcggcgacgacgcacgcgagggaaggaggacggtgaggctgcggcgcgattggaggaggtgggcaaggcggcgtgcgtggggaggagaggacgggcggctagggtttgtactggctgaagaatccagaccatccgtttccaatccaacgatctgacgatggtggaagggtagtcatgctgggacacgtggacggtcaaatcggccttagcttgtgatccgacgggccacgttaacggggatgtacacgctattagcggaaagagcaagggtttttctgaaaaaaaaatgatgacgtggcgccctaatcctcagccattcccacggcttttaagtaaacaaattgctcatgttcatgtacttgattccatcatcttcagaatgtgttttaggttctcccttttctccctgtaatgcattggcgcagctagtttgaaattatgaatgttagtacctgacgtccctgtactgcatttgtgcagatagttacctgacaatgttctactaactgaatagcaatgtgctgtacttgacaaaagaaaagcctcaaacctgttctaagcaaatgagggggtgtttagatcaggggtgtaaagtttttgcgtgttacatcggatgtttcatgggatgtggcatggggtgttcggatactagtgacaaaactaattacagaactcgcaagtaaaccacgagacgaatttattaagcctaattaatccgtcattagcaatgtttactgtagcaccatattgtcaaatcatggagcaattaggcttaaaagattcgtctcgcaaaatagtcgcaaactgtacaattagttattttttagactatatttaatactttatgcaggtgttcaaacgttcaatgtgatagggtgtaaaattttggggtggatctaaacaggctctggaaaagaaaaagaaaaagaaagagaaaactaccatgatggatagcacaatgttacctagaagaggcccgtggtcacattaaaagtcagtgctgctacagggagaaactattctaacttttgaggggacagccactggtgtctaaacc

SEQ ID NO: 8663 - DNA, 59446 bp, Oryza sativa
  unsure (1)..(59446): unsure at all n locations
ggatttcaagatcgcaggtatcgatccgccgtccattctcgcagagttgcatcactgaccgtcggatcgtctattccgcccatttcatttgcctcctatactttccgaagtctcaaaccccctccctcccctcccttctcccgccgccgccgccgccgccgccgccgagcatgccgagcgccttccactccctcctcctccccgccattcgcaaccccaaacctagccgtcgccgcggccgcggccgcggcggcagcaaacgccccaagaagaccaccaaatccaagaaccgcctcgccgacgccgccgccggagacgccaccgccttccacctgaagacctccgcgcgcgccggtccggggggtgccgggagcggccggcgaggcgatgggggatgcctcgtgcagccgctcggcaacctcctcctcctcggcggcggcggcaacctccgcgacgcggggctcggcgcgctccgcccgctccccgacgacgtcctcctcgacgtgctcggcctgctcgcggcgcgcgacctcgctaggctctccgcggcgtcgagggcgctctacgtcgtcgcctcccacgacccgctctggcgggcgctcgtcctcgacgagctcggcggggacttcgccttctcgggctcgtggcgcgccacctacatcgccgccgcgtcgggcggccgcgcccacctccccccgcggggcctagagatcagggggttctactccgactacctcttccagagctggctctgcgccaacatggagatgcggccggagtggctccaccgggacaccatcgatcgccgccgcggcatgtccgtcgagcaattcgtctccgaattcgaggagcccaataggccggtgcttctggaaggctgcctcgagagctggccagcattgcagaagtggaccagggagcacttgctgaaggtctcggccgggaaggagttcgccgtcgggccggtgagcatgacgctggataggtacctccagtatgccgacaatgtgcaggaggagaggccattgtacctgttcgatgccaagttcaccgagaaggtgccggagatggggagggactatgaggtgccggcgtacttccgagaggacctattcggggtgcttggggaggaaaggccggaccaccgatgggttatcattgggccggcaggttcagggtcgtcgtttcatgttgatccaaactcgacatcggcgtggaatgctgtgatcaagggagccaagaagtgggtgatgttcccaccggaggtggtgccgccaggagttcatccaagtgcggatggagcagaagtcactagccctgtatctatcatggaatggttcatgaatttttatggggcatgtaagacctgggaaaagaggcctgttgagtgtatatgccgggctggagaggtggtttttgtgcctaatggatggtggcatttggttatcaatctggaggaatctattgcgattactcagaattatgtgagcaggttagagttcacatctcatgcttctgtgttgtttttattgtttcactagacgcaggactttgttgttagaaattaagcgaccatcaagaagtgctcttttatggccttctgtggtaatgaacataaaaaagggcatcaccatgccagtaataacagtgtatagaacaaattagaatctccagtacaaattcaaaataaaatccaatgttctaggcttgatgcttttaagcatatgttcattcacaaacaatctcagtggtgcacttatgcttttacttaattctatggatgttagctcttaagagattcaagtgtatgtatgttccttggtcgtttgtaggatttacaaatgacgatcaactgaagaaaagtttctgccaaataataattaatgtcaattgtctttctggttctaaaactatttaaggtcaacaaaggcttatttctatactttacaaatgatgccctcttcactcatcgagtcaaaattgactctgtgtgtaagcttcttaggagtagcaattaacaaaagtagtagctgggttctcctgatgatgccaggtgctaatggaagtatcgtgtagtgttgacgaaggtccctcctgatgatcctccttttgaaagaaggcatgaatcaggagagtgttctcatttcaatctgggttgctgtatagctttgatgtggaatcctcttgaatcttgtttaattgctgaacttgatgtgtccattagtctgcatgataactgttgcctaatcctgttacatctttataaatgacatgctatctcttcttttcccctttgaaatattcaggaggaatctgttgaatgttcttgactttctcaagaggcccaatgcaagtgaacttgtatcagggactacagacagggtaaacctgcatgacaagttccgcaatgccatcgatatgacttatcctgggatgattaaacagcttgaacttgaagctcagcagaaggctgctgctcgcaagaagaaagtctcgttctgggaatctgcggtagatgccaatactggaggattcaagttctcattctgatttcgtttctagcagctaggtctgtcagtctgatacttgattgctgttcttggtgaaagttcgacgattttgccattccatttaaatgctcaatcacatctgatttcctacctgaattcaggtttatgagcctatgcattgtctgaatctgtcttaactgtatcatcttaaattttggaggaatgtagtcccagacatgtatttcattgttgttgttgttgtaacatgtagcttacacaataataaattgatcattgaccttgtgcaatctcctatcttgtctgacttcccagatgtggcctctaatcttgtattctgatgtggcctctaatcttgtattcttagatgttagctttggtcctttggacgccttaagttgattagtggtacatctttttgctggtgaccgggcgccgctaagtatttgactctctgcggaatcttgcttcaaactgtatcatgattcatgacagggcaatgaattcacattaccaaaaggaatagagttgtatgtttcatatagacctagtttattggattaaacatccaaatcttagctaaaatacctccattctcttttaaatgcaggcaacattagtatctttcgaccaattacaaaagtactacgtattttcttttggccaattacagaagtacatgcctttgccttgtacataggttttacttagtttaatttgcttcgtaacattaggaggaagaacgctcctcaatcttcagaaggctgcaggtgtatctgactttgttctgttaaggcttacacatcatgtacagctgcatgtttgtaactctcaattgtcaacatgacaacatgggcatacaggagatactagtagattacaacaagttacatcatgtgtataaggctctaggtacatatatgcatccatattagtctttacgccttttgctcccaaataacaactgaaatctgtacaattattccaggaagcttcagcttttcagggatcactgcagctgaaaatccaacctcttgtatataccaggcagaagcaagatcccaagaggcaaaaactgctgcttgatccatgtatggctcaccaaaacaaatgtgcaatgaccatgacatgtgtgagaaggtgtttttctgtaatcgtaaaatcaatcgacggtcaaccaaatctttgtccgtatcatcctaagcaagcgttctcaaccatctgaggagcccaagaagacccgcatctagtacaggagatctttgttccagtcctggatgaggatcaaagcagcaaacaaacgtcatttttctgccaatatcagcttatgttgttcatcagcagacaaatctctctacttcttagtccctaagaccctaacataaataaagctcccaatccttcaaactcagttcattttagggggatgttagtggaatctgaacttaccaatatcagctgcaactcgatgagcacacatgatccctgaaaatgccacagcaattacaccttgcccaggaaaacagctgtcgccaacacagtacaagccatctattgactgtaaaataagcagtaaattttcagtccaacaatattgcagcacaagaagatttcaggacatcaagtcaacaatgcatattaacttacagtagtattgaaaggcattgctagcaatccctttggtttaccccgtggcatgggtccatatgtaccatcatttcgcgcaagaaatcttcggtgtgtttttggtgagcctacctgacaacaccaaatgttcaacaagtcgaaagcgtgttagcactagaatcaaaactatcccactacaattttttgcatgatagcagcatttaaaggtcaaacaaaaattagtcaagatctgaaaagaacagtcttagatcctgacgtggaagaactataagaacctacctccttgaggactattgaatcctgaagaccagggaacagctttttttcaagcctctttattatctctgtcgccacaagctcctttttcttctcataatccttcctggacagaccctgtggtggatattaggaataaataactaaataagtacattggtacaaaaggcttagtttctcacaatttgaaataaattagattacagcaagagcacagtccatacttcccaatcctctatccctgcagttgtaaaaatatgaagtatatggtgtccttcgggagccaaggatgggtcaagcactgtagggatacttaaaaatatgcttccataaggcttctccaaattagcccagtcatcctggcaattgtaattagaattaagttattatggactaaaactgttgtgtaccaacttagcattgtgtacccattgcctgtgatatctgatacccacagtggagtcatacctacctcaagtacaaaatggtggcaatcagtatcagcaggcaaaactgaggctttgacacccatatgaatggaaaggaatgatggtgctttaacataattcttttggaagtttttctcctcttctggaagctcttcaactttcaagagtttacctttgagtagaagtaattgttatttttatggacaagtacaagtggttaacaaataataactcaagaacaaaactgagttgtgaattttgagcaaaggttgtgaaactttcagcaaataatattgtaacaaatgaatttcaacgagccgcatatttttcaaataaaaatagataagcaggattaccaaatgtatcccatctggtagcattcgatatcactgttttagcaaagaactccttcccatttgataacctgactccaacctatagtaatgaaatgctcagctaacaagtcgataaaagctccagatatttagtctaagtaagatgaacttacagctttgccattttctaaaattacattggtcacattagccttgtagcgtatttcactgcctttgtcaacaagcccatctgccaaggacatagcaataccaccaacaccaccaactggatagttaattcccccgaagtgcctatcgcacaagacctgttatttcacccttgagataacagaaatttaaatgaatcagaagcaaaattctgagagtcatgcattccacttaccatgcttgcattaatcatgggtgtttgcaaggcattgactgtgctcacaataaagcactacaaacaaagtgaataaactggtgttaacagagaatcacatggtcgacgaaagaaaaattgaacaagtgagtaaactcacaaatatctcacacctcagcatctatgaaggagagtaactgctgatcttttatgaacttgcgagcaatatccccagcattctgtggcagataataagctgcaagagagataaagtcatgagttccattgtatcaagtcaaccaatctgattaagcagtaaatatgatgtactgatcaagttctcctctcaatcatcctttcattggtttttggaattgcatttgattcagctggagcttttccatagggaatacaatgggtcagctacaaaatcttgtagaggaatatatggatgcggttcttatacctagcgtcaaacattccagaggcttttgaaaaaattgcccaaaaagatatagaggctcctcaagggacttcagctccaaagaatttaatgaattgaagatctgctcatatatgagaaaacaactgtacttgatatatgcttgcaaagagtgaattcaaaataccaaaaagaaaaaaaaagtagttgtagataagagtggagaatgaaaatggtatcacagtaccttccaacatgtgccatagaatttcaggattccttccttttcatgaggaaatttattaaccagctccgtgacgaagtcatcatactctctatgcacaagaactgagaggtcaccaggtaggtggaaatgaaccgtagaaggatccggtataacttccatcttatgcccaactgcttctagtgcttgtgtaatcaaattcaagttcccctggatcacagacacaaagtcatacttaagataaaatcaacactcaagagacaaacaaacattatcggccactagtcccacccacacatggcattactctcagcaacagcaatattgcacacccattcacccaggcatgcccactgccaagtgccaacctatattcctaagttggacacctgtagctgcgattttcgccatcatcgcaacattccactccaatcaggtaaagtaccttcatatcagggcattacgaggcataaatgcacttgaaaagcaataactttctcatcgtctagccaacaacatccaaatcaatccctactttcccttccccaattcttgccgtcctcgacaccgcacttcacatagtgctcccagcaatcaatcactcactcaaaaccaaattcgccaacgcaagatccccagaatatactagcagcaacgcaatcatcccaattctcatctacacccaaccgtgctcagtcactgtcctcaccttgtcggagaagccgaacatgacggaggagccgacgtcgaaggtgaacccgtcgcggcggtagtacccggagctccccccggggatgacgtacttctccagcaccagcaccctcgcccccttcgccgccagctgcgtcgccgccaccatccccccgatccccgaccccaccacgatcgcgtcgtactctcccccaccctcctcctcctcctccgccttcaccaccgtcttctccgccgccaccgcagccgccgccgccgcgcccgcgcctttcctggtccctcgtcccagtgggcgggcggtggacggccggcctactactgctccggcggcggagggagcgaggagcggggcgcacgggcgcgcggcggcgaggaggaggagcggcatggcggcgccggtgaagcgcgggagctcgagctgggtggggtttttatatgggaggagaggccgcggtggaatctgcagcgagaggattccgccgcgggaggtggtggaggttagtggagggaagacgagggcgcggcggatgaggcgaagtggggggccccacatggcagcgagaggccggggcgaagtgggccggtgaccgttggtgggcccgccatgggcggcgacgaggttgggctgcgcattgagcagcccatgggccccgctttgcttcgcttatcgtaattgcccacgtggcacacagtaatagcggggttagtcgggctgggaccccacgtgtcggcgacacgttcccgcgcccatttttctttacattatcctcggagacggtggccgacgtgccgttattacctctctcgaaagccgcgcccctcgcacgcgctcaccgccaccgcgctcactgacgtcgtggccccaccgcctctacccccccacaaaaggcaatctccaccgtcacctactcctaccccaccataaaaggtcactgacaggtggtccccggagagcgggtcggggcaggcgaagcggtcaaaacgtacttaaaaggcgacccgcttgtctcactctctctctgctacagctagcctacgcggttgacatgtgggaccagctttgatggtggccccacgtgtcggtgtgtgggtaggtgggggcggcgtcggggtgacgacgggtgtctcggttggggtgagggtgggccccactggggggtggggtgagggtgggccccactggggggtggggtggtggtggccgagtggagaggaggcacgcgcttgctcgcctcgtcgtctcgatacctttcttctcctttccccatcgcctcctcacccagagagaagaggaggttggaggaggaggcgaagaggctagctagctagctagggtttcgtgctccccatcgcctcgcgcgcgcagccggatccgatcgggcgtcctcgtcggcgtcggcggcggtgcccctggtaaggccggatcccgatccttcccgttcggttgcggtggtgggtggtgtggggggcgtcggcgatctgggggcggttgggcgagctgggtccaattttggtggggggcgcggggttggattcctcgggttgtggggtggggtttggatgggggggaattggagacgatgtggtgtgggttgctgggcttgggtctaagtagggatgtgtttgttcgggtttggggtttgatgtggtgagaattgggggggtgttcgtgttgtgcgattaggggaattcgcggtatgctgcgtgcttttgttgaattgtgtgagaattttggattttaggtagttctattgtggggtggggggttaattgatttgggcgtgactttggatcgtgattccgggggacctgagccgtgccgtgtgaaatcgcgctgattggaagggtactcgttagaccaaattgttctgttctggggtttatgtttgatttggtcggcgtttgctatggtttggaggtattaattggagagaatttgagctggttgaggctctaccgagtaaaaatgggtcttgtgctggaactatgactatgattacatagcattacctgatagaatcattatggggcttctggaattctgatatggggaatataactttcttatttttcccatgtttggcttgatgagttttgacataactggtagtttttgttggctaatatgttcatttgctcggagtatatatcctatgaaaattggcataaatcttgcaaatctagttttcattagggatagaagttcttgaaaaaaaatgaactattgaaagggattagggaggatttgcactacagttttacaatatctcaagatcattttcaactaactcccccaagtgcaaaagatcatacttggtgactagcgagcagtgaattcgtatgcactatacagcaaatgaaaatgagtttaacaatgcattttacttggctacacaacttatctgtggtagttttttttttttggcaacttcggaaagctatactttgttaaaactgaatttgaacacctgtgccattgtttacaggctctttttttcaacaatataacatgtttgtttaagtgtatactatatttgttttcatgggatcattttggcctcagctgtgaataactgatgtgtttgctttccatcgtgaagccattttgagactttggtcaattgaagtgtttatattctaagcccttcttttctccatattctagatatcagtgttgtgattccgttgcaatggcatctggaactgatgagaaagccaagatggagggtttgacatcagctgcagcctttgttgagggtgggattcaggatgcatgtgatgatgcatgtagtatctgccttgaggcgttctgtgagagtgacccttccacagtaagatgccttatcttcaattgtatgttttttctcatatatgacattcttttaaccattttactgtgtttctttgttatgtagttgactggttgcaaacacgagttccacctccaatgcattcttgaatggtataatattgaccccagtttatgcatatcattggtgaaaaattcttatatttctgctgtgcgctgtactttgtctgtctgaatttatttgagttgttcctggatcaactgcaagcatgttgacattatatatcaatatcaaactatttgggtcagttttgatttcatgtggtcagctttgcatgcttgaggttttgggtagactatcaactgttctttttctattgaggagttgttataaaattcagtgaaggaatgaaccagacttctagtacataatatcctgctctctctagggtgctaatcccatatatttgtgcattgatgaccatgatacacctactgtcaactttttacacttcttccagtttgcattaaacgtcagtgtgaccagacaatatacctaaatactttcaactatcaaagtatctacctattagtatagtttccatgtgctaatttcagtatttccatacattcctatggatgcatgcatatcatgattgtttaattttattgagattaaatttctgaaagccctactacctttggtaaaaccatcacaaaatcacattttcaagtgattgtttcacaacatttgatctttcgaaacatttgacaaaactgaactttagttatttccatcatactcaatgtacttggccccgcttgatagttactagcatatatgttccattgtgaatttggctaggtttgtgagactaacagctggtgtcgatagaatacaatgataatgcttaaaatgtaattttgtgaatcctttttttaataaataaatgaggcctgttatgaatttttttctcaagattgcagtttgcgatagctttagcaaatgtagtgctgttttatgaaaatgtactcctttattaattgaaggggtgctgtattatagaattattcatagttttgttcatattacagtataggtaaataagatttgctatatatttatatagatccttcttatatatagtggaattgtgaaacttcagtggtagttaactagctgtaacttgtaaggggatttctccagagattatgaatgagacttcacatggcaaattccattatcagttcttttttctgtgtaaaaagatttttcatattgatgatcggtggtccttttgcataggtgtcagagaagttctcagtgtcctatgtgttggcagcctatcagtttgaaggatcctaccaggcaagtcgtcaaaatactttatgttttctttgcctatacagatatcaggcagaattttaacatgtaaaagggtactaacctctgtcctactaatatgtcagtcaagagctgctcgaggcagtggagcgtgaaaggaatgtaaggaccaatcaaactcgaaatacaactatatttcatcatcctgctcttggagattttgaggttcagcatgtatgtgttatgaaactaacttgagttttgatatattcctcctgatttgactagtgaagcattttctagtgttaacctaattagcaagatgaacttttgcagttacctgttgttggtaatgatgctgaacttgaagagcgtatattacagcacctagcagcagccgctgcaatgggaaggtcacaccaccttggtagaagagaaggacacaggggtcgttccggctctcatggtcgtccacagttcttagttttttcttcgcatccaaacatgccttctgctggttcagtttcttcatcgtccgttcaaggggaagtggataatgaatcaagtcctgtccacacaactggtgaattatcactgcatgctaacacccatgaagaagcaggcaatcaaagtcctgggatgcttacctacgatgctgatcaagatgctgttgtttcatctggaaatagtacccctgtatctagccctaggtttttcaacaggtaaattgagtcacctatatgcatgcactatgtccttatgttttttttttatgataaccaatatgatgatcctggtgtatcaggaggcattccactgggcaatcaactccagtaaacaacgacagagctgggccttcagatcttcagtctttctcagactctctgaagtctcgcttaaatgctgtctctatgaagtatggagttttattttcttaagttgcttcgaaagttgtctatcaacttttatgttaaatctgtttctccttttgtccgattcaggtacaaggaatctattacaaaaagtactcgaggatggaaggagagacttttttcgcgtcattcatctgtggcagatcttggttctgaagtaagaagagaagttaatgctggaattgcatccgtatcaaggatgatggagcgtctggaaactagaggtagtaatggtagaacaagtgatggcccagcaatatccacttctgaagttattcccagtacagaatcaagcaatgagagagttacagaaaacaatccaactactgcagcgacaagtagtggcaacacttctgcgtcttctgccccttgtgttacaacaaccggttcaaattagcatgttataggttccgaaagaaggcctgcacattcccattcttctccatcaaaggtactacattttcaactgaaagataattattgcgatatatgtagttttagtatgcattgcttctagacggaaggataatttatgcactcaaccgtggctgtcttaccttgtaatttagtcatttagttctagttaggttaagggttagttattggttgactctcacatttgagaaaatgccatttatgtagaaacgggaatttcattttttttttacatccaagcaagagacgctgccaacaattatgtttagttaaacaaatatggatatgggttacgtccatttattagctccaaatgattatcttagttcaactgtctgtttgctcacaactgattcatgttacacggattacaggattgccattgccaggcatgggcaggtgaccaaaagcaacgtcatgttgtcatcctcagcattgcataaatcacctccagaaaatcggaatgacaaatttgatgtattggtttgataaaagggctcagcccgaggtattaccttaggatgccgatttgttctgcttcatctatgtaaaaagggaaaaaaatcagggacaagtttttaccggtataaataatggatttggtgacataatagcaatcataatcgtgataaatatgattgatacagcaaaattttcctactgtgcgagaaagccaaactcatcgctttctacctcctgttaaacaggatgtttgaacagtcgctctgttcgttaaattgttttcataaaagatttgctctcagcaacccacaaattttaaaaaaatcatgtaaattcgcacgaaatctagctgctgctcttttttctttttcttttttttttttgccgttgtgtgcaaacctcaccgttctgtagttttaagtgctgacctgccagatttgccctgcgctcacgtttctgaaagtagttatctttgagccttgtcaaatttttatggagaacctggctaatttgaaacaagcttcatggttttcaacttttttttccctaaatgctactgcacttaatattttcaaggtcggattaggcaaacttatatcacgttctatcaagttgaaaagttaagtccacaagaccacaacagaatatatttgctggcagcaaaaactggaacttgaaggggaggtagctagctcagcaacatatggcatcgttaaatgccgtattgtgaaatatatttgtcaataacaaaacaaacatgactttcacttatatggcattgtgaaatgaaaacatgtgtcaacaacaaaaactatagtactacaattcagggtgtaggttactagctcaacaacaaaactgcagttcagaattgcgtgatggctagtacatgttgcaagtggcaccaaaatcgttacagctgtacccatagcggaacattcttccgactgattaagcaaatatccctacaaagtcgctaagaaaccaataaaagaatattttctgtcaggggaatgagaaaccctaaagaatagcctcaatcctttgcctcttgtgatcttacaactgacaagtagatatgcctctgaagattaccacagggtcaagatgccatctccaggcaaagattaagtgctgacttaactagatgaacgttcatgtctcacacaaacaagatcatctagcttgtttccatccatcttgtacagagatacgccgcccatctggacatggtgttcctgagcctccattcgtaagctgtcgaatgggagtacctcccacttcttgtagtttgagctctttcgtgtttcgctcatgtctggagttcctgatacaggtccgtaatctgggtcaactgttccccataccttgcagttgctaaatggccccatttgatcagattgaccagtttcatgcctttttaaacgaaaagccgcagcatgcgctgttctgatctcttccctgctaggtatatccgaccaatcttctaccctctttgctctcatgggggaatggattcgaattacctacatacaggaaacagcaattagacaagacaacttcatatagacaaatcagacgaaaacatgggcgagagcctggaggcttactccaaggcactccagaagttgataataagcccgcccttgcagtggattgtgtcctttccttgggggtgagaagtaccttgtcctgaaacaatgaagtgggcataaaacatccttgcacaaaaatcatagagaacaatagtaccatggatatctacatataacacatccatgcattgacttaccattctgtgtagttagggtcaactgtgaatccatacatgtcgataatatcacacatggaaagggccaattctattgacttcataccagtccctttagcacctcttctcaagactatgccttgaaaaagataaactgggtttggaagttcctgccagttaaaacaattgccaagtattcagtgtgaatgatttcagtccccaaaaaccatagtaacaagaagaaaatcacaacagcatgaaattcatgcttcacattagtatgattcaagaagagacagatagtgaattgtacaacatgctcagctggacgaaagaaaaatgtgatcatataaccttttacctttatcaccgcattgatttctttgtgcgtcaaactttttataataagaacctcatcagctgcaacaaaagcaggacagttagactcctgtttaaaagctcatctagtggtgactactataaaaagtgatctcatgcatctaaaatttattagaagagagcaacttaagtgaagtataataaattcctataagaactagttaagctacaaataaaagttatctggtgttattacacaaatgtccttgtatggaataatatattagtcctcaagtgatgcacaatactaattgtctctgcaagcttaacaaggcatcttccaagttgcgaaaaccagaaatgaacgacattgccatgtgctttctaatagttcgaggataatagagaacaccaatacgaatattatattttctctcatttatgaaaaagtaaattaaaacactatcaggattgaagttatctggaagaaaccaggattacagcattacaggagccctttagtattggcgccatgtttcgagcagcacccctgacaaccagtcgaaagtcccttttcaacccaacatattttgcatacttctgcaggccaaagataaaataagagcaaaattagtaaacgagtgtcaatctgtgccaactttagaagaaaatataatttttagatgtccggagttaggatagaagacacctaaaataacaagaagctaataagatggcaaggggttcagggtaggcattaagaagagagaatggagtaataacttaacaggaggagcttagctgcctacggggtcaacaagaacacactaaaataggccattcacataagttagcttagatacatatgaagtgttagcttagatacatatgaagaactcaatgagattaccttattaacaggtgcttcattatctcggaacacagcatcatgtgcatcaatctcttgtccaaactctgttttcaagagatcccctgagttaccaacaacagcacatgttgcaaactggcgaggatgaaaaggaggcttagcagggagtaaaacactaagaagctcttcgcacaaagtacgattgtagcatttgtcagcaccgctgcatattttttaaagcacattaaccagtatgcggattaatatcacttcgttacgaagaatagtgcaaatgtgcaacaagtatcaaacttacagctgtgcaatccttttggctgcataatccaaccacccatcaggtcgcacatctaagtactcccttgtcaacacagtcgtcatgttacggtactggcatcatattagcattaacacataagtatatattctaataaacacgctatttcataattcataaaccatgtactaacctgttcccacagaaggatagtttcacagacatcatagttgtattctagtggttcaaaatatttgaactgagtgttgtactgcataagtcaagagaagtgatatcttgagtggacctttgttgaaggacacaaatccgttaacagaagtaactgcatgtgaacatgacagggaatacttacccaagtgctgttggttcctttaggaaatctaaggactagcttgcaatgatcaataatatctgctgtgaggccaagtccccttcttgcctaaataaagttgagatttcagaagcaagctagaaaagaagcaagagagtaaagaacatgtaaatgaaacttctactgctgatcaaaggaaaatgctgcaaatctgtaacttataatacttgagaaggtctaaaactgaaactgagtttcacatagattctagatgaccattttgcagattgcctcattgttcattatggaatggtgtcctataaatcgcatcctttctccgaccaaattcatgcataacaaacaagaactaaacgtaacaaataagaaccagcaatttgatgaataatgtgatcccacgattgactgattgcaaagacaccatgcatggatgaacaattcatggttgtttcagcggacacgacacacgggtagaccataacagtataacactagtagctaattcactgcccctgcccttcactatgacacaatccacaattactgtgaactcaaattgatctcttcaaagcagaaatgtgcttagttaaaaacaatcaaggcttccatggcaggacaattatttgaattcaagagagcacagagcaagccggggtcacgcaccacgcactgctggacgcgggactggaagcccgagagcgcgcggacctcgtcggagtccagatccagcctactcgccagccctgcaagagaatccatccctccccatcaatcccacacaacgaaggggaacgaaagctaggttttcgggagagcgctctcactcggagcggtgaagaatgaggactggatggagaggacggcgaggcagaaggcgagggccagccccagaagcagcaccaccgtgggccggcgcggcggcggcggcaacgacgacagcggcggcggcgccctcgccatcgccggatcggaggcggatgcgatgcttccttctcctccgcttcactccactcgtgggaaaaggcagagaggagggggttaaagctctccttttattttctttgtttttacactcaaagttgcttataaggtggtgtttgaatttctgaagatatagggggtgtttggatccccgccacacattgcctcgccaaacatgcggctgccacaacagtttgactgatgtttgattaatacgtgagttgtggcagccacactttttgctagttcatttgcatgcttatttccgccacagctgtggcgattatttctctcgccacaatctctggcgacgccacaacttgatggctggtttgggctgtgaaccaaacagacccataaagatgaatatcaagtgtttcacgtaaaacgaggtagtaataatgtgtgattaattaatttttaattattacaaacttgaaaaatggattaatctgatattttagaacaacttttatatagaaagttttcgcacgaaacacaccgtttaaccgtttgaaaagcgtaccacgaaaatcaaagtttatccttcatttatagaggattcgaacgggcctaaatgggactaatcatttgaaacataatgctaggagtatttgaatttgaactaatgatggttcatcaaacatgatcagtttgctttaatttgatactacaatccataaaagagaaaatagtatgtcaaaattggcttcaactgtactagtacaagtttttgcaaatggccaaatgggatgctattgaattaatctaggagaattcgattttgatttagatcctactcccccatcccataatataaggtgtccacacatttccagattctacctttaaaatattttgaccaacattcaagtacaatatgaattaaatttaattgctaaaaaatatatcattggattcacatttgaatttactttcatatggtcaggatggcatatctcaaattttgcaaaattataatggcatggttccaattttccctataatatatgagaaattataagacaaatattagttttggagaccatgtcaaatttgaccatgtcttataggatagagggagtatctgaaaagcagaaattttctttttgacataggatcaacaaatccattaaccagaggctctagggaagccgccagagaccagtgggatacaaagacaggacttggctcatgaacacattcaatcctatctcaaaagtagaaatatttaactatcagctgataatattttgggataatttcatttctgccatgtctaatattgattttaccttttttagggtttttgtttttatccccacttttttaaccaaaagggtaaggtttagacggaattgagtgggaccgggtttatggcagtaaagaaatagagaaaaaaagaaaatattttttttaatttgttattgacctttttacccttaggaaatatccaagtaggggaaaccttccagcctctcgtgtgcacgggttcactcccgaaagaaaccccatccggcggcgcggcaagtggcggcgagcgtgcgtcagtcaggaacagacccctcccaccggcactttgcgcgggctaggcggcggcagggagggggctaggcgacggcgttgaggggacttggtggcggctgggagggggctaggcggcgacgggcaaggggtttgaaggcggcagcagaatgggggcttgaaggtggtggcagggaaggggcttggcggcggtaggggaggagctgtggggaggatttgtgttggtgttgggatgtgagcaggagacgacgatggtaacagcgaccctgcagattgaggggaccaaggggatgtttggttgatgcctaaccttgccgtaactaagtttaggctagttgaggcatggtggcacaaagtgtggcttaaaaatagttggccacaagtgtggcaagcttagcttcaaatttgagagtgtgatatgtgggtcccaaggctatgaaagtgtggcatgacacaattgccgtagcgaaccaaacacatacgtaagaaattgtggcataactaaagtgtggcgtagtaaagtgtggcaaacaaccaaacagcccccgagtccagatcggctgtccccaaggtggaagacggcgcgacgcagcatggggaggaagtgacggcagcagcggcaacggccgcgataccatgtttgcgagattggatttgcttgactttggtttggattttcttgagtttcttatgcttgctatatgttgtgtaaagaatgtgtctaatttgtgccattttatctttcttttttttttgtcaaaatgtgtcaaaatttctagcaaaattatgtcaaattttaaatcaaaatttatccatagtatgtcaaaattgccacgcttgtggaagtttatcaaaattgctacttgtacaaatggaagcaaatacacaaatgataaaaaaaatagtgtcaaatgtgcaatagcatgtaagggcatggatgtcttttttgccaaagatttaacaccgtcaacatgtccacccaaaatagggataaactttggatttgtttaaaaaaacaagggcaaaaatgaaatcctaaaaaataggagcaaaatcaatattgtatatatcaaaacaggagcaggagcaagaatgaaattgcccctaatatttttgttgggtaaggttcatgtctagtgggctagtgggatgtggccctaagttacacggttggccctaaggaataagcccactttgacttccttaactatatatcggccccctccctcaactattaaaatcgatcaaatttgactcccttgacagttttagaggactatttcactaacgtggtgtctacgtggcaatgttgagctgattcatgacattgacgtggcattagaattaaaaacatgtacgtggaatccattcgtcattcactaaaaattatggggcccacatgtcatctgtgtctttcttcctctccctttcggccgtgagcaacgggtaagatctggagcggcgggcggcggtggccgggagcgagaagctcgtcgtacctctggccgtacgcgtactgctcgagggagaagggcaacagtgttcgacgtgtcgttggccggcggcgcccttggcatggcgccgtgcggcaagcggaggggatcattgaggagaagaagctccaactttcaactatacttttaaaactattaatttatatatttttaaaatgctaattaccataattaagttaattagactaattgccgtaattagcggctaggacggtgtgaatgtaaaagggcatgtaacctgagtagcaccccaagatcctaagttcaaatctacgtaggagcaaatttcaaattgtgttatttgagggctaagttccctgtatgatagactaaattcttaatttacaaagactacatatatccggttggatgaagaggccggataaaaaatacctttctctataaagaaaagaaaaacggcgccgatggtacgtgcgcgcctgcgcgagttacccatcaagcgctagcgcgcgctaaataggaatccccagttgggcatacaccggaaattaaaagtggagagctggcggttccgtggtttgactttggagaaaccacgaaggaggcctctccatggcgactccatctgacgccgcgacgatcatatggagcacggagctcgagctagctccactgatagcaatggtgaggaaccgggattatttcgccggcgctcgattccacgtcctccgtggcgcgtgcgagcacctggcgcacgtcagggactgcgtgcgcacgagggcccgcgtggcggcgcggcggggcaggaggctggcgacggcggcagcctggacagaggaggcggagatctacctcctccggttcggcgagctgcggagcgcgcacggccggatccccaggctcatcttctgggatctgctcggctgctaccgcgtcagcaaggtcgcgtcgctgatgatgccgcaggtgaagaggctgtgcgaagaagggggaaggatcgtgcgcaggagcaagctgccccaaccgatggagatctccacggggttcgcgagcagggatcgtaccctccgggccgcgatcgagagggtgaggacgatccaacccaacggcatcgtcgcgatctggggccgcgccggcttggggaagacttacctactcaagctcgttgaggagtacttctcccgagatgacaccttcgatctcgtgctgcgaatcgcctctccgagagattcctccgtagccaaggtactatctatacatgcatactgatttattgcgagtagtataacactaggatattcagttttttttttgagaggtaggatattcagttgaggtatttacaaaatgaagagaaatagcacatctacaaatatataattttttttagcaaatgtatgatactttgcactggatatgttgttgacaaccattgcatggacagatataaacaatttggccctttcattccatatccatcataagatgcatttctagcatgtaactcttggccactttcaggttcaaagtgaaattgccaagaaactcatgttggctaactgtgacggcatgcaacatagagcaagaattttcgacttcttgaaggagagaaatttccttttattgcttgactgtgtatggcagagactggatctagaagaagttgggattccatcacttgacttggttggaagctgctacaaccgaagagtggttttcacggcatgctctagccatgtctgtgatcaaatgaatgtggaagtggagaacagaattgaggttcactgtcttgatcatacagaatcatgggaaattttcaagcagaatgctgatcttgattacttgggccataagcatgtgtacctgccaagaaatatttccgcggaattgcttggttcacctttggagctggtaacaattggaaaggccatgcacaataagaaggatgcaatatattggcaaaatgcccttcattatctgactgaatcatgccttcgtgacactcaatggtcaggtagtgaagaggcaacatttttcagattaaaacttgcgtatgacagcttgacaggaattctgaaagattgctttaagttgtgttctttatggccagagggccatatatttaatcaacggaaattagtagacttctggatagggtcaggattaatacaaggggatgacattgaagcgtcttacaacgaaggtttctctcatattaccaccttgcaagaattttgccttttagagccagcagaagatggagaggcagtgcaaatgcaatctacaatccgtgattttgccttatgggttgtacacagtcaaggcgaggacaagaacaaatggagaatccaaaccaaagagaattggggattggcagagcaagttctattagtggggcttaaaattacagaactgcctcgtattcctagcaatcaaaaaacccttgaagtcttgatactccagcacaattatttggaagacggttctttcgggaacttcccctcgttgctttcactgcagtacctagatctctcttttaataaattgtccaatatacctgtagagatttgcatgcaggtcaacctaagatatctgaatttgtcaaataacagaataaaaacggtaccagtggagttaggctgtcttaccagactgaggcacttgcatcttcggaataatccaaatctagttattccaaatggtatactaccaaaactccagaatttggaggtgctggatgtttgctcatttaatttactgcagtgctcatcctatgaggcgccaattaatgagcttgtgcgtatggataaattgcagtcccttggaattactgttcgttcagaaacctcgtttcaagggattagtaagacaaccttaccaatacggtccctctctattgtcatttataaccatgaagatgggtatgagactcatgtatcttctgaaaattcttgtatcaatcctgaaagacaaacaaacctgtttgaacttggtatttacacaagacaaaagactattgtgcttgacagcattcattcaatgtggaatgttcagcatgttgagaaagcatacctccatggttatttcgttgataggatcatatgccagaagctgcacactggagatatttttgcaaaactcagacgtttggatatagtacggtgttcaagattgaatcatatttcatggattattcatctcccgcttctagaggatttgctgctattttcatgttcaacattgcaccagattattgctactgcacaagatggtgtcgttaagacaaatcaggaaaaggaaaatccatcagttaataatacattccccagtcttaaaaggatgacactgatcgaagctggtgcattggttaggatctgcagcccgttcttctcatttccttctctggaatgccttcagatctctgcatgccctttgttgaataaacttccctttcttaccgttccgagcaaactgaaatgtatacgcggtgagaatgaatggtgggatggtttggaatgggaagaccaagatcttgaaccttcacttgaactttactttcatggcctctctgctgaagatcaactatctgaattgtatcttttcaatagcctggaagtggaatgggctagtatctttaccccttgatgaaagaagcaactgctggtggtgacaatgcatcttcatctacacatgctgcgaaaccagcgagcgaaccttccaaaacgaggcccacaacaccaacgatatcttgctttgcatcaggccattcccaatccaatgactaggatggtgtccataacattaaataagatgccacataggatgaaaaattatgtggcaagtgaataaatgaggaaagagaaggaaaccatgtcttgcatgagacatggtttctacacaatatccaagacatcatgtgagataagaagcattaaatttaagtatggaatagtagtgtttacattggaagaggagtgtctagtactagtttcttaatgatgtggagtttgtgaaaaccatgtctagtgtttttggttgggaatggcctcaacgatggtaacctaaacagtttgttttcccaaagccgtacttcataggatctctgatcacataacttcaattaggttaccggctgtgggtaactcaagactatacagtgacacccactatagatgattttgaaaaggaaagtgaaaggaacaaagaagaaggggatgagaaggatggtgagtgggcccgactagaaccaatggcgttagacaacaggagtggtgatctgcctacttttggggggcatttaaccatttgccatttttagcatgtacaaacatcaatgtggagcaaaccatttagaatttctctagcagattgagtaaattttacaaaatcctaggtattagggcatccattacataaaaccctagttattgtgatttgtttcacgaaatcacatgttttgagtcaaaatgtttcaagaaacctcatattcatatagactacttatattttattattacataagattgtttttttcatcaattcacattagttggctaaaaggacatactcttctcgtctactttatttttttctcaattttgcgccgaaaaagcttaacataataccggctgattataatataataataggttaagtatacacataaatgatcaaaacatgattaacaacacttgttaaaaagcaactaacgttatatatgtactaaaaagtatctcatacattctttttacaattattatagataaatatattagtcaaataaacgatgtaaatttatacctggggttttataaaacattttactctaaaacctggggtttcatgaaacaaattacaaaacccagggttttgtgttacagaagccgtaaaatacaaggttttgtgaaatttactcgaaaataacaacctacctgggtctcccttttcacacaaggaaactaagaaaaaatgactttgtacctctccttgaaaagattttctctagaataccaggttggaaaggttggtttctgctgcacatgaaactctggtcaagtcactcctatcttcaattccatcctaccagatgacaaccttgctaatccctcaatgggtcatcaagaaaattgacaggaacagaagagcctttctatggaaaggaactgaacctgataatactcacccaggaacaagccttgtgaactggcaaacaagcaaatgcactaggggttgggagcttccggatctggatcgagaggcagtgtgacgaaagagctggtcagacagatggaattcgatgagtccaaactacgtactaagatcgaccaagtatggttattggggcggtaggactcgtcaagcaccagacgatagaagcttcaattcagatcccccacatgtcagtttgtagtaatgcagaggaccctcactctagaagcttagtctttccgtttttccgtttttctttttttttatttggttgttactctattataaaacccagaatctaagtatttctgtaaccatcagctgtgtatatccactcatggatgatataagtgcctaatttctatccaatatgtgaaaaaagagagactaagggaggaaacattttttattttgttgtttcttagttacgaaacctagaatcttaaccttcggctatgtatccttagctagctatggatacaaatgcaaaatttttatccattatgtaaaagaataggagagccaaagtgaggaaacattttttttattttgttgttttctagttatgagacctagaatctaagtatgtaactttcggctacgtacgtatatggatataaatgccaaatttctatccattatgtaaagaagaagagagacaaagggacaaaatacacaagcatggagcatagcaagtcgacctcagcgggggacggcactaggctgggtggctagggaatcccttaagccctagccaacacaggatcttatcggccaccgttgcaaaggaagccctttctaacacgatgatctcacgagcgacaacactacgaccccccgctcacactccgtgctgcaggctgaggtctatcacattctccatgcttcccctccaatttcgagaggatctccgtaatccgttgcacctgcgctgcttcttgccatatagaacaattactcttccagcatccccaccctcacctaccataggggttctaaactcttgaggggatatttcctgattgcttacatgttatttaaatagttatttttttaaaaaaaatcaacaagatagattaatatatgataaatcactccacaaacatgcaaagccaaatttaacttctactagttgcaatagaaaaacaaattaaactatagctagctaatatatattcacagttaaatttgtttttttcattgcgacttatagaagttaaattttaagttatatgtttgtgaagtgatctatccactactacagaaaacacaaataggtgccggttttcccaatcggcaccacggaggcagcactaatatgaaaagaaataggtgccggtttaagaacaaacacctttgaggttccctgaataaaaaaaaatctggctcgatgacgagccgatgcattgagccgagcagtccctcctcccacatccatccacaccacagcaagaacgagcatatcatcatctatccatcacatatccaatccacagatggactcatccacatatcaatccattcatccacaacacaaattttgacacttaaattcatcctggatcttggcaataaaaaaaaatccatagatggattcatccacatatcaatctattcatccacaacacaaattttgatactcaaaattcatcccagatcttggcaataaaaaaaaagaatccacctctctgtcgttgtcccgccatcgttgtcgtcgcatggtcgcgtagccgccgccgtagtcgtcatcttcgagtcatcacgccgcctcccctcggcgagcccaccacctgcatccgcgagccccgccgcccctgtcgcagcctcccctcccgccggatctagcagaggggagggctcctccacctgccgctgccgcctcccctcccgccagatctggcgaaagggagggctcctccaactgccgccgccgcctcccctcctgccagatctggcaaaagggagggctcctccaactgctatcgccgtcgcgtctcctccgcgagcccgacgcctaccgtggcctaccaccgcagagccggtgggaggatgagaagaagagataagggaggaggagaataagatataagggagagagacagtgggagagagccggtgggaggaggagaagaagaaaagataagggagagagattcacaatatcgagagagataaaaagacgcccacccggccggcttgtctccacctggctcggctcgttttaagatgtgtcggttttctaaagaaaccagcagtgcggcacctttaataaattaaaggttttttttcaaaaaaccagcatctatagtataggtgtcggtttttctttagaaccgatgcctatagttatataaaaatgccggccttttttgtgtttttagcccatagaggagggaaaaggcctataggtgctggttttagtatttccagtacctatagtgatggcatctatatgatgttcatatactaatctatcttgttgattttttttattttttccataactatttggatgagatacaaagtttagaatccactcccctatgatgccctcaagccatgccaatggcatcgtagatgacctcctatccctagatcgacgcttccaactgtgaccaagcagatggaacaccgccactgcaactagctaccagatctcaaccaaggtctccaagtctcaaggtacggatgtaagtgcgctgtcgcactacccatataaaaacccgtgttttagtttatttaatataaaatttaaaagaaaaaacggaaaagaaagcccactcgccccagctgcgcttgcatacctacctcgaggcgtccctcgcgtccaggtcaagtcccccttccatgccctcgtctaaggagtggacgacggacgtcacgaaacggcatgtgtgccagtcgtttttggttgatcggatcacgcggacggacgaaacagcgtgacattacatttttttctctcttgtttttcggcggctgccgcgtcttcttcttgctcctctggtaaggtgtactacctcacatgcctaatgagaggaaaatatagaagagcgcgttgacaccgttgactttggattttccgtctccttcctccgaagtgcagagaagaaaaggaggagctgagctgagctgattgcttgattcctcgctcgttcaatctactctaatctatctctataggaagggaaacccaaaccataatgcaaagccgtctcgcagaggagttgcgagcgctgaagttcgaccgtgtttggcggccaagtcctcatcgctcggaatcggatggcggcagctgcagctaccgcaactcgatccagcgggtcgtcaccgcgtccgttgccgccgcgtccaccagcagcaccaccctcgtcttcccgtcgagtggctcggtcacgagctcgtcttcggcatcctttacctcctccgctcccggctcggaggcgcacggtactccaagctccgggcccgagagctacaggttgctgcgcggggaggcgttccggggcctcagcgagatcgcgagtcatatggtcagcgacaggtacaccgagaggctaataacggagttctcccggccgcggctggggagcggcagcggcggcggcggcggcggcgacgagatactgcagacctggttctccgaccttggcgttgactgggttctcagagtcgacgagatgaacctgcaggagaagccatggagcggcgtggaggagatgatcaaggggtggctcgccgcgctcaccgtcatggcggaagccctccgtctgacgaaggccaccctcagcagcggcgatggcgactccggcggtgtcattccggtgcttccgatcgagaagtacaggccacagatatctgcaccggcgtggatcgacgacgaccacgccggtgttacattacatgatgtaagtcctggctctggctcgtcgaatctcgaccaagaaagctcagatccggctccaaacacgagcaggagcaggagcattgccattgctacggtcaagcaagctataacagcgtattcccaagcggcgtcatcgaggtcctacaggtacgaccagcacggagctgcagggcctgaattccaattcgcgctcttcgccaaggcaagcctggtgaagatgatgtgcttcccggacgctatcgccgcgctgagcagatcgccggagaagatcctccgcgtgatcgacatgtacgcggtggtctcgggcgtctccccgagcctcctggcgctgctccccggagcgaccaaatggttggtttccgagaggatcacggccgtgctcaagacgctgagcggcatgatgaggggcatactccatgatctggagagtctgatccgagaggaggattcgtggcggacgacggcgcaggggaacgacatccacccggtcaatcagtacgtgctcaactacatcaacctgctgcttgagaatcgcgacgtgctgaacccggtgctgcagaatcgcgacgtgctggtccaggagggcgaggacgacgacggcgacgacgagctgttctccatcggggagctataccagctcgcggaggagaaatcgtcgctgacgagcaccgtcgccaggctgatcaactcggtggacgccatgatcgaggacaggtccaagatgtacgcagccgccggcgggcggatgcacatcttcctgctcaacaacgaccacttcatactgcagcaggcggagccttcgttgcagtcgttcatgggcgcctactggtacgcaaagcggaagcagcgggtcgatcggcgcatcaaggagtacctcgatctgtcctggggaaatgtcgtctcgtgcctggggtacgcagggcagagccgcaggaggtcgtcgcttttccgtagtgtctcggcgctggtggagttcaactccttgttgcagataacctaccacacggagaagctctggaagatcaatagccctcagctgcgaaccgtgctgcgcaattcggtgtgcgggaaggtaatctctgcttaccgagcctacctggagactcagggacagggcggccagttaggaacatcagccacgtatacccccgaggatctggaagatatgttgcaaaatctattcgaagggtgaacctttcttttccatatatatggagttttgatgatgtttttcttcggcgagtgcatgatgtgcgcggaacccatgacccaaagccaacacggacatgatagtactccctccgttttaaaatatttgacaccgttgactttttagtacgtgtttgaccattcgtcttattaaaaaaatttaagtaattatttattcttttcatatcatttgattcattgttaaatatactttcatgtatacatataattttacatattttataattttttttaataagacgaatggtcaaacatgtgttaaaaattcaacggtgtcaaacattttaaaagtatcttcgcgttgttttgctactttacttgttttaatcaatcatttaaatgttcttctcaaccttactacaacgcaccaccgttttctgtcttcattgaggacggttttgtgccacgctggcacgcagacgaggcgttatcactgactcatcacaagataggcagtaaattaaccgcccggccgtgtccccttctccgtttgactggtcaatgcattctgtacctccccacttccgatccgtaaccttaaagcaagtttaattttatagccaacctctagctctaaaaattaacacatcgtttatagctaatctaataagttacccatacaacggatgaaagtgggctatttgggtatgcgtgccgtcagctcatctaaagcaaataaagatagcaccaacagaggttgacagcgacggcacactagaggcggcggccactagacgacttctactcaccaaatctaaccgttcagaagagtacgtatattgagaagcagaggtgtgccgacatcatttatttttcttttctttttggttgagtgttctcctccttgtcgagatgtgagtttaagtgctttttttttttctgtatatattcttcgtgtacataggggccggattaatgaaagcccactgtctaaaaaaaattatactcgctagtgcgtagtattgtagtactccatctgtttcaaaatatttgacaccgttgattttttagcacatgtttgaccgttcgtcttattaaaaaagttgtgaaatatgtaaaactacatgtgtacatgaaagtatatttaacaatgaatcaaatgatatgaaaagaataaataattacttaaattttttaaataagatgaatggtcaaacacatactaaaaagtcaatggtgtcaaatattttgaaacggaggaatactattttagctgggattatggtctggttggagttagattcccttggatatgctgtagtaattgattactctaaagtcacctttaatatatatattagcctcgggagtgattattattcgagtggttttgcgattatgagtttttttttatgtgcaagttgactaccttttgtgcatacagatcagtagatggatccatccactggacaagatgggtgttcggtttcatttcatgggagatttttttatgatggaaagaaggtgtattacccttagtgggttatatgtgtatgatgtggagaaactaataacaccaccatatgtgactgagtgaagggtattagaatctaagaacaaaaatgtgtcgcaatgatgcaatggttatggtaacaggtgttccagttttggtgaaaagaaagaaccaaatttttccaagacttcataagaatttctctaattggtttgctttactccttattggttttgctatttattgttttattttatgcaagtattatttttaagttcaaatgtcgtgagatgataaataatgacattgttacaccttaggtgtcaacttttaaaaaaaaatcaatcaccttttatgtaagcagccaagatagatatattttctcgttgtttattaatggatagattgggcgtgggacgtaaggctacgctaaattcaatggtctcttagagtcccattgttttacagagtgtgagtaacacccatttgggatcgattgaagcagcccagcagagcacaaatggctaaatataactaaagatgcatcattacttatgggatgtaatttttataatgcttccctaattcattcgtcttgcttttattatttgagcatattttcttaggaaaatcatgaaccaattgtattgtttggtctacctaaagacattggatttttttttatgttatggtttgtgctattcatatttgagttagttctttattttccacatggtgaaccctgcaccctggtgtaagcaaaacacaaaatctaagtgcacctgtcctggaaccaacggtgaaactatatatacatatttgaagaatgatgtataataacacaatatatgttgttaatattttaagtatttaatttatttagatggcatgcaaacttgtaaaatgcacggtctataccacaatgacatattgcttatatatagcaaaacattggatctaaaattgtcaatttaattataaataaagcaacattttagatagaatataaattagatatgtacatttaaaattatggtcagcttaattctaaaattttagttttctctttttaatttgataacataaagaattaggaagagaaagagatggagatgtaaaagaataggaagaggaagagatagggatagggagagcgtacctacgttcttttttttttccggcccacacttatacgaagtcatacgtacataagtttttttctttttatggcccacggcagaggaagggattattttcttaaataatagatctaatctaatggtctaaaataccgggtccatcaatttaaatgaaaatcgatagttagattagatagtgttatgtggcggtctaggagtgtttgtaagagtgacatgttgcgtcttgagagcgtttgtagaaagtttaatggatttatagtatataataaataagatatgaaatatgttttatcgagatgaaaccagcgtgtactatttctaattaatatagcttagctgttgcatgtattgcattgcatgcctatacaataacaaaaataaaataatacattgtatggattgtttcaaccgtcaaataaatgtcttattgtttagtatatggtacctttggaattgtaaaaaatggcatttcccattaaaagtggccttgagccacctaaaagccactgtgatgtatggatggaagttcgttgcactggtcgttccttgtaaagtgatggagtaatgatggcctaagagcaagtttcttgtaaagtgatggagtaatgatggcctaagagcaagtttaatagtatagccaactactaactctaaatcatttatagtcaatctaatagtcaattaatacaatagttaactacaaatatatactacatcattaataattggtctcacatgtcatatacacataacgttttagagttcgtgttacagctggctacaaatctatagctcacttctcttctctctcatctcttatctcctccacatgtgcttatagctgacttataatctattattgtactccctccgtttcaggtcataagatgttatgactttggtcaaagttaaactgcttcaagtttaactaagtttatagaaaaaaatagtgatattttttatataagataaatttattataaaaatatatttaattattaatgtaataaaactaatttggtaatgtaaatgttactatatttgcctataaacttagttaaacttgaagaagtttgactttaaccaaagtcaaaacacttaaaacctaaaacggagggagtacctgctaagagtattgattattaatgacaactcataccattcagcatgccaacgtggcacaaaaccaccctcaaatgggcgcgatggggtattgtgtagacggagtgccttctttattttgtttcataaggacaaaaaatagacaactcaatattgagcgacataaagtaaacttatcccaaagtaaatgaatataaagtcaaaaaaaattgagttagaactttattatatttaagttgaaagttttatttaatttgagttaaaagcttcactaaatttgaataaagcacttgtagtagaatttaatttcaattgaagatgtcaacatcaaaactactctattcgtccaaaaaaaatcaacataggcaatgatggaacataacctatgacaacgaatctggacatgctcatgtacagattcgttatcctagttaatatcccatccttattcaggttagcgttttttggggacttagtcttctagatcagttctctataccagaatttcatcattacttgtcagcttccgactgaatccttcatcccctattggatttgaacattttgaaggtcattctaaaggacaaatatttagacaaggccctgttagaaagcaatgcttcaaattttctctctcacccatctctagtctatcagtacatgtcccattgttagtctagacttgccgaaaagctgaagagcgttgtcagtctagacttgccgaaaagcttaagagcgcaggcatgctaccagcaatgttctcctaacagtcctagtccgtagctagttccctctccagaaatctatatctttaccgttgcccactattcagttaaatatgtcctgaacttccatgataggtttccaccctgccatcatccgacatccccttctgttcagtccgattgaattctaactttaacctaatagctttctcaaacatggctaaatccttaatacccaaacaactgttctcgcttggcatacaaattattcttcaagcaaccagtcagtgaccattgttgacttctaccactcgaatataaatctgcatgctctctttcggtgcgatgtatgtaccttatatagaaatgctcattgcaacatatattgcacttttattagtgctgacagactattttatggaccaattggtccatagtgtgcataaaaatacatgcgcaaatttgagtcaacttattatctaattagttggcttttttactaagtaaccaacaaacaattctaaaatagtttttggcaatgatgatatttctttttccaatatttttcataattactttgcaaatgtggtgaccataaaattgttgccaaggaacatgcaaaacatcgacatatgggtgaacgtattgagaatggaagagaatagattatagggattgtggattgtagtggagtgtgggagctagtgcatgcttatatgatgcttccttctcgtgcatggttatatgatgtttccttctctttggttgattgcgatgtgcatgtttctactcctagtcggtagccagttccctctccagaaatctatatgtttaccgtctcccaccatatgtgtcactgttcaattaaagatgtcatgaaattccataggttccaccctgtcatcgtccatggcacggcatccccttctattcacttcaattgacttccaactttaaccaaaaagatttctcaaatatggctaaatcctttatacccagagcactattctctattggcatacagattattcttcaagcaaccggtcagtgcctattgttgacttccacacttacatttaaatctgcatgctctctttcagtacgatgcatgctccttatataaaaatgttcattgcaacatatattgcttattagtgccgagagaccatttcatagaccaattggtccatagtgtgcataaaaatacatgcgtaaatttgagtcagcttgttggctaattagttgtttttttatcaagtaaccaacaactaattctaaaatagtttttttggcaatgatgatatttattttcccaataattttcataattcatttggtactttgcaaatatagtgagcataaaattgttgccaagaaacatgccaatcatcgaagtatgggtgaccgtattgagaatggattagaatagatcgtaggtgttgtggattgtagtgaagagtgtgatgaccgtattgagaatggataagaatagattgtaggtgttgtggatcgtaatgaagagtgggagctagtgcatgcttatatgatacttccttctcctttggttgattgccatgtgcatgtttctatgtgatcaatccttctcctttgattgattgccatatgcatgtttctatgtgatcaatccttacgtgaatagtaggcaccagatgttgtaaaatgtactgatggtagatatttagatattagtaggagatcaatttttgtaggcaccttcccaaactctcacgagaaatgcactccatagaattttagatatcaaattttttttttgcacttttagtttgttggaagctaactatatttatactatcaatctaaccatgaaaccatgctcgatattgaaggaggataattttggagagttataccgactagtttagatgtgaagagtaaaatagatatttggacaatagtaatacatgcatgtcacactcacaccaccatatgtacataggcaccaaaataaaaaaatacttagattcataaaacacatgcctgctagtttagtttctagtagctcttaggaaaaacttgcattcacattatatgccattatagcataacagatgtaaccgtggtacgaggaaatgaagaatctaggttcatgcatagtcggacgcatgtattgataatatcatcacaatgcattttgaagtgtgtcttgtaatagaatggggtgtcaattgtccttccatcatccattatcattgccgacatcaccatttctatgaacacaatcggttagtataaaattaatcaaggattcgaaagagaataaaatactaatatatagaactcatgtggttacctgatgatagcaacataaggacaagactaaatattactattataatgcacgtcctcgtccttgtcatatcttgaaactgcatgttgtttatgttaagaatattgatgtcttatgtttcagattgatgatgcctactgattgatgtttcagattgatgatgcctacatatggacaagactaaatattactataatgatgcacatcctcatccttgtcatatcttaaaactgcctgttgtttatgtcaagaatattgatgtcttatgtttcagattgatgacttgccaaggaaataaactaaaataaagatgataacatgtaaatatgtgcatctcatcaatcattttaaggaacaataaatgtgcagtaatagaaaaatacaatttattagtttcttaattagaaatataattgcatttgtagatattaaaataaatgtatatctcaatatttgaaaatatgattgatctaaggaaaatactcgggaattaaatttttaaatatatatatatatatatatatatatatatatatatatatatatatatatatatatatatatatatatattatcttgtgggaatatatgaaattcaaataaaaatatatttgtgttgtcaatttacatgatgacaccatttcatcacgcgacactgtgtgatgtagcttatttaaatgtggacattgccttgggctatgagccactgcaccaagcatggacaaagcgaaggtaaagtcacaaaatgcatggctgttttcacctattgccttccttccaaaaaaaccaacttaggtggggatgcgaaaccacctagacaattcgttatcataggtaagcatgtgaaaccacctagaacaatgaatttggattcgttatcctagctggtgtcacattcccacctagattggttttttatgggacggaggaagtaggcgataacaaatgggaatttggtccaatttggcccttcggcaacaccaggtgtcgctaggtgattcggtgacacggttatatttttgcaatatcatcaaatttgatatattcttgtaaaatcggaaaaaaaacagttcgatacctggtagctgactctttgtggcgcttaaaaatatgttttgtgttatgtcaaatacgaaatgctccaaacgaagtagaaacatgaggtttatttaccatactgttaactaatctggtttatattaaaacaaatcaattcccacgtgcttgatgaattaactgaaattcagattatatgcatcgtgattatctggcatattttatctcatattacctcctactactaattaattgattgaattttttaataagcaaagcattttgcaccaagcataatcatatccaaaccttcctcagcaatacgcagtaagcacgacgatgattgaatttttagttagcaggaaacgtctctctcttttctatctctagcctgattttctactagcaggaaatgattcttcccttcggcagtaaggttcgggtacatacctctacgcacggaaaacataatggctcattagagcatgtttcttccgtttcatattaaacctctttatatttgactattttatagaataatttaaatctataacacaaaattagtttcattaaatatatcttgataatatgttttctgttggaaatgttgttatatttttaaaaacattgaaatggatggagtaataaattaactattagcttaaataaacttaaaaagtagaatgaatactgttttttaaagtaattttcctatatatctttttataaaaaaatcacttatcagctcggaaagtacctaatacagagtttatgtaggccggccaggaactctttgttgcctggcatcgaattcgttcggttcgtgggactaataaatattttatctgttttatatcatataagtcatttgattttttttccgagtttgatcaaatctctacttattataaaaattaaagatatttttaccaatattttgatacgtcatccgtgtttgagtcggtttttaaggatattcgtttttgaaaatacatatttgtgtttgagttggattttaagctcatttgcttttgtaaacacaaaagaattcatataagaaatctcttttaacaaactccgcatgctaacttgaatgaatgtcggactcgctaattttccaaaagaaaaatccaagcaaattcccacaataaatttaccataactaaaccatataacaataataatattaaaatagcattcacctgttgcaacgcaacatttttctagtttatataaaaatttagcaacatctaaaatattaaattaattttattaaacctagcattgaatatattttaataatatatttatgttgtgttgaaaatactactcccttcatcccaaaatataagaacgtatgattgaatacgacatttctagtacaaattagataggcaggttatccaaattcatagtgctaagttaatgttacatctagtactaagtccttatattttaagacaagagtataatatttttccgtaagcccattattttctaaaaaaaagaaaagtaacacctagtttactagtattaacgaaaagatggaattacaggtttatagaatcatgcagttttaatgtgtcaccctacggcagatttgggagatgaatgcaacaagatatcaaaaggacaacaaacatgacacaatttcattgaacggaagtcaacaataatggacgttgtcttgcaaagctgaaaactggccaaatgccagtagagcgaaatgaagctcatacaagtgggaggaaacaaaatatctggagcagataccaattgcctactactgcctacaaagatgattgggacttatgtacaagcaagaaaatttgaaccgcattctgccccagaatatcagaggatgttcatgtagattcaccaccgactaaatgacggcggccggcggacgtttacctcttcctcttcccacctgagcctccagcagccttcccagcagagccagaagcttttgatctaccagccggcatcttcttcgagttcaagccattgccattgctcttcaggtcgagctgcacttggatccctggatataaaaccaaaattaccaaagagtcaggcccgaccgtaaatagcagaaggtaagactggtggagaatccaactagtcaaagtacgagaacctttcttcttatcactctgcaggtccagttttggttttgtgtcaccaggcaccagttcatctgaaagaaataaacaaagcaggttggtcaaacaaaacatacactgaatacaaattatcgatttaaatgtcctaatgaaaattgggctgaagctaatataattgacatgacatggcattgttatgccaaacactactagcacaacagctgacaaacataggcctaagttgcataactaaagattgagaataaaagcacaaatgtatatgaagatgatatggcagtatgacatgttactgtaccacagttttcccagtatgaaacaaaactagtccagatttacaaatgctcacttatcaacttctgtttcccttcgtttcacgcatgtcctcatccgatgtattccctccgtttcacaatgtaagtcattctagcatttcccatattcatgttgatgttaatgaatctagatagatacatatgtctagattcattaacatcgatatgaatgtggaaaatgctggaatgacttacattgtaaaacggagaaagtactccattatttcaatttttgcaaaacacagctatagcctcctatgtgatagtcatttcatttgctgaaaaagaaaaacttaccattattttcagcatcagaggaatcctcttcatcgccttcagatgacgctactccattttcttcaggcaaactctctcccactggctcaaggattgctgccactcgtttctttaatggctttttcatgcctgggatatttactagatctgctgctcgaacaacacgagaactacttccttgtttgtatgcttttgttaaggcacttttaacagctggttgaataccatccataggatttggatgaccctacagaacaaaatatgtattcagaaacaccattggaagtataatgacaaggcattactaatcatgacaaccaagtcagcaagtttactcagctaaaagattcatgcattaatgcttctagaaaaaatatatcaagcagggagttgagtatagacaaacagtcaagagatgcaaccattgtggcactaaagattcacaggcaaacactccctttcagtactttggaaaatgtttgttctctgatttcatatctacacgatcacatgtttataaatttcaatttggttctcaaaaaattgcattgcacaataagaacttatagcaaatgagcttttgcattcccgaaatcaattgaaatgccatcattagtgtagtgaaatatacagtttgcaactttgcatgcaacctagaacctaccatctagagtaagtattttcaaacacaagggggcaaacctagcagtagcacattacatattgtaataagtataaaaccattcaaagagattaataatgaacataaaatagatggcacaaacatagggcttctattagaataactaccaaccttaaattttgataattcaacaattgtgtcaaagtcttcctggcttaaagagtaggtatccataaactccaccactttttgcacagcttcatcctgtgattttacaaatataagataaccagcagatagctcaggtaaagattcttaacagggaattattgtaagaagactggtaatactattacataaaggcaagataacagtatgttaaaactcagaattgatgagccgtgtacacaagtcaaggtatggacgctctcctgcagattttttttttcagcaaatgaaattaaagagactccttacttcagaatactccagaagatggctagtacactaatgcatttagaggtatcaagataaatttctaaaatgccagtgtccaggtcattatcctcatcatgaaacattcaagtataatgccatagaacaaaacaaggagttaattaatagatcacatctacatataccttgggcattgtcttcagtggatcagtcaattgtctcaagagaagagtgaggtaatccagcctcaatgactccctgcagttctcaacaatataagattggattatctcatgataaaccatcgaaaatcatcttaaagatcagattgtactcatgtggaccacaacatcttgaaaaggcatgggtttttattcaatgttgctaaaacaaagttcaaaaaccaatggtgattttccttggcttattgactgattcaggcaagttaagaaaagtaaggcttgtttaatttgctcactgttaagaaaaccatgattttcaaacatagtaacatcaggaaacaagcatgacatgtccatcaattaatatgttgccagccattgaaagaaattcaatggaaatttagtgcctgtcttcttgagcatagatggaggtatcaaggtatatcatgctggaattccatgttatttgattaagttctaacttccaagtgctaaactaattagccgattcactgatgagctgattatccttagggtttggaattacgatttaggactaatacacaaaacatttttattcagataataacatgaaaatctatttgaaaccatgaactggcctaaatccattcagatttataagcacaatggaagattaagatcatatcaacccaaagatgtaacaatattcaaatccttaccaaactaaaaaaaaaagcttgggtttgtttggcaaatttatatagttagtcagatatttaagatgccgcttgtgacagaataaaacaagagaagaaaacaatcaatcaccttgctttacaacctgatacacgatgcatcatacgtgtgaagagtaaaaacagaatccatggaatgccagaaaggataaatttgtagaatatgtaaaagtatatccacctgtccaaatttgcttgctgggaggcaagaatatgactatgggcatcttccagtagccttatgtttttatttgtggtcgagtactttcccaaccatccaccaaacctattgaagtttcgctcaccctacagatttattatccaattcaatgagccagaattaccaaaaataaactaaacaaaaaaagtaattgatgataaggtttgagctttactgcttcaaggatctctctattcccatgcatcaaagcagcactgtaagatgtgaaatagattagtggatcagtgagacatttgaattaaatcgattacagcagataataaccaccatatacttacggaactatagatgaagacaaacaagcagcttgggacaattgccactgtcgatatcttcttatttgtacattaacaatatcagcgtccgctatagattcagcagcacgagcaagaaaattcattcttttaactccactgtcatccttcccaacagtgataggccgataattgatatagttttcctataccaggcatgtgttaatatgcaagcttaatcacacagttaaggaccaaacagaagtgattgaaaacagttacatgaagtaacatgctacaaatgaccataacaattgaaaaagatcataataaagcgcatatttttacacagcaaaaaattgggccaaacaccaatgcaacacatctggaatttacttaccataatagctagtatttatgcatagattatagatggctagcatcccagctttcaaaaagaatggggtgccattagaggaaaagttgggatatcgcattcagtagggagtgtgcacgcctatgtatcaaccaacaaaaaagtaatgatcaagttacctggcgcacaaactatataacgattgcttggtactaagagaacataaatagcattgcaacaaataatggcgcttcagctgttgcaactacagaacccactagcaagatacatgtcaatgatatgagaaggctgtgatgctcattcaaaaatgaaggaaaaaccaagttgcaagcctgatgagctacttttaatacaaaaagtatcgggaaacaattcatagcagaaaatatctcaggacacaggacccacaagaattctacagaaaaataaacaaaaacagatttgcaccatcagtgtcccctacctggataatcagagggactaaatcaggatcgctcatgctcaaatcaattctctcatccatccgtagtctcccaccattaaaaccaaacagcctgaaagttgaatcaatatctattatgaatttaaagtagcgggaaaaatacaacccaactcttgcattgcaaattataaagtcatccaaaaatccacaaattatagatccagaaacagctggttcaatagcagagcgtatgcacttgagcaaaacacatcattcagataaaaatcggtagacagcatgaacattaacagttcaaaagagccaaaatagctacaacttccaggtaaataaaatatgagtatagagtaagaaattacttttttagcccctctgaaagccatgtcaaaaaaaatccattaaaataaacaaatatatggagaagttaccaagtatatctacaagctttctcttttgtttatcaatgaatgaaactagcaattgaatatttgccgtgcgccttatcaatggataacaaagtagaaatacaatgaaacttggatgtacaatttgacagaaaatattaatataatcaatacaagattggaatacgaaaattcacataattcacatttatacactaagaaattattgcatgtcagtcaataagaacataaaaatatctagaaatactgatgaggaaatagaggacaattgaatagaatttataaaaagtataatcaatgcacatacttgtcaacagccgtgaagggggaaatatcttcatcttttgtgctactattaagtcgctgtcttatatcatcatatttgaccacggactgggagaggctcatatattgcaaatggttaagagccatgcgaatatccccgtgtactctttctgcaagttcttccattgcattctagcagatgaggaaaccatatattagtaacatggagaaaaggtaatgacaagaaaagaagagaaaaagaactataaatggttttgcttttatttttgttgtgttttcttttctttttcccaaaacttttgatggaagtttagaagcagagaactctaaacacacctcttgagcttgaagaccttccttcttggcaatttccatcaacctcttacccatctgttaaacacagaagttaaaaccaaccctatattacaacttttgggtcacgagcaccaagagtaataatgcttacccttccatgtaacagtctacaatatatacgatgtaaggagatggaaaaattaaaataagaaataaatgtgctacttagaacagcaagaattcctgcctataaagaaggtttctatgcaatcaggaatacatttgtgcgtgaaaagctatgttggctgtgaaatctgccgtacgtacgagtatttgagtgatcttggggatagccattgtttaacttcagattgacaaacaaataggacttatattacccctaaataagttgctgcatgcaactgtatcgtaactgcctaaaaattgcaagaaattgagaatatgtccagaggtcaacagataacctgttgcttggttggttttctgaagttgagtagcaagcagtaatttacaaggctcttcaatttctggctataacggtcattgcaaatgcaaattataggaatcttggacatcttaatgctagcaataagatcagcaacaccaccacgatctccagcagacataccatcaacttcatccatgactagtacagccttgggtcgttttaatctgtcaaaattcttgccaaatttatatacaagataaaaccaaaggtccaaaaaggttgatgaaacttcatgtaatactgaccggttgttactataattcagagttgcattactaataagctctttgatagaatttgatgtactgcccccaacacctttctcaatcttagagtctgccttaccacggctatcacttgcattaacctgttatgaacattagtcattgcatttatgcctcaatagttgagtaagaaacaaagagttgcctggaaggttgcaaagtatgcaaaacagcagaattacctcaatagcctgcaatccaagcatctgactgacaactttagcagttgtggtcttaccaatacctggaggtccactcaacaacacagcctttttagctccactatcagcctgcttctttcccttacccttctggccagaatgaaggaattggtcctcccaacttctcaaccaatcatgaagctgtttaacctgcatgtataagttcatactaagtaattgtgcatagatgtatgtgaccagcttaaccgaaagcagaagcactaaccattgattggttcccaactatgtcatttggaactttgggccgatacttttcagtccattgcaaagaaccacggtcaacaatgttgaccttttggttgtcaatggaggcacttcctttattactctttggtgaaatatttttgcctgtggtaatttgattaccatctgaaaattggaaaatcaagatatatgtaagcataaacaacctgcgaaatgttaatatcaaacaaataaatcaaataaaacttagtcatcagatgatgtcagcaatggatacaacaatcgctggataaagctagcatctacaatgggtaaaagacacaatgaacactagaatcatgtctcaaattcatgcaactttgagaatacaagtatctaatagttaggttatgctaagcaggattgtgcatgcgctatacaactaagaagcatttttacgctttcagttacctcttctttcaactttaactggagaactcttcattggtgatttttgctgcttttctgaatttttgtcgctttgatgttttgccacagtagcctttgcaggctttgatttccgaatcatatcaaataaaccatcttcagttaggaatgggacgctgcaaacaagtacagtcatgtgttagaaatgacaattaagaaaatatagttttcttgagtgaaaagagcaaatgataccccagttctttcgctttatttgatttcactccaccaacgtcttcatcagccaataggtaattctgtcaaataagcgatgtaagcaaactataggctaaaaaacattaccaatgcaagtatcatactattatttcataccgtctttttgctaatagagccggtcacacggcctccataacgcttgattagatcagttgcctcctcacgttcaagactgcaagtgtatataaacttatgatagcttattcgcggcattgtttcaatcaggaaatttgaggatattaatggtgcaccgaccatccaccatttacatgaacataaaacaaattaaaatatgaagaaatgaagacaatagaaagcacctgtcaagagtgccacttatgacaaatgtcaaaccagttaaacagtcaggggcaccctccgggacttcctacagaacacgaataacaagtttaggattgagttttctggcaaattataacaagaaggaataagctaccttctcccctttgtgaggaggatccttcctttcaccaaagttcatgaagcctctcccaccccctcctctccctcttcccccagaggctcctccccttccccttccagctgctttggaaggggtcttggcatcttcatccatcttatcctcctcaccgtcgtcatcaagaccaattgtctttccatgggctgctcctgctcctcttcctcccctccctctcccccttccccttccccttccacttccagatgccttggaaggggtcttagcgtcttcatccatcttgtcctcgttatcatcatcaagaccagtctttccatgagcttcagcagtagatgcacccttcaacttctttgatggtggtggcttcaccggagttttcctttttgaaggtgccacaaagtcgtcgtcatcatcatcttcttcttctttatggacttcctttgctggcaaaggcttcatgtcatcctcaagctcatcactgactttctgaagttttcttttaggcaaacctctcccggtaccttttcctgcactggtgtcttcctccttttctgttttggatgcaaagtacttgctagtcttccttctagctgaacaatcttgatcacaagccgcctggatgatccagtaattaaattactcaacagcaggaaaccatgatgtatcaaacaattaaggtaatggaagcagtgtataatttgcagactgcagtaagtttgtagccaaactaacagaggctaatgcagcagtacaataaacctaggatcagagcagagtaccctgttacacgttattgtattagattcatgatgcgcaatggaacatgacatactgaagataattcatcacttttatcgcctacatattctacgccaaaaactaaatccaccattgtacattctttgtagtttgtaaatgccagggatatcatcaaacatttgcacaaaataatgcccagatttaatcagcaggaggagtatgaacaggcacatgatatcatcatcatatggtgagactattggccacaagaaactcccaggttacataaaattgtctattgttagcaataattgatctgctaagccaattcaccatacaacagattacatagaaattcctcaacaaaagggaacatgtacagcaggaagaactcaaaaggcacaagcaaaaaggattggcattgtaccatagatggcgccgccgacggcttctccggaatgctgagcacgggcttcttcgccaacgccgtcgtcccagccggcttcgctgcgccaccattcttgtcctgcgccttcatgaaccatttcctgatgtccgaagacttgtgccccccacaaagaacacaaaaaagggaggagaaagaatcagccaagaaaccctccccgcgtcgaacgaggaaacaatgcgggcgagattgaagaacacccaacccaagaaactcaccatctccaatcccccgaaaagagaagacccggatcttcccggtccccacacccgagcgcggcaagattcgagccgatgagcaggtgaagtgcgggggccctagggtttaaggttgggggcggaagcgagcgagcgagcgagccgatccctgcttcctccctccctccctccgacctcacctcgcttcttggggcgcttcctcgtcggagtcaccaccggatgttgggggggatggaggggaggaggaagaggaggagaagnggcgccgcggcgggggtgtgcttcggaaagagtcgtcgcgcgagggggaagaggagagggggtcccgggtttgggggaaaaggaggggaagcggcgcgcgattttggcgagatgggcggggccgggagggctggatggatggatcggtggatgcgtgcgtgacacaaacattcattggtttcgctttgatggggtttgtggcttggtgctcttgctcgtagcaatgtcctctctctctctcaagtaaaaatccaacatactcccttcattctattaaaaaaataaatctagaattaaatttgacatattatagtacgataaatctatacatatatcgaatgtgacaaatcttactaccatgaatctaaacatatatcatctgtttagtttcatagtactaaaaatgtattacatcttatcctagattcatctttttatgtgacgaagggagttaggttctctcaacgtgtgtgattgatgtgtctatgaaagaaagtcatatcgtatagggataaaagaaaatttggatgagggtaacagagtttggatatactatatatgggcaaaatcattgaattgaaatgttaatttgaacggctgtatttgtatttggagttaattggatgctgaaatgagttttcgatgtaagataagaaaaaatgtggtttagacttcaaacgtaatgctcgtgcaagtagcaaatttaagaacaatgttaaccttttgttgtaaagagtaaaagaaatactatagaaaccttaaaaaatatgtgcaatcaacttttcaataaaactaatgtttacatgtagcaattttctttacttttggcattgaaacccccactaatgtttataaccttttggtagttggctaaaggtgttcatcctaagcccataaaccgaatctttgttaatattacagtgttattttcgacgatacagttaaatagaaatgatgtggtttttaatgcaggttatatctaaagtaacataccgggtatgactttagtctttggtacttaagaagataaggcaatcgaggtgaagaagtataagggagaagagagttccagagttcctttttctaagtatggttggaattatagaaggaggctagaagtttaatcctttgttctcttttgttagtcggataaactcttattttaagttgtggtttctcttataagggataagtactcgtgtatgaacttttgaccatatatatccatttagtagttgtgttaattcttttttaatttttatggtgtttggatgcctttctttcctgtattagcctccttcaggtcagtgtcacgcgttaagtttggctatggtattaccctactatgacttataagcatggtatggttattaagttcacaatgaaatatgagtccgaattgtaatagttgataacatggttgtttaattttccttgagcatacttttaaattatgatgccatttaatttccttgaactagtaccactgtttttagtgagttttgtttaattgatcatgatttactttgtgccagtttgtgcctaccgttaccaacagggagcttcaggagcataacaatttggaatcccaacaaccaatccatgctgctgtagaacataatgtttgtttttccaatatggaagacatgcatgatccatcagcgcaatgcaatagatagtatgtaggtaatttagttcttaggggcgatatcaatggtaaaggctcgtagcatagattatttaattttctttttctttatgatgtgccttttttgattgatacggtcttgtttgaatatggagtgagtaacaatttttaagtttttgtgagaagcttcttaaaacatatatcgtcacatttggttgtttgttttacattactaaatagcgtagtagcattagtacgagcatatcactagtgataatggtttttttaatatggcatccctgtaaaaaaaatacaataagaccatatatgtaatagctactgtcggtgacatgggaccgggagtatcatgacttagagacttgaggcagacacgatcacccacgtggcctaaccccctcgggggggtcgggcccgagggtgatatggccgcccttctctttgtctccccgaggggtcggaccgctaccgcctcggccccgagggccgaggcgccccgaccccttgtgggttttgcgccgcgtatatggggtaggtgagcatagcggggctcacctaaccacatttattgcggtttggacgagcgcgtcacgccgcatgtaacgcagtgcagcgcgctcgtttatccggtctgtgacgggtcacagaccggtcagatcgtgggttaggtggcgacaggcggtttgacgcacgcctcgccccatcccgtcaggacgagagcctccaagcactcgtccctagccggaaccggcgtgttagctcctggagatggcacgttggttccggtcagatatatgccaggcttcatcctaaccattacaggcaagatattgtatgaagaagggcgaacatgcagattgataaactgacgcgtggtggacaagaatgaccgatttgtgaccggtctgacactggtcatgtcgtcagcagacagccatgttcccacgtcgcgcctgcttccggtggaagtggaggtaggtatgggcggtcccgtcagaaggtcattcggacggcaaccatacaagtctccgtctgtttatgaataaaataggataagtccccacaaaaaagagagagatggtgcatgtggtatccccttgaggtataaaaggaggaccttgcccacttagaaaggggattgaaggggggaaaaacaatcccagaacgatcgggggctggctcgcgctttgtagcttcttcatacacagatccaccaaaacacaggagtagggtattacgcttctcagcggcccgaacctgtatacatcgcccgtgtcttgtgtgatttcactctcgcgaactttccacagaacaagagcttagaacctcacccagggcccccggccgaaccggcaaaggggggcctgcgcggtctcccggtgaggagccccacgctccgtcatctggcgcgccaggtagggggctctgcgagtgatcttctgagctctcgcactctttcgtgtgcgccaagcttttcctgttcagcccaatggccgaacaagcaaaggcgcacaacctctctccgagcgttagcggtgacgatggggagccaaacccacgccgtcgagctcgtactccaccgccccctccacgccaaagtcctaggagggaggaggtgctcgagagggtcgaaggatccgcgacttcgacatccacgggtgatggagaagggcgccgagatggggagcgtcgcctcctcgtctacggcgacggcagcacgccccagggcgcgctccaagctgcgggcgcgctcctacgtcacccgcccattgtccctgacccggagtctccagcccaacgttggctggacgacgtggccaacttggtcatgacggcacggcagcgcctaggtgctggtgggcggtcctccgccaccaagacctctggcgctgctaccaccggctccgtgtcgtcaaggcggagggcgcggcgagcggcggctgttgctcgccattcggccgccactcctttgtcagcgcctccgacccaggaagatctgcgtggggggccggatgcctgcatcgatatcgagcgccggcgtaatggccgacgtgctgcccacgcaacggagggcgcctcctcgtccggagtgtctcatcaacacggacgcggggatcagccctccgtgcccccggttggtggtgtcggctgtagagcctttgtggcgagccttcggaacgtccgttggcccccaaggttccggcccaccatcgccgaaaaatatgacgggagcgtcaaccccgccgagtttctccaggtctacacgaccgggatcgaggccgccgggggtgacgacagggtcatggcgaatttctttcccatggccgtgaagggacaggcgcggggttggctaatgaacttgccacccgcgtcggtccactcctgggaggatttgtgccaacagttcaccatgaactttcaaggcacatatccgcgcccaggtgaagaagcggacctgcacgcagtacagcgaagggatgacgagtcacttcgctcatacattcagcggttctgtcaagtccgcaacaccataccatgcatccctgcacacgcggtgatctacgcgttcagggggggtgtgcggcacaaccgcatgctcgaaaagatcgcctccaaagagccccagactaccgcggagctttttcagctcgcggaccgagtggctcgtaaggaggaggcatggacctggaacccctccggttccggtgtggcagcttcggccgtccccggatctgctgctcagacagggcggcgtgacaggaggaggaagaagaggtcagcccataccgacgacgagggtcatgtcctcgccgtcgagggcgcttcgcgggccacccgaaaggggaggcctgcgggcgacaaaaagaaggaggccggcgctcccagcagggagcgcccaaccggcaagtggtgcatcgtccacaacacttcccttcacgacctcgcggactgccgcgcagtcaaaagtttggctgagcgtacgaggaagtgggaggaggagaggaggcaggagcgcctagagggcaagtccccggcggttccttccggcaaccggcgaagtgaggccaagcagaaggaccccgccgaggacatcgatgacggcgatgatgacctaggtttccaagagcctggggccaccattgccactgtcgatgagggagcgtgtgctcacgtttctcgccggagcctcaaggccatgaagcgagagtttctggccgcggcccctactcatgaggcgacgcgccgggcacggtggtcggaggttgccctcaccttcgaccagaccgaccacccaccgtgcgttgcccggggaggacagatcgcaatggtggtttcccccactgtttgcaacgtgaagctggggcgtgtcctcattgatggaggagcagccctcaacatcctttcccccgcagccttttacgccatcaaggccccggggatggtgctccggccgtcccagccgattatcggtgtgacgccgggtcacacttggccgctaggtcatatcgacctcccggtcaccttcggtggatccgccaacttccgcacggagcaggtgaactttgatgtggcggacctcagtctgccctacaacgcggtcctagggaggcccgcgttggtgaagttcatggcggcagtccactacgcctacctccagatgaagatgccgggccccggtggccccatctctgtccatggcaacctcaaagtcgcgcttgcttgtatggagcagcgcgcggaccacctcgccgccgcgtccaagcccgagggtggcgacgagatgcttggcacctccgcccccgccgccccgaggcagcggatagtcacatgcgacgaggtcccggtcaaggaggttgccctgggcgacggcccgtccaagaccacacggatcggtggtcttctggacggcaaataggaagacgcgctcgtctctttcctgcgggcaaacgctgacgtcttcgcatggagaccggcggatatgcccggggtccccagggaggtgattgagcatcgtctcgccgtgcggccgggcgcaaggccagtccggcagaaagtgcgacgccaggccccggaatgtcaagccttcatccgcgaggaggtggcgcgacttctggaggccggattcatccgcgaggtcatccatccggagtggctggcgaacccggtggtcgttcccaaggcgaacggcaagcttcggatgtgcatcgactacaccgaccttaacaaggcatgtcctaaggacccttaccccctgcctcgcatagatcagattgtcgactccacagcggggtgcgaccttttgtgttttctagatgcatactctggttaccatcagattcgcatggctagggaggatgaggaaaaaactgcattcattacccccataggaacttattgttatacgacaatgcccttcgggttaaagaatgcaggtcctacttttcaacgtactactcgaatttctttgggtagccaaataggacgtaatgttgaggcttatgtcgatgacttggttgtaaagacgcgcaaccaagagaccttactctcgaatctagcggaaacttttgaaagtctccgctccgcccgcataaaactgaaccccgataagtgcgtgttcggtgtacctgcgggcaagcttctcgggtttttggtctctgcccgaggcatcgaggccaaccccgagaagatacgagctatagagcggatgcgcccccccagcaagcttagggatgtgcaatgcgtcaccggttgcatggccgccctaagtcggttcatatcgaggctgggagagaaggcgctacccttatttaagctcctcaaacgctccgggccgtttacttggacggaggaagctgaacgtgccctcactcagttgaaggcgtatctcagctctcccccagttctggtcgtcccggagccaaatgaacccttgctactctacttagcggcgaccccacaagtggttagtgcggtgttggttgtggagcgcgatgaggacaatcctcattccgcgcacccccaccctgtgctggcttggctcgggagagagcagggaggagaggcccccgagccgaacggtggcccaaggcccctgacgaccggagctggtcctctgcctgcttgtcagacggtgccaggtgcccccgacccccaggatggcccgagggccactgcgggaaggccgcacctatcgccctctgaccccgaggctaaccctgtgccgactcgacccgggagagagcagggagaagaggcccccgagccgaacggtggcctaaggcccctgacgaccggagttggccctttgcccgcttgtccgacgacgccaggagcccccgacccccaggacggccccgaggccactgtgggaaggccgcccctgttgtcctccgaccccgaggtcgtcggcacagaagacaagtgcgccccgcgaggccgcttggacaaagagcgcccaagggatgtggcccctagcgaagaggatcggccccaccgaaaggtgcagcggcccgtctactttgttagtgaggccctccgggacgccaagacccgataccctcaggcctagaagatgctttacgctattctgatggcttcgaggaaactgcgccattatttccaggcgcatcgggtcacggtggttacgtcttaccccctcggccaaatcttgcataatcgagagggtactggacgggtggtgaaatgggcagtcgaactttctgagtttgatttgcactttgaaccacgccacgctatcaagagccaggccctcgccgattttgtggcagagtggaccccagctcccgagcccgtctcagtccccgaggccagctcgggtccctcgcagctgcctcacaccgcccactgggtgatgcagttcgacggctccctgtctcttcagggcgccggtgcgggggtcacgttgacctcgccgagcggagacgtcctcagatatttggttcgccttgactttcgggcgaccaataatatggcagagtacgagggactccttgcgggactcagggtggcagctggactggggatccgccgcctcctggtgttaggcgactcccagctggtcgttaaccaattctgtaaggagtaccggtgctctgacccgcagatggacgcttacgtgcgccaagtacggcgtatggagcgccattttgacgggatagagcttcggcacgtgcccagacgggataacacggttgccgacgaactctcacggctcgcttcctcgcgagcccagaccccaccgggcgcctttgaagaaaggcttgcccagccgtcggcgcgacccgaccccttaggggagacggacgcgcctgacaggcccccgatgcccgtcggagtccaggcctcgggacccgaggggagcgctcctagctcccttagattgattgcttggatcgctgagatccaagcatacctcacagataagactctacccgaggaccgcgaagggagtgaatgcgtccagcgcatctccaaacgctacgtgctggtagaagggaccctctatcggcgcgcggctaacggaatcctcctgaagagcattcctcgggaacaaggcgtcgagcttcttgccgatatccatgaaggcgaatgcggagcccactccgcctcgcgcaccttggttggcaaagcctttcgacaaggtttctattggccgacagctctcaatgatgcggtcgacctggtccggcgatgcagagcgtgtcaattccacgccaagcaaatccatcagccggcccaggccctgcagatcataccactttcatggccatttgctgtctgggggctcgatatcctgggaccgtttaggcgggccccgggcgggtttgagtatctgtatgtcgcgatcgacaagttcactaagtggcccgaggcttatccggtcgtcaagatcgataaccactccgcacttaaattcattaagggcatcatagcccggtttggagtgcctaaccgtattattacggataacggcacccaattcactagtgaactttttggcgattactgcgaagacatgggcatcaagctctgcttcgcctcacctgcccaccccagaagcaacggccaagtggagcgcgccaatgcggaaatcctcagaggccttaaaaccaagaccttcaacatcctcaagaagcacggcgattcgtggatcgaggagttgccagcggtgctctaggcgaaccgaaccacgccaagccgagcaaccggggaaacgcctttcttcctcgtctacggcgcggaagcggttctcccatccgagctcaccctgaggtctcctcgggccaccatgtactgcgaggctgatcaagatcagcttcgcagagatgacctcgactacttggaagagcgaaagcggcgcgcggccctccgagccgcgcgctaccagcagagcctgcggcgctaccatcagcgccacgtccgggcccgatcactctgcgtcgacgacctcgtcctacgccgcgtccaaacgcgtgctggattgagcaagctctcaccaatgtgggagggtccgtatcgagtgatcggcgtcccccggccgggctccgttcggctggccacgggcgacgg

SEQ ID NO: 8664 - DNA, 23741 bp, Oryza sativa
gggggggtgcggcggcggcgcccgcggtttctcttttttcttttcgtttttttacgcactttttttttgtttttttcttttcgtatctttttagtctggtttctttttttgcactttttttttctttctgtatttttgtcagtttttcccttttttaatatgcacgtattaaacacgtatataaagtttatatacgtgtatataaagtttatatatgtgtaatttttatattacacatatatacaaacatatataaagttgatatatttcgtatatatacataaacaaattttgtatataaaaaatatatgcatattaaaaaaatataaatatatgcaatatgtatacataatatatactttatatacatacgtatacaaagtttatacgtatatatataaaatatatatgtatgtatacatatagtagagaggagagatgagagggtcaaaaactgaccgtgtcccacgcggggggcacgactgatcgcccattagggcccctggctgacatgtcctgacccgctcgtttaggacgtatcgtgccggtctgactgctctcggtcgtgggcctagtcatgtataggccagaccagaccgggcaacctatctagccatctataccacctggtctccttccagtatctcatagaaaccggatcctctaacgtgaactgctccctgacatgatcactgacaggtaggctcgcgagcattgggacccacgtttcagtcaccacgtctctctgacttcacgtcagatgttccaatctaccccatgcatgcatccttctccccaagaagcagcgcagggcacattaagcattgatttcctttttagcatcagagttggtgggtcccaacgccgccctttcctgcttttttttttggttcaaaacaaagcataaatggtgtgcttctaaatcctaaatgccagtctatcctttcaaaagctttatattctactatattgcttagaacactagttcttttatgtttatttttgaaagctaaattatcatattaatcaaatagatatccattttatgtcagcagcgtatcttaactttcaaacaggacctgcttggaacccttaagtacccgttagtaaacccctgaagcaagatcagtttgagctccacacaaaagcatagagtgtgcacatccatcacaaattccatttattttttattactttgaagagacattcgcacgtacaccgtcacatatacacacatcacaagcatatacacgcaaatgccaatgaaaacaaccagtttttttttttcaaaaaagaaatatagaatgttcagagcgtaaggacgacagtactacttatcactgacgtggcgtttagaacacagaagatacatatatatacacacgagcataagtttttagtgccaagcctattaagtcactgaattaagggcacgctgaaggatcggtcaagctgaacacagttgagcaggaaaacagaaatcaggaataggttcacgacaaatggataagtggctcctcttgattaagatgcaaagcaaaatgataacgaatgtaaacaaagggaacggtaacataaactgaaggtacacctgtgttaagttattaacttgaatattgaatttcttgatgagatcaacaacttcctttcttggcacagtggcgcctgcaggaaataaatattagtgacgcgcctccttcattttcataattctttaaattaacatatatatagctcagcagaatgaaggaccacacaacaagcagtgctaacgggagtacggaaggtgaggcagtgaggaggaggttataccatcgagctgccactcggacttgttcttggtatcgatcttcctcgtgatgcggataatgtgttcgggtgtgttcccgcgagtgaaatcttgacatggccggactcctcccccctcttgacgaacgccccgacgctggccaccctcccgagaacctgcattccgttcacgcacgcatttgttcatacacttagccgtcgtattcgcataagaggggggaaaaaaacagttgccgcgggaaatgtaaggaggcagtaggtgtgtacgtacgccggggtcagcggcgagggcgagggcgatggcgcagacgagggagctcttgccggagccgttggggccgaggacgaggttgaggcgggggcctgggcggcaggcgaggcggtggtaggtcatgaagttggagagctcgatctcgacgatgttccccggcacgtagccgccgtccccgcgccgcagatgcgtcggcgtcggcgtcggcggcggcggggcggcgatcctggcgcgcttggcggcgcgcgcggcggaggtcgccatgggcgggggattgcgcgggtgctgtggactgaaactgttcgacttccgcggaaaaaaagaacggaaatggagaagaaatcgggaaggggatctctgctgctgggccgaacattctactgggcttgtaggactaggagatttgggccttggccttgttggaaggcctttttggatgatgagtccttttctttttggaatacaagtctatttcatctcttactactgtttgaatcgcctacctcaaccacaaaaccgggtataacgtctttcttatcttaaaaacagtgcaaatagactccttcgatggtttgggaagcggtttttactgacgtgtcaggttgaccgtagttgactcgttgatttaggaggtaagaactcacatgtcagggagctacaaccccttgcaaaagtcttgtctgaaccaagtctataggtttctaggagaatgatgagaaaatagtcttaaacaacaccagctcaaaagcagatacaacttatctaggaatcaatcctatgactaaacctctagttaaaactgaagaaaatttgtgtgactgtctctaaattccgaagatatgtgattgatatagaataatatttttaataggactttccatttctatccttagcaattcaaaagcaaaagcaaagttactaaaaacgacaaacaaaaaactaaaattagttctaaaatttaaaattggtatgttgtagctgaaacaaacaggcccttgggcagtggaagctcagtgggattcatggatggatgagcatgcacatatccatagctgataggttatttttttcctttataacattgcattgaacacacacgcatatacaccaccacaaatacacttaacccgcatagtaagtgcatcgcatgactatttctacgtcactgctacgaaaacagccagttttttctttttaaaaaaatccagaatattcagaggtttcagggtcaattacaaagattaaattatcctctacaaaattcaaattacgacatcactactcactatcattgacttggtgcctagcacaccggaggtaaactacaagaacaaagctctctcagtctctcccgtctctatagctgctatcagcgttgttctatattctgtttcatctaaacttcgattggaatgcactcgaatcaaagaagaatgccatcgatgaaatgaaacgatcctgagtattattgatcttcttgctccccggaagttgggtttctgatctttcttatttttctctgcaggtgaaggtagaaaattcagtaacccatataaacattcaagcaaacatttgcttcaacaaaaaaaatttcaagatatataaggggaaggaatggaatatgtggacactaaccgagttcgcccacatcaacccacaagcattgcaaaatgatttggttccattgggagcatggcgcatcatgggtgtggcgtcgctgctttcaccacagttggtgcagctgcatgaattaaaaatagtatacgatcaacaagcagcatccacattgcaataatgcaatgaaggtttcagaaaatcagaagtatatatctgttgaaaagaacttacaaagttatcccctttctgtgtgccaaggaattttcagaggtctgaaccctaggtgcaaatttccctttgctgcgtttcatcctgaatgagcaaattcacaagaaccaaaatttgttaagtactagcaaatgcggaccaaattaacatttcggaatgaagattttgatgcgtaccgcaaagcgacttcctttcgggcactgtaatccgccttcttgatgaacttgatgttcctctttttctccctataccgcgtcagcgcagcaaacctgtcgaagtcctcgggaacagtgatgggtcttacctgatgaaaagttcagagaagttgtaatctgctaggacaactgctgcagagagtgatctgcaatgcagttatttttttcaaatggttgtgaaaaatgcagatgatttaattaccaggttagtgggttgtggcctgatgctctgtggaatcatctcctgtccattcagatggtggaagatattttcaatctgtgtaacagtatcacaatattgtcagtgctgtaatacgatgttatttaactatttaagtggtaaactgtagcaatacataataaatatagtgaagtttttcaatattgcactggaaacaagaatgcagagaagacttgagcgcatgacatggtaggaaaagaatcatggatagcatgcactacttccgagcaaaatcccttgtattttggaatggagttagtaagtactatactcgtgttgagcggctacgcaaaaataaaactacactacaaattttgtcatcgaagaagaacattttaagattgaaattctgcttctatccaataatgatcagagaaaaaaaagatgaaacaagaattagtgcaacgcgttctaaattagctacaagctaagagacaaacattgaattggtcatgccaagctcatgcatacataacaatgcaacaggaggataaccaactcaacatagcaaaagaatccaacagagagccacaaatattaaaaaaagcaaccacaaatgttgctcataagtactgtatctaacagtgtcaatgcaaaagaaaggtagagtgatctcaaaaaaaacaatgcaaaaggggagataataacagtctgatccttttttaagtcaaaagccttcagtgcgtatctactaattttcctaggtgaaatgcaagaagtaagaacagagctccttatttttcaggatcaaaatgaaattaaagccgaaacaaattatccaagagcaaattaaatataccacattatacaagagcaaaaccttctaaccaaattcttgcaaacaaattaaagccgaaactcatcaagtactagctaggatcaaagaatgaagaaacataattatatttccaaggaagagaatgaaaaaaaaaacgtagaaagttaccaagaaacaagcacattgtgcagcaagaccaagagataccttctgcggctgcacggggtcgaagatgtactcctgtccttggtagtacatcaccagccgctcatcgtcgccgtgctccggcgccggcgacggctgctgctctgccgccggctccggcgccggcgacagcggcttctgcccaatcgcagcctgatcgtctacgtaacagccgtcgccggcgtcgagtccgtgcgtgaagtcgaacaagtccaccgggagcaggatatcgtcgaaggtgtgctcctcgtcgaagaaatcagcggccgtcgccggcgacgtcttgcggtgctcgtcggagctggcattggcggcggcggcggcgccgccaccgccggagctcgacgacggcgtcgggttgtccattggtgaggttgggagttgcagtgttaagtggactggagctttgttgagatcgtagtgacgagagaagaatatcgaacgcgtgactccaaattttatacgcgacatgagatataattttttggacaatattgtcaatatataagttgatgcaaaaatttcctgaaatcaagtttatatgcactttaagtgctgtattttttaatatatatttttgcatcttggaaaactccaattttcaaagaacacctagtttatgacattaaagtataaacacgtccacctacaaatttttgtgagcaccaatgaattttttttacatattattagacatgtgagttacttgtggtggaagtggaacttttgtccatccagatttatagtggaacttgcatgttatgtttaggttctacactccatatattcggaacactcaaatcatcctttaagggaatatccacttatttttacatgtcacttaaaaagtcattaaaaaatttgaaaaaaattggtaggatagaccaatatatgatatgttacttcacaaacatgcaaatttaaattcaacttatacaagtaaaaacaaaaataacaaatttgactatgaagtgaatgtgtaattcacagtcaaatttattctttttgttttgaattgtataagtcgaattttaactcgcatgtttgtgaaaagatatatcatatattgatctatcttgacaaaaaaattttaaaaaatttagtaacattttgaacgacatgcacaaaacgaggggacgtccctcgacctctcgagggacaataatccatttatgatatattcacttataacaagatatttgtggtaaagtaatctcaaaatataccgaatataccgacccaatctcagggcacatgtttgacaagcatttatacgatgtttcttaaaaaaaaggaaaaaagaaattgtggtgacgacgaaaatttatacggctgtgtctaccagaagtacggattgacccgctgaatctaaccaattcactgggatgagcatatgtacggcctcatgtagttctccattgacggaaaattgaatacgaaatgtacaaccctacagtcgacagtttgagaacgattttacagagaaatactccgtacgacaataacgggttgagaatgtagtagtgtttaaaactccaattcaaaatctttttcctccaggatagcagatcttagaccaaatctaacactaattgtctaattccacatgtgaaggtaaatcaacgagacaaccatccgaagatcaaaatatactcatttccgaagcagcaggaaaaaagaagtaccacatttcaatgatatttcatatttgtttctcgaaggaaatcgggatatttcatatttctggtgaattacatcatatccacgcttacatcagctattactatcacggaacccagcgccgcactaactgcggcagtaattctggttaattttttctgcgaaaggaagataaaattgagccatacagcaagattggtatgatgttttccattgttacatccacacaaagacaagaagtcgatatgagtcagaactataccctgtatacatatgcccccctaccaaaatcttatgtaccgaaactttgctctaaaaatgaagcaacatctaccctaagggggcattcacacccaacttaaggaaattcaatagcacgcaccattgccccaaagcatggtggaaaatcatgaaaaatttgtcatcatgaacaatgaaatcaagtgcacttctgcatccaaacagcaccggtagaaaggaatagaggccacggcacccaaatggccaaaacttgttgctgcttttccctgttcgagtttaacttctccatactacatctctctgttgctgctttcagatttgacaccaccaaggggccagcacagtcagaagtgatttcaattgtaaattctcactggcttctcataggtgtgacggttctgcacattagttgaagccagaaacaaaaaaggaagaagcaaaatttcgttaagatgaggtccttgcaaccatagcaatatgcatataaaagaaaagagcattggaatgctacagtacagtgcaagtacagtgcagaaaaatgtatgtgaagtgcgaagatgtttgcggggaaacccaaagttaactacaagatctttcttcagtagcagcaaagccatctcaaagttgcgtataaggatactgtaaacacctaaatgcctaaatataaattgctcagcatgtactccctccatcccacaaaaagaccattcctagcatcccaaggtaaaattagtggggagtaaaaatgaccaaaatgcccctcattattggaaaaggtagtaatggtgataggtaggtaaagggtatttaagggataaaacttcttgttttatgtgctgagggtaggtaggatggtagaagttggtttttttgtgacaattcaaactccagaagtttttttgggacggagtcatggagtaataaaattccggattattggtttcatgtataactaagagggattaaaacagaattctctaaaacatcaggcgagcccaaatattttgaaagatcatttgatgaaagtttaaaaagattgcaagaaataccacggtgtaaaccagctgaagtgcaggtagcaagataaacgaagtatagcatagatatgcccaagccgagtgacagaataaaggtaaaagtaacaggcacaagaattcgctatgctcgcttcacaagttcacaaccagacagcagcatacctgattggctgtgtaggccctttttggtgcagtatcagcatgctccaaaccaagatactgctcccaggctccatagacatctctcctctgaagaaatcagaacagaaaactttgtaaatcatagaacacaacaaatttatgggcacaactagagaagcctgtagggaacaaacaataatttacctggaaacgggcagatacaacatctgaatcttggaggtaatctggccggttcatggatatgaaagcgaatttccactgatcatatagcattaaaaagtatattagtttagtgtctgtgtctgcatcacatagtggcacgtaatgaaactcaaggtaaaaggcagagaatgcaacaaagagattctcatcagaatatacatgttagtttatttcttttctttcacccacatagattagatttggctcacgtaacacacatggctaaccattctataagagataatgagcacgacagtgctaagtgtatcataaatggccactgtttttgagaattactgagaaaattttagactgcagtataatatgagaactctcagctccctacagtaaaagaaaccactagactggtatacttcaaaactctgaatctgacttatatatcagcataatcccaaggtggacaaggataaagagcaagccaaaacatgttataattccacgctttcataagaaacttcaacagatggatcaccttgcagaattcctcatcagggacttggagttttttctgtatgcgctcctttacttctgctaaagtctcaccttcacggatagcaagataaaaaggatctccaaagttctgaatctgctgctagtcatcacagcagtattaatggaatgttcagcatattttgtaagtagccaactcccaatacaactcaattagacaagaatgaagatcatatcgaagtgcactacctgattctgaagagggtctttcatgaagtgataaacatgaattaaccgatcatttggaccgagatttttctcctcctctggaatctgtaccaataagcagaagcagatatgaggatagaatgaaggcgcacattttgacacaagcaggaaatgaaatagattgcaactttacagttcacgaaatggagcaccaaatgcaaccaaaaagaacattacatacctcctcagcacgtagtgtccagtactgatcattaatattctctatcttctcatggagtggaaaaatctatggaaaaactataattagtaacagccatgccataaattataaacagatgtttttttaaaaaaaaaaagggaattcatcaggacatatggtattttatttctcttgaaggctgaaagctaatgtacaagtaccttatatatcttgtggtaaaagacctctaacaagcgcaattcagcactgggactggatagttcaacctgatgattagtgacataattagaatttttacataaaaacaaacacatggagagacataacaagccggtttacacagcataacttggtaataccaatgaaaataattgaaacattccatcccatttaagatagatgacaggttagtgagagtacaataagctgacatcaggttattaagtatggccagatttgcttaaccaaccaagactagtacaaaaagcatatggataggaggtttcacagtacttttcacagtaagtatgttgaaacagtcatgcagtcacatggaaattgaatatgcggctcaacaacgagctatatattagtatcaatgcttaacacctagttgtacttatatagagtatttacacgttaacagaacatggattaaatgaaccaagttatatcacttgatactttcattttgcatcacaatttggtaacctggagagtcaactatccctatgcaaaaccactcttaaaaagttagtatccatttctcccttacctctaaaggagattagaagtgcaccctaaaaagaacgcatgtgaatatatccaagtcatgcattggtgtatctcagaccaaatagagtgtaaaactggagagcaagactaaataacttgtaataaagaatgaaaggatagcaaaaaaagaacctttgttttcaaatcattaatcacgtctgcaatggtgctattctttggaagcctgatactgtgaatcacaacctagaaaaaaaggatgtttcatgaatatatgcacttggtagctgaagataaataaagatgtattgtttgcagctaataacctcatcctttgtagcatggtggaatgcaactttcagggttttcaggccctgcaattctggcagtggaatatccaacacctcataatacaatatgtctgatgtctgcaccagatagtataaatccctttgtattttacctatgcagaaaaactatgctaactgacccaaaaaaaaacaaaaagaggtgaaaggttaacctgattataatgaatgagcatgtccaaaagatgctccactccccgatatctgataggttgcggtttaggctgctgcgaatagcagttatgggatgttagacgaattttcgctggatcatccacaccaagctgacgggcaactctctcaacaacatcatcataggtatgaagttttgaccttaaagaatggggaagaaattaacgttacacatacatgctagataattagccaattaaacagtttgaacccaataggttttgtagtcactcacaattccaaagaaaagtcatcatcctttggtttctccaataaccgaaagtgcacaacctgcagtaaacaaaatttacatagataaagcaagtggcatcatcattaaaaaggtagacccactataatattacatgagcatgaaaaaccaaaattaaacaagcatctaacatatgatagcagaagattagaagggggtgaatgaaagcaagagaaatttccttttgaaccacagaatgcaaaggcacatagcattataagcatactactataaaaggagctagaggtgattgagctcatggtcatcccctcacacacaagaacttgtgtgactaatataggcatatgtcgattgaaatatcagttatgacaatatgcatagtgtgcacgtctataggttgttgattgatctaatgtaatcattttaacattttttaagttttgaagttaattattttgtttacatttcaactttatagaagtttgaatagcataatatattactgtatttgttttgacatccattgcaatgtggctgccatgttcatagcacataattaatcttccatttcagtctacaggagatgatgcatttcaagcgtccatagcacatgcttcaatcaatggaaattagtataatggccccatactgtagagcacagccatcttaaccgaggaagctaaaaatatcagaccagactagcctggtaaagtggtatgagataagattactgccatgttcgcagtggatgttgatctagtacataaactctaggactacaccatagaacaattcaggtagtggaatgggctcagaaaaaaattgccattcaaccaggatcaggcagaaccctcttctacaacctaaacacgactctctaggaggacagccccagccttctatttctttcacactgcaactacccttccccactctctctctctctctctctctcttctctctctctctctctctctctctccaccaactgattggcaacagcatgttggcaagcaagggcaacgtgatggtggacagtaaactaacatggtggcatggtcagtgtagtgcaatcactagctgagatcaaccagatctagccaggttgccagtgaggaaagtgcagatctgggctcccagtagccactggacactaaacctgcaccaaattcagcattgcctcacctaactcctccataagacccagattaaccttttttaatggagcacaagagcccagtgtaggtgctggccttgcctccacagaagttctggtatgaagcagtcgcatcacagttccacctagaacattgactaggcctcctagaaaggcacgaggaggggtaggaaggagattcagacagacaaaacaagggacggattcagggcgagaattgaggcagattcaggggaaaagaagagaggcaaatttaccattgcaattgccgtcttctgctcctccaagctccatctagacatctcccagatcgtcactgctggcagacccgttactatgaatctatgtctatcagagggtgagaggggaggcgcggagagcaagagaggagtgaagcagagagaataatagatgaggtggtgtggccttagggggtcatacatcccctctgttagccacaggtgcattggtctgcccgtcacttctttgctttatctctttctttttgttctttcccttttcattttctagttgcactgccacttttccgcatcatagccacatctgccaccatcatcacctcttcttcccttccacatccctgggtttgtttggcaaacaaagaaacccttctaatcgcttcggataggtttggactgatggggatatagatattccctcatatccaaacaaacctaaggatataggctgagatccatccctctctctcgaaacagcaattctctcccaaatgccacccctcatcatcattgtttggataggaagagattagacccaattccttcagatagtgggaactttaattccatttatagcccatccaaaggcattaagcctaagccccaccaattcaaacaagcctttccatcagttaaaatggtaagaagtgggaccaactaaccacccatcgcggcttcctgcacccaccaaccaaccaaccaaccaacatgttttaataacccccagctcgtaaattccaattctcttctaccaatttcctcgagccaaaaaagccaagaaggtgatgtacaagccagagaaaaaaaaggcagacaactagatgacttaatctgggtgaagagaacatagaaccacaaacacaagtacatcaaaaatattaatagaagcaactatagagtagcagcataaatagatagtgtacaattagcttacagacaaaaatataaataacaaagaaataaacgccttgtacctacagtacaaagaattggaatcaagttgggaaatataagcaccatacctgcctattatgaacatactccagatacgaagggacatctggataacgcatttgagtgtcactatcaggtataggtgatttttggaaacagatgatgtccccatcttcaagctacaatatttggagcattttgcaaatcaataagtgtttaattcaaatttggcattccttaaccaaaagaaacatgttataaacctgactagcacggaaagtggcttttttgtcaatatgttcacacatcacatttggctcaaatttaatttcctgcatgtaccaatgaaacacaacataagtacagtcaacttggtaaggcagtcgatataaaacttagcaattgccactccaaagattgacacttaataatttgccactgaacgccagacagatatctggacctactcctagaacacgcctcaatggagtgacatatactagattatcccataaatatagcatcatgaatttagctcttgcctcgtagagctcaatttcttcatttggcacaaatccagccatttcatttagtttggtcaagatttctgagggttttcccaaggcctttacgaagagcctccccacaaaactgcaatcagtgaaagaatgttatgtgtcagccatttgtgaaggaataaggaagaatgataaggtgttaatcaaataaatgtaccagagttcttccttttcgggattatagagtttgaagaacagaagaatatcttccttgctcttctcaggtggagggagaggccgcaaatcctataaatgataaaacagacaacaataagtatcctgcataaccataagtatcaaacagataaacaaagttaagtatcctgcatctagaagccataacagacaacaataagtaaaaaacagaaaaagaaatggtagcagctccagcacatcattaccgggccaagttctacttccaaaaacaacttcagctcagcattgtgtgccttattcgatacctccctcagttgtcccacctgtgcagatacatataaaaatgaactggagatgataagaaagagaacagaagcaataaacacacaatggaaacaagcaagctcattgaaagaaaaaacgtataagctaagtgcatgatcttctgataacatgcataacaaagcactctcagcagagaatctatacaacaaaatactccagaactgcaacctatataaaagaaaattcttaagtggggagtgagagaaagagagacaggggaagatcgtaagaactcaattggacctaaggctgttagatgaaataataaggtaagattaatttccaattgaagtgtgggtttaacagtttgcttccaacaattgaaagtgactagcttacagattgtgtttcttcatgaggactcaatggacgattaggcctgtatgtgtggttctgcctcttagcccacaaccagaagcgctgaaattgtacagggatgccatactcctttgcaacttcctcctattaaacaatttattcaacagaagttaaattaccagttgattttacagaagcatgtgtactcgtatagcagaaatttagcattccaatgctacgaaccaagaacttgtttgcacaccttaccttgaaagtggtaaacagtaactgcttctgaattcggaagctacgaactttttcatggtccaccaggtcaaaatatatatccttgccaatttgctccttcaaattctcatctcgagccacctagatatatttgtccaaacagagcactatgagaaacagattcacagagaggttccagactgagatgaagtgatgaacataatagtagtcagatgctgacctttatgatggtataaagatgagcttcagccttctctttctttttgtgttctttctcttcttgttctttcttcaaccttacctgaaaatccacagtttatcatccaaactgtatcagaagtccatgacattaaaagggagaaaaccaggaaataccatcgtaaagatatgcagattgtaaaatatcaccacatatgagaatgacccatggggcctgggcccacgtgtgttgacacatgcgatggtattttccaatcgtggtatcgaggaaattggcccaaggaggagtgagaatgcaaaacaacacatacccttaaatgctcagcaatgtccttctcatcaacattacacattattttgtccttatcactctcacggatgtagacaagcatgtaggcatttgaatactttgtgaatttaaatggagcgttgttgaaaccaggatttatttgaggcaactgttcagcccaaaagagattaaaattacggaaacaggaaaacaaacatatgtagttcaatatctcatatcattcaatatcaattatcaggtagaacacacctcttcctcacccccgtattgctcttcaagggccttcttagtatcttctttagttacacgctcatcatcaaatttatacctggtagacaggataacattttcaaaaatctataatgaattgggaactgtttgctaggatgtaaaattcaacagcatagttcgacaaaaggcataatcattgtagaattaattataatgcgaggatattgcacttgtttccaggttcttcaacagaaatttgcatgaggtagcactaaacctaagaagatttattggcaactcatttgatgcctaatatatggtattcagctggtctatatgcaagttacctatattgttgcagcgtggttactccctagactggcatccacttacaataaaagtgcataaggcatatgattttcctcctgtaatctcacaccacatacttcttttgataagtgataactgatgaccatcagcttgaaagaagttattgaagtccatgctagtcaggtgcttattagaaccaacacagaatcctataaccaactatattatgaaaaagtaacatgttgaacttgacatgagggccttctgtccagttaagagaacttatgtaaatttgttagtgtgtaaaaacgtcccactaacattggctaactctagttgagatatgatattctcttgtgtagaaacaaacactctaatatttttttggaaatctgcctcggaaatgctgcaatccaatagatacaggtcctaacaagatagtttcagttgtcgaatagagtgccagggagttgtctcggagaacacatctattcagctgtcatcaagtggccatgcataggaacagggtaataatattatctggtaaatggcaaatagttgaataattttgtattgttgtagtactagagacaaaaaaaaagtcaaagaaaaaccaaccattgatctgatagcgttggtcgaatgaaggcatagtagtgaccgccatgtactcctccactatgaacaagaacactgaataaaagcagcagtgaaacatagtgagaaaaagatgtggaaaggaggaaaaaaggcacctattggagcaccactgttacactgaaaatggtacctaagaaaccattacacaaaaataacaaatggtatttgcttgatcccaggtctcaccaaaactgaattttctaagatacataaaaccctgttattccataactctaaaaccaatatggaatacaatgactgctaagagaatggcaagtgatgtggaattctcaggaattgactcagtcattatgcatgaagattcgtgcaggtatatacttgtatagcgcattatatcagcccattttatactatcaaccaattcttcctccaagttttttgtccacagacagacagcagctagtagtctacccccatgctcatacatagcatgtagataaaagaaacaggtattattactaacgaacccactgatactttggtttccctaactaccataatgaactattaggacgtgtgatggagaaattaattgatcttaaagccattaaagtaagttgtgaatgacatactcataaaaaacactacctgtgaagagcataaaggtttcttatacttctatctgcatctggagcaagatattttccatcatctctatccaaatcaagttgcaaagggaattcatagcggtcattaatctgcacagataggcataatagcagaaatcccaagctcagaaccggaacgtaaacctttaaagtatttgaacagcagagatattaaagaggctagtcggctacatgcttctcaattctcaagaagtgatccaaacgtttgatccacttaatgtttcttgaattaatgttgcgttagctgtcttttgaaatcatttatggcagggaaaattgaaggaaatgatggctcagtgttaactgtctaaccaaggaaaagcagatgagacagaagttacagggaaacaaaatggaacataagataatcacctaagatgtctcaccttattattatgaaactaccagtcatgttggaagaaaacatattgcagctctaaagtaactgttaaaattcctaaaccaaaaagcaaaaggaaacttttctttactattcaagcccaaaatattttctcatcccttattgagaattagtatgtgacactggaatagatgtctgccatacaagatgaaaccccacgcgttgctgtgggagttttgtataataatagtagataatatgtggcatagctagacaatataattttataatactttacataattttcatctttgaccgaccattgaagaaaaagctacaaacaatttaagatgacatggtttataacaatttaaattatatatagattaatcatccaacagcaaaactaaggtgatgtggctcaatgaggtaagggagataatatagattaatcattcaaagataaaactagggtgataagacttcgtaagagaagaaaaggaggaacataatttggaccatagatcaatcatctaagagctagaaagaattgaggtgatgtggcttaatgagaggagagaaatagcattaactacacttagtggggataaactttatagatatataggataagggatgcatgtcaaaagtctcaaagtgagagtacaaccatgaattatggtggtcctgtgcacaagcaattatcataaaagatggcccaatcaatttggataataaataagaaacaaaacaggcaagcttttggtgggcaataccaatatgtgacaccatgactctccagatttataacaggagatgcacagcatttggaattggatctcgccaagttaaaaaactatttgcattggtgtacttatgccttttaggaattaagatcatgcatcaagaaagcgaacaactcatcagatccacagagtatctgcatgttgggttgtcaacttgtcatataactttgggatgggcaatctatttgagttttgagagcaaccaacaccaaggtcaagctcaaatcattgtgcacacagccacacactcaaggttggtcaagttaagatcaattaggctcgagagaacatacatatataatactacctccgtcccataatagttgtcgctttaactttttccttgcaacatttgaccattcgttttatttgaaaaaattagtgcaaatataaaaaaggataagtcatacttaaagtacttttgataataaagcaaatcacaaaggaaataaataataattccaaaattttttgaataagacaaatgatcaaacattataaaggaaaactcaaagcgacaagtaatatgggacggaggtagtatagtatagcataatagcatactacgttaaccataaatagttttaaatgaagatgttaagttgttaacatgtttacagcaatcattagtcattttcataatttctaagtatttcatttttttcccaattgcgttgtatgttctccaaatgtaaaaataaaatcaagcctccaagggtgtcattttgcacagcaggtcttgcattcacatgacaacataaataatagaggtaaatggatggagaatataaatggcaaggttatggcagtcccaaccttaaccatggtatctctcatatagtcgtactcaaaacgcttcagttgaagttgcaaaactggggggaaatcaaggaacagaacaccctttttcgcatcctgagacaatatcaaaaaaacatagtcaagaattggcaccaaaaccaataaaaatgggcttcatttataaaatatagatggagcaagctgttatagtatatgggatgcagattccctttatcttcatagatacataaaagtccacaagttatatcaaacctttatgaaacaaccaactctagcttcagtttcaaagcttaaagtgagaactgagaagaacatgtgggtacctgtaaaccatgattctctgcatgatacttattatcaccttcgaggcgctcaacttcaacatatttatcaaacgatgcatacacatcacgacaacctttaacatcaagttgaaggtctgcatggccataatacagcattaacttgacaataaataatgaaacacatctaatgtgaacccacaatctggtaccaggacaaaacctaccataaaaggactccttcctgttggatttatagtcaacatttatacactctatataattgatgtggtgaccttcgaataacttttcaatcgttccctctacgacagttctctaggaagaaagcaaagttaatagcagccaacatgcagcatatatacagctctataccagatttgtcaccttcatcttatcttcaagtttctcacagagaactctgttgagctcttgtacatcatgttgcatgaaggaatcatatgtgtcccatccaaaagatttggtcagctctttggtggctacactattgtcactatactggagcttgtagaaaaggctctgcaatgccaacggaatactcccagatggcatatcattttcggtggttggcatatgatacacagcctgggtaaaataatgaagttagtcaattagttctggaaacaatagtctagaatgctctgaattatgatgcatgatctcacaccttcctgaagtatggtatatggtatagtgtctgtagtagagagttcatgtaacaggtagctccttggttcttcaggccaacgtaacctgtttctttttttgaatcatatgtccaataatcaaccattttgcggacagcaacctcagcctccacaacaacagtatcatcgacaaggtatcctctacttggatcatagagctcactcaaaggcataaaagatgtgaaaccccaatcactctcacgtgcattaaattgatgctgagtatctgccagacagagaatcacaggtccatcagtgatagatttatcccatacaaatcactgaaatccgcagaccaacgtaaagtagatctactcagcatcatttgatcaagtagcagtatgcctccttaactagctaagagaactcaaaataccaaagaaaacaatgaggcctagcatttgcaagcatggggccacacaactccgagatcatctaatgactattataaggaatgaagcaaaagtatatacaggaagtaaaagtggccttataaaacagaaaagcctagaagaagcaaagcacaaatacaaatataacactcttgagtctgagaggagtttcatgttcaagaaatataaagaacctctttttctacactaggggaacctggccttggagaagtgagagctcttgcaaatagaaatgtcaatcatggtcattgccaatctgagcttggataaaagacccaaactgcgaaggagaagagtacagtagaaccttcagctgtctagcgggtccatttaaacaaccatatccttttgtggttcatcatgatataatgatgtgtaagtgtaacagaggaacaatttgattcaaccaaatcattgaacagaaaactatagtgtacccatcaggatattccgtgcaagcatgccaacaagaccaaacaaggtgctcgataacgcaagatcataaaggttgacaagcaaatagaaccattttcaaacatatggcatccatttacttgatgaaagcacgacctctgacctcaagaggagcaagtttttgaatactacgccgtgataacagtttgacaactagtgaaacatagcaaagtatagcatcatcatactctcaagcttatcatgtattgcttttgcattttaagtgtattcacgtaaggagttgtaaacatcatgatggaggaccataacctttgcgtatcgtatacttctgttggatctggttgacaacggccaagctaaactgagcatatcggctccaaccatatgggaggttagcagagtcggcaacatccaagtacatggagaaatggtccacgttgttccccttagggaaaatgagcacacgcctgcatgaaagcccgccaaacattactatcatccaaacattcaaaaagaaaactaactccattaactaccctttttatgagaccaggagctcaccatttgtacccgccaacgacaaacgcatccgagtagtgcttcttcgcattgatccgggtgaagttctcgatcgtccacgtgaaccgcgacgtctgcgggtcctcagctggctggctctccgccgtgctagctgcctccgtttgcgcaaccactgctaccacaaaccacgagcatatattactaccaacccacaaacactcccaacaccacacattacaaaaccacgctgtacaaatcacacggaagcaaaggaaagcagcacagtgaacccccatagagagcaatcaacatggcaccttccatgggctgggcggcgtcagcagcgacgagctcctggtgaggcacgagcatctcgtcctcctccggctgcgcaaagaacatatcgacaaaaagaaaaaaacggaaaggggggtcagatccagcgcggaggcataaaccctagcaaaaaagcggcaccacccgatcggacgcccaccgcacgggccaccggagaacggtgcagccctagcgagggagatcgggcgggtagacaggagaggggagagctctctctctctctctctctatctctctcgcgcgcgcgcggagaggcggttgcttacctcgagcgggggaggcgtcatcatagtcatggagaggggcgcctgcaggtcgtcggcgtcggtgagagcggtggcgtacggcctccgcggcggcggcggcggcggcggcggcggagaggagagcagcgggtggaggtggaagcagcgagtcgggggcggaggagaagggaggggggagtgcgacgaggaatggaggagtttgggagttttggaaggttgggggtggtttggggatttcgtgtgccgcaggctcgcagcgcaggtgagcgagaaagagagagagagagagagagagagagagatcgagggaagcagaaatctcgttccttttccttgccggttgccgttttactctgcccctcgaatttcgatgtgattttatttttttcttaatgatgaaagttttattaagctcagtaaatttaatcgtcaccgtacaattatcgtatttcgcataaccaactcacatatgttctaatgaaaaaacaaaatggattacaatgagaattttggtgagattttatgtttggacaagatgcttttcttagttggttttccttaccttttcctatagcacgtaagctcaaatcgtgagggcaggtttgaaacataggatagtaaaatataaagaaattaaaagtgtcaaagtttttctgatgctataagagtataaaacatagacgagaaggaaaaggaaccacggattgattatgaagatacttttacaaattattgtttttgtttcgggaaaaaatgtgttaatgagtttttgtaggatacacttcaagctcgaaataatctttctaactcccataagagttgaaataaaattgtatagatcatgaatcggaaaaccttaacccataataaaaatgtactaagttctttctttgacttaccgtttaaggtcgtctttgaaagcaaatcacctacatacaatttaaatagccaaactagcatatccatcaagcttgctaaggcattcacagtgcgtcatccctattcgaaaaaccttagagtgccacgta

SEQ ID NO: 8665 - DNA, 1917 bp, Oryza sativa
agtaattttattacaacaataaatctaatagtacttatattaccaaaagtaaaagtttagtaactttgtttagagtgtaagcactgtgaggtcaataaattacttttgcatgagatactcacaaattgaacatgtgatagtttagtaagttggttaaaattgtttcctttaataaattttaataatgaaacaccatattatctggctactactgtaatgcaaaattaaacaataccaataaaaattctagagtccacaagagtttggacaaagaaccaaaggataacattataagattctagagtccacaagagtttggtcatcatcttcacacatggcatatcctgcagagcaacaactccaacagcaagctttgatagaagatgcagcagtttagtgcatacctcatgcttgccagttagcttacaagctaatcaagaacaaagagagaaccttcattagaccttcggaacataaatgaggaaacaggctagtgtagcagcatcctgcaatagcaagcaaaatacttacggttccggtgtttcagttactatttccaattaaacttctttgaaagttgaaacagtacagtactaaggtaaagcaaaacttacttcagatgtcaaagttatcagctaaaatagaacggtgatggccaagttgtcatactatatactaaccaattcacaactcttcttttagaaagtgtccttagatgaaacctactcgtacttataaactacatgggccaataagcacttgaacagtatcaaactccaaacatccatgctccagaaattaaattcctgtggcatacaaaggagtttgcaagacaatgcaaatagcaacatactcacaggatgtaattgcacaaaattatacatagattaattccaacaagctcagggcaaccaattaaccaaacataacataggactacagactatagtttcccaaaagcatgcccaggcaattccacacatgctccagagaataaaactccaacgagtgacagaggaatttacaacagttgaacagaatgcaagtagcaaccatgtaaatagttccacaaaaattagatctagttatcactcgttgaccagcagacacagggcggtcaaacatcacatacccaggaatcacattcacatggtttaaaatcagagctactgttccagatcactgacatctgactaccaagctaacgatctaacatccattttccaatcatcgatagcactaaaactaacacaaacagatcaaactacaactattagcaatagcaatagatagatgcaggggtgaagcctaagcggaggtgaatttagtgacggccttggtgccctcagagacggcgtgcttggcgagctcgccggggaggacgaggcggacggaggtctggatctcccgggaggtgatggtgggcttcttgttgtagcgggcgagcttggcggactccccggcgagcttctcgaagatgtcattgatgaaggagttcatgatggacatggccttggaggagatgccgatatcggggtggacctgcttgagcaccttgaagatgtagatcttgtaggtctcgacgctcttcttcgccttcttccgccccgccttcctcccctcgccgctgcccttctcggccttgccggcggggagacgcttctccgccttgggcttcttccccgcgggggccttctcggccttctccgccgcgggctcctcctccgcgggcttcttcgcggccggcttcttctctgccttgggcgccatggatgccgctgctgtcttcttcccggggagaggagaggagaggaaagggaagcggtgggattcgcgagattgcggcgtggggaaaggagacgggggaagatggttttgtacaggaggggacgtgcgccctgattggtggaaggcacg

SEQ ID NO: 8666 - DNA, 5046 bp, Oryza sativa
tttgctgttattttgtaccttgcactttgtttttgtcatactcaggtcgcggtttcagttgtgacatgaactgcatttttttttcagatcatgagtgtagtaagaaaattaagcccggtttcacaacatgttaagtacttcttgcagatacatgttcactttttttctcaaacaaaataattgtgcattactcgaataaaaatgaggatacaagacattgcaatgatgcaagaggatcatgctcacaaaacaaacttcatgagtttgaacctcaagacagcagtgcatgtactactgctattacatagaagacatgtattctgttgcctcagagaggcctaactaagaatcttaaacaacgacactttaattttgccccaaagaggcctgattaagtagtttaaaaaaactaattcagttccttggtgccctgcaatagcattagcatatcccccaccggaagaaaactctggcagcatatcatagaaccaccaagtgcttgaggaaggctgtaaccatcagcaacttgacctataaatttccatcgatagtgtccaattcagcaagccagtcgatgtcagccaaaaactggtcatcaataggaggagaacacaatggttcagcagtagcaatgccatcatcgctgacatcagccaacaactccaaaaggaaactgtcgctgaaggttggggtatggactgcattgtcattctgaggttgctctacgggagtgcatgcttgcacttcagcgggtggctgatccccaaaacgcatttgccattgcgtcagcaggggaaccgccgatgattgattagtaagtggctgttgcaccaatggagcatgcattggaggaggtgccactgtgttctgcggcggtgatactggtggtaattgttgggatggcactaactctggagaaggaaacagtggtggccgtagcggaaatatctgagaccatggtgagcccggcactggaggcggaggtatcatcggaactcctgatgtccctccaggaagtaatggagtgaatggacggtgtgaggccaagaagcgagaacacgagggctgctgatgtgcccacgcacttgatccaccaatttgcagcttgctgccacgacgtaggggaggcagccgcttcttgaaatcttgctggagcggcaagagtacatctaaaagttcacgcatatcatcgtggctgagatcctctagcctggagaatagatgcttggccatacccatacctaagctctcttcttgggcctccttgaagcgctggattgattcttcagtcttcttgtccttctcttcttcttcattctctagctggaccagctcactttgcattgacgtaagcttggccttcagttgttcatcggcaaatggctctgcctcagatacaaaagcatcgacaacaggtttcaccgatggtgccccaaagaattgtgcctgttgtaaataatgcaataatataaccaaatatttcaaacgaattccatttaacattacaataataataatacaattcaaggtacagcatgatgacatattcataagcatagtgggacaacagtaccttattgctgtcatgtaggcaaattgcgacgcttgcatcagtgagaagggagaggtcatttgcaagcttgaacagcccatcacgcctcttgctgagggtgaggctgcgatctctatcctcttcgatgtacctcacgcctttccttctacccctcctcaccatacttgactagtaaatagagagagaatactgtatagtatacggtgtagcttgctggctacatatatatagcgagaagggcatcctcaaatagaaatcaaattaatacgataccaacaatatctaattatagttttatggtgagagacatttttggatgttgaatggcctaaaaacgaaagcgattaactacataccatgtagctaggttgatttatatggtatgaaatgcatcctccaatggataatgggaactaccgcgtgtaagttgcaaatagttcctacaaatctacagcgagaaagccattttccaatggaggatgggaactactaatcgattatagcttgttggagacctattttgagaaaaccatactccagtggagaatggaaattgctatgtttgcaaatagcttagtggagatgtatgaggggaagacattcgcaagggagaacgagaattgcaattttattgctgcaaatagcttgctaaaatctatgagaaaaccatactccaatgagattggatactactatgtgaatgctatagaaaacttcctatagatcacatttaccaggaaatgtgctccaatgattgaaaaagaagtttcaatccttggaaattgatgcctaaattctgtctcataaatgtcctggaatggagaatgaaatccactaagctataactgcaaatagctttgcagagatctccgtttagcaggtatcctcaacaattggataatagatggactactattagtattaagtgattactgcaaatagttttatagagatctacgtttagcaacaaaggtatcctcagtcggataatagatactattaaatgattactactgcaaatagttttatagagatctgtgtcgagcaaaaatgtctcctttgatcgatagaagtgataggcaccttatatagaaggaagtaagggttgtacatatcaagatgcttacgttttatttgtttggtggataaacactctcataaaagctccacacaatatcactgacaggtggtacatccttcacattggcatggtgagctccattgtaagtaccagttacgaagtctttttgcacacaacactttgtctttagcatggtaacataattccaattcatcgaagtgtccacaaatgcgtaattctaccaatacatgctgatgagagtacaacttttggacattcaaatatttgcagataatccacacatgccaaaggaaagaaaaagaaaagcaacagggaaaaatagggataagttatttgattcataggttgaagagtagcttttatgtattattctaaataaatggattgagattaagtgtctggcattaattaattgaatgtctattggcagtgagtagaataaaacttgtattagatgcaaaaaattccttggggtctctgcctagatcatcccttgatgtatcagcgtgtataaatcgtttgatcattgaataataaattatatggtgtatgtttaagcaacagtgacagaaggtagaagacagattgttgttggaaagataagatttctgccttgatttccttctctggtattcctaaagaaaaaagaacatacttgctcagatccagactaatatagtagaaaatgccaccttgttgcaggaccctattgtgcaaacctaataatgctaggttagtgatccttgatttgaattatgatatatgtttgcttctaattggctgtggaagttggagaattctgatccagactagtatagtaaaaaaatgccaccttgttgctggaccctattgtgcaaacctaataatgctaggttagtgttcgttgatttgaatcttatgatatacgtctgctttctaattggctgtggaagttggagaattctgaaggacctcgacaagagatgataagtatgcaggcaaggtccactccattgatcactgcaaatataaagcttctgattctcgttttatcttgtttggtggctgttaaggatgtgtttttgttcttttgtaaaaaggtaactaaccggtaatgatctgcataggcatttcttggaagcagacaatttccttaacacttaagttaattttgacgggttaactttgggttttttggtgatctgaaaaagcaacagtgctgcttgttttcggaaagcgttgctcactggtctcactgagattgtgttcaaatgtgctattgtattgagttttggcttcccttgcagaaagaagaacgtcgtgtggaacttcaagtgggattacggtgagcgagcgggaagccactcctgggaggcagtctgtgcatttaactggaatggtttttccttttggagttgctgaatgctgattgttgacttctagaaaggtaccaaattggcaaatttggctctccatctctccacagaattccctctccatattccagtgcactccaacagtctctccatatcccaacggctagttcgctctccatattctaacacactccaacagactctccatattccactctccatatcccaacggctagttcgctctccatattccaacacactccaacagactccatattacaacagctagttcccaacagctattttgcaacactatatataggctccttctctacctctctaccaggctaccacaacattcttcttccttgtttgcttcttcacctccacaccacaaatgaatcactttggcttgagcttatccatgcaaattgtgttggagtcgtcgtcttcagatgacgacgatgaattcatggctgcaacaatactcctagtacacgcacactgccaaaccaggagacgacgacgacgacagtgatctgaaggcagaactaggcggaggcgacagagggaggagctggcgctgggtggagccggctatgcgtgggacgaggcggctgagctcaatgaagctcaggaggacacgccaccaagggaagaggcggccctggtaggggtgaggcggcagcagacggaggagccagagctggggggagccggcaatgcgcgggacgaggcagccaagctcaatggagctcaagaaacgcgcctccgaggcggcatgggacctcgagcctcagctcggtgctctgctagaagatggagatgatcatcaggatggagagtcacaggggctgccagatttagccacctgattctctcatttacatttagccagacagatggaatagcaatgcaaaaaaccaatctgttgagcacctgtttttgcatgtttgcttcttcttcttttgttcttttggcatggagaatgagatagcaagtcccttggagatgtt

SEQ ID NO: 8667 - DNA, 3379 bp, Oryza sativa
cggcgaaggaaccaaggttgaaggggcccttcagatccgggagaacgtggtgctcgctggtgatagggttgaagaggccgagaaggtggctggtcgcctctgaccagtcgttggagggggaaagccgcatcaggaggatgccgcggcgcgccgtcaggggctcgccgtcgtagctggaggggatgggggcgaagcggcggcgccggcaggaagccgaatgtcgaggccgagttgcgttgccggtggaagaagaagccgaggaggtcgccggcgcgctggccgccccagaggtcgcggaggaaggcgcgatcggtgaagcggcggcatgttgcggccagcatgaagaggctcttgacgttgcccacgcgggagaggacctggaggaggacgtcctccggcaatgccgccatgatgtcgttgtccgccatgggtgtgtgcacgtacgtacgtgcaaaggcctccgcgattgcatctagtagatgtattgcattgtataggagggtgaaatctggtgattaaaaatcaaaattctcatcttaatctcaccatcaattctctcgtgtaaactcccaatcctcttccctcgagttgcaaaacaagctgtgaaggtcgccgctgcaggccgaaacgcggctggatgttgggcctgtacagctgtactggatatcaactcttggtgatatctatacttctatagtctcggaatattactgcttgagatgtttacaggaaagagtccaacggatgacgtgttcagagattcattagatctgaataagtttaccaaggatgctcttccagacataacttcggagatagcagactcaacaatctggctgcatgtagaaccacgggataacattatacagagcagaatccaggagtgtctcgtttctgtcttcatgttaggcatatcctgcacaaagcaacagcctcaagagcgagcatcaataagagatgtagcagtagagatgcatgcactaagagatgtatacctcatgtttgccaattagcttgcataggtattactagaacagaaggaaaagcctccactgagacaccgaaaacagctacaatagccaagctcattggaaataatcctgaaataactttagtcacatgtagtgtttcagttagcaattgttctcacttctgagagctatatttctttgccagagtatcagaatcatacaatttaatgtaaaattcacctaattgtttccttcgtgcttaatttcattgtttccttcttcctgcttgattgaaatggtagagctcctactgtactggttccttcccaaaattcaccttacattgttagttcaaagtacaaaagcgccaacttccactagtaccaactagcaaacagcaagaatctatccaattcaagcaattgtgtttgtgtccacacataaaacgcatgagtaaaagtgtagaacaccaaacaagccaggagcagcattattcctgaagtgagttgccatgtcctcagttgctacgtatgcataccagaacatcaattttgttccagaaaatttcacagtatcgtagtaatctcaaacagaatgaacaccacaaacaagaaatcgagcaatcacaaaacaggaagcacatagaagtctagaagagcatcgttaatatctcagataaataagcaacagtttaccaaaagcagcgccacaaccgccaactacacactaataagacatccatttctaccactaccagatagtagacagaactaaatactaccaatagatggaatctaagcggaggtgaacttggtcacagccttggtgccctcggagacggcgtgcttggcgagctcgccggggaggacgaggcggacggaggtctggatctcccgtgaggtgatggtgggcttcttgttgtagcgcgcgagcttggcggactccccggcgagcttctcgaagatgtcgttgatgaaggagttcatgatggacatggccttggaggagatgccgatgtcggggtggacctgcttgagcaccttgaagatgtagatcttgtaggtctcgacgctcttcttcgccttcttccgccccgccttcttcccctcgccgctgctcttctcggccttgccggcggggagacgcttctccgccttgggcttcttccccgcgggggccttctcggccttctctgccgcgggctcctcctccgcgggcttcttcgcggccggcttcttctccgccttgggcgccatggatgcttctctcttcttctcggggaggggcaagcgggtccgtgggttttgctttggagcggtgtgtgctgatgtgttgcgagattgcggtgtggaaggaggacacgggtgcggtgagtttatagtgggtaaaagtgggcgctgattggtggagaggcttgtcccgcggatcgatgacgtggatgaatgtgtgacgtccggtgccttttcggttagacggctgcgatgcgtttccgtgcggatcgctgacgttgcaaagaaaaatgtgcagtgggccccgtttttggagcgctgtggtggtgggctgttctttctttgggttcaggttttgggctttttgccatggagtctgtaaccataaacagcatgtaaataagaagaaaataataattaaaaacagggtaaactctatatattttgattaataggtcagtttttcctgtttagacaaatcgaattttgagatgacactaagaattcagcaaacatttattgtcgtacaagataaatctctctgctagagaaaaatccaagaacatttcctctcacattctttctccttcctctttcatggttcagactgcaaacaaacacaacacaaaacaatggagagcgcagaaaaatcttgctcaaagattgaagcacctggtggtatttccagacaccttgttcaatcgttaaactcaataactatcttaccagacctgtaactgtgatcaccaacaaactcaatttccatatgtatcctgcagtcagaaacgcaacatttagttacagctgtgttctatcaatatattggccatagttttatatctagagattaaaaagtagggatacaccaaaataagtcatagtggacaacatacaaggaacttgatgataacctttggcaacggcgtgatcataactagtcttctgttatgcatctttgtgttacacatactcttcaggacatcactgagcacgcaaactctcacatttttttctgcaactagttatgtggagcccaaatgtcatttggtggtggcggcgccaccagaaacgtttaaaggagtaaagaaatacaaaaaatgccatacaccttggaacaaattagaccaatcctggcaattagtaagtttctacaatcttcacaaggaaatcccattttca

SEQ ID NO: 8668 - DNA, 4695 bp, Oryza sativa
cccctacaccattcatcatgtactcccataattaattaattgagacctatttaagctaatggtattattaattatatatttgattagtacattggagtacgtagaattctactgttgcaaaccacgccgatgcgtgctatcgataggagtaaaatactgtccgcgaagtctgaaacttgcacagtctttgacgcatgcttgcaggtcttcagaaaccacaagttcagaagaacccatcatccggccggccattattttaatctgccaatattccgtacgctgtcaaaagaagaagaaagaacagtcgaacaatgttgtacagctcgatccgcagaatcgatcagagtttagtacttactactataattgtttagcatgtagaattgattagaagtaagcactaaaagttcagaggaagtcaaggaagttcagaggaatcaattaacttgcagattaattcaacaaagctaccagctgatatatgctcctaatgatgatgattgccatgatcataaactttagattcttccatgctccatggtgaagtcttaagctagtttggctgtttatattagggcctacacataggtcctgattggatccggagggctatttaatagttcggaggatccaaacaggccatagttaaagttcagaaaaatgattgtccttttatctgaagaagtatgtactactactgttgcatgcaatgaacacgtacatgagagagtagatggatctgatcgatactgctactgatcatccagccttgcaaattatccaaggacaggacagggagacagaaaccaatcaatcagacgagaagatttgcgactcgacgaacggccggccgccatataggcaggattccaaacaaggccgcggtgataccgttgggttctcaaaaccgcgcttttaatttgattcatctgctcgccaattaatcttccaatctttgatctgtactgctccaatccactgttcgtatagtattaatttttagtaatttttagctcgccttggctacccatcttagtagagaagtaaagagagagaagaatggtactcttctcctatcataaatactaattgatttagcataaatttagatcatttttactggtactttgatacgtcatccctgtttcagtcgatttctaagtccgttctcttttagaaataagaagaagtcgtataaaaaatctctttaaaaaactcgtatgctaacttgagacgattggacttttaattgcagcttacaattttataaaaaaaatccaagcgaacaacagtaataatattaaaatagcccttcacccactgcaacacacgggcatttttttctagttatgataaatataaaaggttttgttactatggcaatgccttcttaaggtgaatctctgtagtgtaacattttgattttatcacaagtcaaacctctctgactttaatcttgtttatagaaaaaaacatcaacatcaacacatactaaattagattttatcaaaaccatcatgaaatatgtcttgacattgtatttatctgttagtgcatttttctataattcagtcaaagttagagaatctcactaaagacaaaaagaataattttcaatatgaaacagatgtggtgtatatttgataaactattgatcaaatgccaaaatatttataaccacagtaacagaatagcagtaaggcaaagccatacgatacgacgacagtcagcatctatcgtttgacccgtatataaatgcatggtacgaacgctaaaaaaccagcgttactacttgatgaaattattgatcagattggcagtagctaggcatgctttcatttgatgggtttttttttttactggcataggattcgccggagttgaggtgaaacttgtgttctttgtacggcgtgtccggccaacaaaagatgggcagcgttgagagccaatgcaaggcaaaagggttgagtttttatcggcagatatggaggccggaatggcgcagggcggtcggtcggccggccggattcgcgcgtcggagcatgggtcactactcactactgtagtcccttttttccctctgcaaaatccagccctgcaacctgcatcattcctgctctcatgttctatggcttcttgctgattcgttcaaaaaaaaatgcattgtactacatttgtagcatgagtctagctctgttttgaaaacgcgggattgaaaaaacagatgaatagaatttttttttaagattttgctaggaatacaagtgcaaaatataaagttccgaaaacggaatgatcgtttggttaggagaaaacgtaggaatcggatagtaaaagatatagactcaaagggaattttccaagaggttagagctcttgctaaccttttctccaaaatctctctctctctctctctctctctctctctatatatatatatatatatatatatatatatatatatatatatatatagtaaatttgtttggtgctccatggtgcccgggcaccattgttgaaattgagtatatacccaattcaaatgagtatgaaacttttttaattacttaggtattaacattaactactttactaactagtttaaagcaagtttgaactgaatttgaacttgtttttgttagattttgattctaggtatatagcatccatacatataattagttaggtatgtaatcatggattgtgaaataaagttaaatttgagttgttttgttgataagtataggtatgaatcaaattattataactaggtatatactcacaatttaaaaattttgaaaaatttgagtgattttgtgcattagataccatggtgtccgggcaccatggtgccccatatgagtgtcctatatatatgtcattccataggaacttcaaaggaaaggaaatgattcaacccttataaaggatttcataggaatttttcatataagattgaaatcctccaaatttactatgtttttttttttacaagtcaaaggggtctagtagttagaataccttatagctaaaaaaaacagaagaggatattaagttacatgcccagatagttcacatgaaggtttaaactgaagcataagctgagaagaaaagatagacaatttacttgtatttcaatagaggacgatacattgagatggatagcttaacatattacatatctgacaataaaaaatggccttccagaactgttgttgatacaaaccagaagatacaaatcaaatttcaaatactgagatggctgaatatggcggcccttgttctacaagttgggtcatctcagatgttgaggtaaaagatatcagtgattccattagacaaaatggggtattgcatcagcttcacagagcaaactacaagcctatacatctgctaaaaaaatatggttacatcattttgttttggcgtcacaggattgtgtacatactatcttctaccaccatctttcttcgaaaatatgcgcaagtttgcagtctgccggcgccattcatttatagggacctaaattcagtgggcacagcaaacatttgtgagtgaaggaaaaagttaaacatgtaatgtcatagctataaaatgaaaggcttactgctggaaacccgccatagtcaccgggtttctgaatatcctttgtcaccgaactatttgctgcaagccgaacctgtaaatggattgaggaaaaaaaaattgaatggttaaagggcctttagagttggtcaaggcttaaaagaatagattgagcaatgtagttaaatttgtaatacagataaacacaaaactgaatagagactgaagtagtattaaatcatgttagcaggaagctatgaaaaaagaacagagatgggaaaacagcacctttgaagcaatggagacgtgatcccgaattgccaccctaccacccaaggttacatagtcccccaatctgttgatacatgccaatgacacaagttactaaatctcaaaaagcaggcaaaataaacatttagtcaatgagatgaaggaatgcatacgttgcagaaccagcaattcctgcttgtccacaaatcatgcaacactttccaattactacattgtgaccaatctgcaagaggaactgtcaatttggacaacaagggcggcggaagtccaatcacattaagcagaatatccaatacctgaacaagattgtcaattttggtttcatctccaattactgtatctctccaactgcacttagtaaataatgatgaaaatttccgctcgcgggttaggttcaaccaaacatatattcacaaagaaagagctgatattacaaaatgtttggtatatttaaatcaaccatggagtggccaaaggaacatttgccatttcaaggctgacaaattacctccctctgtcaatacatgtatttgcacctatctccacatgatttccaatttttacatgcaacatctggagaagcataaagcttttcaacatatagccatatgatgtttcaattgaatccaaaacaaaacatctaaatacagtctatgagagtgatagtcatcaaacatttgtatcagaagtacttctcccatgtcactggcattttctcagtttcttttttctgtatctctgataccaggtaagcacattgggtgaacgtgacaaatgaaggactgagcatttccttatccttttaatacaaaatgaacc

SEQ ID NO: 8669 - DNA, 11263 bp, Oryza sativa
atgctagaaagttttacattgtaaaacggagggagtagctactaatattattattactggttaccactggttaattgcgttgtatatatataattaagttaattcgttggaggatatctctatacacaaatattaattgcttgcacgctatctacaatttatatatgcatatattcatcgatggtaacatcgatcgaataaagttggagcacgatagctaagttgttgatcgatgtgtaaacacatttgtttttgtcgtcaactgtttgtcgtaccaaatgctagcctcttggggcaatcttgtggctgtcgtgagccagaatgaatagcagagattacgctagcttagctagccctttttgcaaaagctgatatatgcgaattgaaaacgaagggagaattgtgcaagaacagtgtacactggatcatctgatcatgtagctagctagctagcacatggttgcatgtaagtgtgtgaccccagctgaagagaagactcgagtgttgacgaggagacaacacctagttcgtacatgcggatgtcgatcgttgttataaactttaaactcttcagcagttaggcccagttatattcttcaattccaaacttcttttttctcgttttccgttagcacatttttcaaacggttaaattgtattttttaaaaagtcaatatataaaatttgttttaaaaaacaaataaatctatttttaaaatttataatagttaataattaattaatcatgtactaatgagctttctcgttctgcgtgcaacaaaaatctccctcccaagcaggagatcgaacgaggccttagagaagcacatagccaatgcacatctcattagttccataattccacacaaccactagtctgaaaacacccacaaatttcagtcacttttaattagataacaaactcattaaccttagtaccctttcctccccatatgcgtctttcctgcaacacatacacctgcgctcatctcctctgataccatcatctccaattccaaccactccccgtagcctcgtcaataccagaagacgccaacaacggtattagggcccgctagaccagactagcttcttcatcgtgcccaaaggggattgctaggttgaaaggtgaccgaaattccttgcaatttcaattagcaatccccctatgttaatagttaacacttgaattgcttgaaaatcatgcatccattacatatatatgcacatagagaaatcctgttaacatgtactagtattatcggacaaggttattagcttaggtgacctggagcatagctagctaggtagcagctgcaggaggcaagtgctagcaacaaaagaagaggaggaagaagaaacatgtcgatgtactagggatgatttgcagtgcgtcgtcaaagcaaacccaataattgtttggttcagatgcttgatagaccataaagaatggacggcagataacaggtatttttcaagaaaagagagaagctccaatcttgtcaattaatgcctcctcaaaattaactttattctaattttctcccccctgtcatttcattgttggtatagtccgtagtatatattgttagcccattccattcttattccagctatataggtaacactatattctagttagctagtgtgatagtgagatggggttcccctcgtttcttacgtacatccacatttataattattattatttatttataatttatagaagtaaaacttaaatttgtatgtttatgaagtggtatataatacattaatgaataaatttcataaaactatatatactttcatcaaattatcacaaaactacatatttaaggtgatgtaccacaaaattacagatttaaggtagagtatcacaaaactataaatttagtaacaaagttaccacaacactacagattttggagtttaaatgcttagcactagtgttatatttgagttataaacatgtaagttttgtgattaaattttcactaaacatgtagttttgtgataattttattactaaatctatagtttggtgatactccaccttaaacatgtagttctatgagaaatttaatgttaattaaactagaaaaaatacccgtgcgttgcaacgggtgaagtctattttaatcttattattgttatatggtttaggtaagatgacattattcgctgtgggagtttgcttcgatatatatgtatatatatatatatatatatatatatatatatatatatatatatagagagagagagagagagagagagaaaatcatgagctgtagttaggagtccgatcgtctcaagttagcatgtgagtttttttaaacatatttcttatatgattccttctgtattaccaaaagtgaacgatcttaaaacccgactcaaatatgaatatgtatttccaaaaacaaacgaacttaaaaactaactcatacacggatgatgtaccaaaataccggcaaaaacatcttcaatttttatattagtagagaagagatagagatagagaagatatatagattaaacaaaaacataaaattaaaaccgactcaaatacggatgacgaaccgcggaaacatcttcaatttttataaccgactcaaacacgaatgacggactacgaaaacaactccaatttttataatagtagagatttagttatctttcccggtatagatgcacaagacaagagacaagaagagagaagaaaaaaaaagaagcaaagaaaagacacaagaaacgccgcacagatcgcctttttgagcgtagaaaatccaccgctcgtcgtcgtcctcctcgcgaaacccaacccgcacacgctctctcctctcccctccgcttacaaaagggcctcctcctcctcttcctcctcccccatcgccattaacccattaccacctccacctcgcgcactcagtctgtactacctgtacgtacgtggccgccgctagctaagctaggaattgaaatggggatggagaggccgcaagagaaggtggccaccaccaccaccgccgccttcaacctcgccgagtccggctacgccgaccgccccgacctcgacgacgacggccgcgagaagcgcacaggtgggtgtatgtccggtgtccatggatgaggtagctagagctaagctaattaagcaagctaatgggttggtaataacaatggcggcggccggacgaacacttggatgcatatatgcagggacgctggtgacggcgagcgcgcacataataacggcggtgatcggctccggcgtgctgtcgctggcgtgggcgatagcgcagctggggtgggtgatcgggccggccgtgctggtggcgttctcggtcataacctggttctgctccagcctcctcgccgactgctaccgatctcccgaccccgtccatggcaagcgcaactacacctacggccaagccgtcagggccaacctaggtaaatttaattaatcactacaattactgctaattaatactgtaataattactgtacttagcttgttactaatatggagatggagatattttgtgggtgcaggtgtggccaagtacaggctctgctcggtggcacagtacgtcaatctcgtcggcgtcaccattggctacaccatcactacggccatcagcatggggtacctactgtctactatgactaattactctagtaaatttgggcagtaagcttttagctatgaatcagtataacttatgtactcttgattgtggtttagactgtgtacaccttctgaggtgtagaggccgggttaatataatccattatctaaaaagtataagtagcagagtctgtttaaatttatatgcgttattgttattgtattttaggatggagagagctagcacgtacatagtagagtgtggagtaagcttaatccttgattaggacacttcactaacccattcttcacgttactgctactgagagctgtagactgtagagtgagtagcagtagatgagaaaattcagtcaatttaattagccgtgcaagcatgcatgatgatgcatgtgtacaagtacatgtcctccatcatatatctctgcatgcagcctgcccctctgttaatttgtttgtttgtaactatatatctaggtggtaggataatgttttgcatgtcccaaattccgtttagctttcgtcagcttcttaatttagtttctggagcgcaaatatatatctcatttccataattccacgtgcctttacttacaggcggcacgcccgcggcccgaccacctcaaaaagaaaaaaaaaatactccctccgtattttaatgtataacgtcgttgacttttcgaccaacgtttgatcattcattttattcaaaagttttgtgtaaatatgaaaatatttatgtcatgcttaaagaacatttgatgattcatcaagtcacaataaaataaataataattacataaattttttgaataagatgaatggtcaaacgttggacaaaaagtcaacggcgtcatacattaggaggtagtatatgttttggccatttgcaaaaattgttgtcatagtgaatgcgtcgccatgtttaattaggtttgacagtatgattaggacaacataggtaagaggctactcataattctcaaaagcaaagcaaattgtaattaaagcattcattcattctctgaaatgtcgcatggctgctatgacagtcaaattaattaggttgagtacgttaggtggtcttcttgaggatccaacaaaggcaaaaaaaagcagagtatatagtgggagagaaaaagttggggaagataacattactggacagttcaaaagtagttggaaaatattcagattctagtgagtatccaaaactttttccactgaaaaagaaacagcgagctaaaaaggagtggttcttgctctgctctgcatattggcatggctatggagaagaatcttattcgtgataagcatctactagactactaccactaatgattgataaacaaaaaaatcagacacttttaccttgattcctacctttcatttcattttcagtacactcctttttctttctgatatgattttcgtcagtgttactctgaatttctctgaatactaacatatggttaatttacaaatctgttgatgatatgcagtgcgatcaaacggtccaactggttccatcgcaacggccacgacgcagcctgcttggcatctgacacgaccaacatgatcatatttgctggcatccaaatcctcctctcgcagctgccgaattttcacaaaatttggtggctctccattgtcgctgctgtcatgtcactggcctactcaaccattggccttggcctctccattgcaaaaattgcaggtaaatatataccatctgatatatatggatgacaaaaacaaatttgtgtggctatcttattcttaggattgcaagaaatatttttttctggttctcgccgcacatagaactgaaactggttcctgtgaaaatccgacaaaattcttgtaaaaccgctactttccaaaggagagacccaagtcctcctcggtccaaaaatggagaccaagtctttaatttacttcatctattctgttcccgtgtacacatcatgcaattaattcacaagggaaatggacaaaacaaagaagatatgatgctgatattataaatatacatttttggtagggcagaaacaaaattgaggcgtgcaaaaatgtatatacatagcctgggacacttgacatgttggtttttgtttgtatcatccatgttgggggggggggggggccatgatgcagtgcatttgtatgattgaattcatgtggttctctgcaggtggggcccaccccgaggcaaccctcacaggggtgactgttggagtggatgtgtctgcaagtgagaaaatctggagaacttttcagtcacttggtgacattgcctttgcatactcctactccaatgtcctcatagaaattcaggtaaattaattttaattaacctttgcttatatttctcttgatacaaacatgagcgataagctatctttttcagtgaaacaaatttagacaagtataaaatgagaaaagtaaattgatgtagtactctctccgtctaaaagaaaaaaattaaactctaaggatgaatctatgtgtccaaatttatccctaatatttaattctttttaggagggaggaaatagtacattaggaaaagtgagagaaaaaaataggaggaaaattttggggatgttccgtatgcccgtgatcttttgagctctgtcaaagaggacagatttctgaaagatagcagtatgggtgaaccctacaagaggacagattttgcagtttcctgcacatgaaaaatactctgaaaaatacagatatattccttttcagaatcttggtcatactggtcaacatagagtctctgttcttcattgaaaccactggttttgccatgaaatttgcaagtagatagcgatatatcccttattatacttaacctgtcggccatcaaatttcagatcatgaatcggcagtcagaaattcagagttcacatgcaagaacatttctgaaaatgactacctaatctaattactaataccatttctgaaaatgactgcctaacctaattactaagagcaagtttaatggtatagcatagtactagctccaaattttctatagccaatggaatagccaattcatacaataattacttgctatactagtaatacctggtcccacctgtcacacacattacgtcttggagtccgtgctgcagctggctacagatctgtagcccgctgcttttctctctcttcttttatctctttaaaatatgtttatagctagcttatagcctgttattgtacctgctctaatactatatgagcttcaaatcttgaaatgtctttgtcctcaatcaaaatactgtcctttcctttggcgttttgatggatgacaaaaatgagacaagtctcgaggcaatacatttcactgcatttattgcacatttacgtctcacgcaaatctcaacgcaactctagtggtacttctcctagctaggtcaatattgcaatcaaacacaaatttttacactaatttgtatgaagtagtgagaaaataatttgatgcgttttgagagcatctcatgattgggtaattttatcatccgataccgataggtgagttaccgataggtgagtatcttcaagtaatatgcatgtatctagagatattaaaatatactattattttataaaatttagatatctcgagttaatgtactgtaattttttttctatccttaaaaatatcgggaagtataaaacttggtatcttctgatactatgtattctgatataccaaaatttttagtctaaatctcgaactaccttttcatttcaagaaccgtaaaatctttcctatcctttttcttaaaaagatatcgggaagtataaaacttaatatctcctgatactatgtattttatgtattttgagataccaaaatttttagtctaaatctcaatgtactttaatttttcaagaactgtaaaatttctcgaaatgacaaaaatgtgtgcgtaaacgtgcaggacacgctgcggtcgagcccggcggagaacgaggtgatgaagaaggcgtcgttcatcggagtctcgacgacgacgacgttctacatgctgtgcggcgtgctcggctacgcggcgttcggcaaccgcgcgccggggaacttcctcaccggcttcggcttctacgagcccttctggctcgtcgacgtcggcaacgtctgcatcgtcgtccacctcgtcggcgcctaccaggtcttctgccagcccatctaccagttcgccgaggcctgggcgcgctcgcggtggccggacagcgccttcgtcaacggcgagcgcgtgctccggctgccgctcggcgccggcgacttccccgtcagcgcgctccgcctcgtctggcgcacggcctacgtcgtgctcaccgccgtcgccgccatggcgttccccttcttcaacgacttcctcggcctcatcggcgccgtctccttctggccgctcaccgtctacttccccgtccagatgtacatgtctcaggccaaggtccggcgattctcgccgacgtggacgtggatgaacgtgctcagcctcgcctgcctcgtcgtctccctcctcgccgccgccggctccatccagggcctcatcaaatccgtcgcacattacaagccattcagcgtctcctcatgatcaaattaataattatttgttaatactgatgatgatgatgatatgatccatcgatcgatgaagaacaaatatatatatatagcgagatcgatcgatcgatcaagatcgtgaatgatatatataatacatagttaatcaatcagatgttaattaagtcgtgttcgtgcgtgtctttcagagttcagatcgacaggttgatttgagatgagtgctcaagtgtttcgtcagatgtaattaactatgtaagtggtaaatttagcctgatgatgatgatgatcagtctgaatggatgtcatgtaagtggtaaatttgacatgaatgtaacaaagtagtagcttagttgcagaatttcagtagcctaaatggatgatatatcagtctgaacttcaataacaagttaacagctagatttccgttgacaaaatcgccatatatatgcttgaatgtaaggtgaagattattactgttcaggtggtctagtttattgtagttaacctcaatggtcatactgtcacaaccatatgagtgtcaaagtctgaccatgtaaatgacgtaccagttattattaattgtgccatgattgtcagtatcaactgtcattgttgaatcctgcctctgtaaggattcaaaaagttaaaaagttttcagttgactatatttccctgattaaggtggaaaatgagacatatatatgcttgaaagtaaggtgaagactataattcttcaggtggtgtagtttattttagttaacctcaattttgtcagactgtcacaacaatatgaatgtcaaagtctgaccacgtaaataaacgtatcatttattattgcgccatgattatcagtcgatctcaattgtcattgttgagttctgattcctgcatctgtaaggagtcaaaagctaaaaaccaaggttactgtcagtcatgttgaagcagggtacagaacagaatcaccatatgatcttcttcatcttctagtaatttacttgtattctccttcactcaaccgaacaaaatatcccaactggttagacttatgaaaaagcaaaagaaagaaagggagaggatatcaagacttgcaacatctgaaaaaagtatacaccatgacttgcatcatggtattactcattagtcagaatcagcaggggatgaagtttcaagcaaagtgttgaccaacaactactactcgccaaactctccaaatcttttacagcattcaactctactgaaagacttaaaagtccaaaagggaattggtttttcacccaaatgatcagaaagttcatgctgatgatagcctgaatattactcctatgtcacaaaggcatgcagagaaattattttcaatttacagctgcacacaggatgatgcattggatgttgccgctgaatcttgtgtgaggtaggcatagtctgatagtcatagcggcgcagtcctaggcagagcagaatactcctattcctatacatatatatagcagatagatagagtagaagcgagtgcaaagtcaaggatgcagccaatgcttacgacgacgttggatttggatatattggtgtgaggtccaaggattgagtcattattgagactgcgtttgatgatgatttgatcatctttcttacacaaagattggcaccttgctagcatgcatatgcatgcatgtcatctacagactgctagaggcttatcctgcatgctgattcctgaacccattgacctttagaatggctctatctgcattcagattaaagtggcagatatgatatgagatactccctccgattgtaaatatgtgttgttctaataaccttaattttgaggtctatacaccaatgaaattcctacgatctggtagagcccttatcctgcaattttgaggccgttttcacaattttagccatctttgcattaactgatataattacgtaagtccaaggcatattaaaggatgagtctggcataggatcttcaaaaatcatattaatttattttttaagtttttcgttaatacttaattaatcatatgttaataaaccgctccgtttcgttgcttggagggaaggttcccaaccttagctaacacagccttagagcaaatacaatagcatatgctatagattagttacaagcacatatagaggagagagagaagaaaaacgggctgcttgtttgtagtcagctacagcataagctatatagcgtgtgtatgaaaggtaggccaaatattaatgttgcaatatgtatttatataaaactattgtatgcataggctattagattgggtgtaaaaaatgtgtcaatttttaaagctagcagctggttatattattaaacttgctcttagaggctaatctcttacaattggctataccatataataaaattttctttttatgaatggtaagagtcgatattaagccaacgtcattaagtttaacatggatgtttctgtctcctttccacttatttgccatgttagcaaatttatcatgttggtagccctaagagcgctattaattgttgttttttacacgtgtagaacgaccaccatttcaaaataaaggggttagatatgaaaacagtaacaatgcatcatgatacatgcatgcacaagctctagctgtctgtgtcatcccttgtttttcattcatggttactgaactttttagagcaattgttttttcataactttttctgaagtctactacctaaatccacgattccaacaagccattactggacctactatattgggccgtacttatgggccttacggttcatgcaaagcaaccgagtgcaagtccggcccggcccggcccatattctctctaggttgccttggttaccctagccgtgccgctcattccccctccgccgccgccaccgccgccgccgccggaattgctaggatccaccaccgccggaattgctaggatccaccaccgccggcgatctccagcattatattcgccggtgttctcaacgacgtggagca

SEQ ID NO: 8670 - DNA, 2404 bp, Oryza sativa
taatgaatatacgtatcataaagttccatctctccaacctgaaacttcaatgggcagatccgcagaagggattgtagttaaatttagaccttattggataatgatgatttagaaattgcacactaaaacacacaaaaaaggctaccatttcttttagaacctttcttactgctgatcatttcaaacgtatgtttgacaaggataataaatgaagtatttaattacctttagtcacaatcatggccttcctacgaagacccaaaaatggtccaaaagacaaatcattgcattgtggtgcaaccttggtagggtagagcttatagtgacgatggcatatcatatgtttctcatgtgatgacattggatcatcggccatcagttttggctcagctgcaattcaaaacaacaaacaaaatcaacaacatatggagccagaccagcaccaaactttttttttctaccaactcacagaaagagagcctgcggtaaaaaggaaaagaaaagaaactgatccttgccaaatatgcacacaagcaaagcaacaaatgtccgcgacaagaatgaaaactgcaggggctataaaattattctccagttctcctacaaaacctaaaagagttagcaaatgaagcatggaaggatcactaaagcttttccggtgtaacaattgtgcaccatatgccagtaacgcattgcttctacctagagcataacatggatactttctagcttgacgaaatatcgtgagttcttaagtatacgaaaaatcttgtagtaaatagcttacaagtaggtgtaaaatcaacaatatgaatccctgaaaacaagagcaaaagaacaagccttagctcatacaaaaaccaacacaacagactgcagcttccactaagcccctttttttttctttgggtaagaacaaacaaatctcttagcaagacgcccgaccaaattaactgaaacgtctgagccccgctcctctcccaaattccccaattcatgtcacagctagcagaagcaagctatccaatattgcaaattagtttacagaaaccaccgtaatctagtgttggtttctaacaagtcatcaggaggcaaccagtaaaatcaacataagctgcaactgctgcaaaccccttgtttaaggaaactataacatagggtagtggacaatcaaagcaaggagggaaataagcaagcaaagatgagatctatacctgaaatttccttagctttcgccgagcatccttgctcagaagagccttcgtgcaccaccttgtctcctcctcctccccgacctgtatacatacagcgcacgcaaaggcatcgccgtaaaaacccaagaactcgaaaccatcaatatcccaaagaaatcccgagcaaagaaccacactcactggcgttctccacggccaagccacgccgccgcttgtgcacagccacgccagcctcctcggccaccacgggcatcttcatctttcggcggcagttcttgctgtgggatcggcggagcctagggttggggttggcgttggggtactcgtacccgcactcagggcagagctgacccccgccggcgccaagcgcctcctccttccccctccgcaccctgtcgcccttcatggcagctgctgctcgactcgccaccggccagtggcccgcgctgctcaccaaaacgagagagatgcgttaatgcgcgtcgggatttggttttttttttttttactttctacatccacacaaaatcttatactactattatgagaagaagagtatatgctacttgtatacatagggttagggatgtagaaaggcagaaataaaaatggcataaaaaaatcataaacgggactgtacggcgtaagcactcaaatactgataattaaggtaaaaaacactggactgtaaagtgttacatttaattttgcataataactatataatgtgacaaaatagattcaagattacactatataactgtaaattgtttccattcaaaccaagtggttgacaactcaaattagagattttgttgaggaattggtgggactctaaactatgagtcaaataaagaaacaaatagaaacgcggtaaatactactccatatgtcccataatataagggattttgactttttgctcgtacggttcgaccactcgtcttatttagaaaatttgtgcaaatataaaaaatgaaaagttgtgcttaaagtactttggataatagtaagtcacaaataaaataaatgataattccaaaaaaattttaataacatgaatggtcaaacaaaacaagcaaaaaatcaaaatcccttatattcaaaatcccttatattatgggacagagggagtatactataaaagaggtaatttgcataagaatacaacaaaatttggaaacggacgg

SEQ ID NO: 8671 - DNA, 4026 bp, Oryza sativa
ctgtgaattgttttggtttgtaccaatcatggattggggttaggagttgctatgcataacacctgcaggagttgatacgtagagcgcatttatggtagaattcagaatacgcgaaatcagaaaactctcgtaacacactttttggcaccaagcatggattggtgttaggagttgctatgtagaacacctgcaggagttgatatgtagagcacatttatggtggaattcagaatacatgactctcgtatgtagtaggacacacttgtttgtaccaagcatggataggtgttaggacttaggagttgctgtgcaaaacacacttttggtagaattcataatacacgacatcagaaaactctcgtatgtagtagaacacacttttggtagaattcagaatacacaaaatcagaaaactctcctacgtagaacacacttttggtggaattcaggatatacgaaatagcggttgtttcgcagctagtaaattattgttttagctgtgcgtgtgtcaattgttttttttttttttaaaaaaaaatagaagtattgtcctttcataatgcgaggagcaagaatctccagcattgcgcgtgttgaataagttggacggaatcatacatctttttgtaatgattagagatttgcttcataaggagtttcggtggtcattagggtaagtagactttttgctgaaatctttgaacttctctaatgtacctggcattgttgtcccactgcagaaactgattctctttggagttccacaagaacagcttcaggaacaccaagaaggcttactcatttacttggaggaacacaaggagctgattcctgaaatcgccaagctcgtcttgtcagttggtgctgatttattggaggcccggaaagcatcgaataaggatggtgacagcagcaacagtgaagcatgtgacgagattttgtcttggttacagtggttaatgttcaacaatgagccacacgcgatgcttgatgacttggaacgtagcactgcaggggagcgtgctgtctgtggatctgtttggggacagaatgatcttgcttatcgctgccggacctgtgagcatgatcccacatgtgcaatctgtgtaccatgtttccagaatggcaatcacaaggaccatgattactccatcatgtatactggtggtggatgttgtgactgtggggatacaactgcctggaagcgtgaagggttttgctcaaggcacaagggggccgagcagattaaaccacttccagaggagcttgcaagttctgtagggcctgtgctggatgtgctcttgcagttttggaaggagagaatatgcctggttgaaggtccgccacacgcagagggtgatggtggtaactcgtgcaagagggtcgctgaagaattgacaacttgtgttgctaatatgctgcttgaattctgcagctgcagtgaaagtcttcttagttttgtcgcccaaagaatctgtgaatgtccagacctattagatgcattgacgaaggcagaaaggttgctggacaagaaggctgttaaaaaattgcatgagttgcttttgaaacttatcagtgaaccagcttttaagtatgattttgccaaagtttttatacactactatcctgttacatttggggaagttattaaagggtgcaacgattctctgttggaggagtatcctctgatgcctaccttttctgtgcaaatattcaccgtgcctacgctgactcctaggcttgtgcgtgaggtgaatttgttgggagttcttcttggatgcctgacagatctatttctttcttgcattggtgaggatggccatttacaggtatgcttgattcatcctatggcttgaaactatgttgacccagttagcgtgtactattggtattttctttcaagtataagatgactactgttggtacattttgtgccaagcatgtttgttcgtctgcttttgatataatgttaatgactcaatgttaatcatgtgccatcaatcctgagtctgttttattccatcaataattagttatactagcatctcgcaagcttatgcataaaggaaataaagacgagttacttggataactgggaatgggtttgacaataggcactagcattattggcttttaataaatttatattgacatagccaatgagtctctgaaatatttgtagatatctctgatgccttatagttcttgtgaacctgattaaggttttatttgttgggccttctatcattattcattgatcaactttgcactgtgattcatatagtataatgtgatttcatacggtcatgaaagtctttgtacgttgttatttgcagacaaacaaatggacaaacttatatgatgctactgtcagactattggaagatacacgttatgtccttagtcatgaggaagtttctaaatatgttgcttatgagaggcctgatttaacaaggtcatggattaagctcctgtcacttgtacaagggatggatcctcagaagagagtgacaagtattcatggtgaagatgagaatgagaacctatctgcaccctttgtgctgggacactatcttggagtttgtcatggttctttggtgaaaggagcatttgctcctcctgagcaacatgagtcaactgatgttactatttgctccactgcaacaaaaagcatagaaagttctgagaatcagcggcttgcaaaagtgggaagggtctcccaaaatagctcagtgtgcaatttaggcagcaaagacagttcttcagtcggtggattgcaccacctgctgcctggttaattcttcagtgcctgaaagctattgaaggttggctggcaccaggtatagctctgaggggcaagttatctttccttgatgcgagcagtagtgatcctcacaattttatggctttgcttgaggagcctttgacttctaacaaaggcaaaccaaatataaatattgctgaagtgaatgccaagataaatgaagaaccccgaccaggtgatattgcagatattcctgagtcatttagttcctctgttcaagatccggacaatctgatgctaattgatcaaatagggttgcctcatcctagtaacatggcaggcaaaagaaagatgcacgaaagtagcaatgcagcagatacacaattgcaccctgagaatgccatttcttatactatgactgacggcagccttttgtatgcccaccctgattctagaattgaggaactaggtataatcaacacagtaggctggcctcatgttgttttcgatgtcagctcacaagaaacatcatttcatatccctttgcatcgtatgctttctttcctattgcggaaggcaatggggaaatgttttggagaggatgtcaaacctgggcattgttcagttgtccagaccaatgagtttttttctcaggtacttagaggctgtgaaccctatgggtttgcgtcaattgtgatggagcatccattacgactaagagtattttgcgcacaagtgcgtgctggaatgtggcgtaagaatggtgatgcagctatactgagtgctgagtggtaccgctctgtgcaatggtaatttcatcgtgaccttaagtgagtttgttgtgttcaattaatagtcctgaaggtaataatgttactcgtctttccaggcttgaacagggtttggagtctgatctgtttcttcttcaatgctgtgctgcactatcttctcctgagctttttgttaagaccattcaggagagatttggactgtcaaattatacgtctttggatcttgcggaacagaatgagtaagtcacaggttgctttatcatgacagataaacttctatttctgtcatgtgttgtttttcgtaccacatgtagctacaatttagtttttggggttattacaatcacctttatttgtgtcgcaatcaagcacagctataatgatcaagaagttgaaaatgaacctgcacctatagttactttcttgttctccctcttgttttctcttttgattttgcagaatgttatatct

SEQ ID NO: 8672 - DNA, 8240 bp, Oryza sativa
tgccccggggcattgctggcatgaccctgtgtggcatgttatcacgagtgaatgtaacagcaccttggattaagcagcggttgttataaggagatctaactgtaggttattttggtatcttatttcgtagtagacaattgattttttagattaatcttatacacggcattgaaccagaataaaagggggttccttttagtttgtctgtctccctgccattgtggtctggttgcctccatgatgtcatttgagctgcttgggtccagggacatggtgatcaggcacatacattatattatcatacatcagcttttagtgaaatgccattgtcttgctgtgacttttcatctcattgctgtgacattcatctcattgttttcctcagctgtccaaattagtatgtacttgaacttttgtcaattgaaagaaattgtgatgtcaaattaggctgacagcatacccttttacaggtatgaatcagttcttatgcaagaaatgctaacttttctcatacaattagtcaaaagaacgtatattttgtgggctttccacatcagacaatttgaaaagagaattgatttataagttagctgttgtggattccacacacagccagattgtgaagtctcttccccgtgccctttcgtcaagtgaccagcttcagaatgttctggattcacttgcagtttattctaatccatctggcatgaagcaggtttgaatccttaaattatattacatgcttatgaaaatctaattttatttttgaacgtatgttttataacaaaggttatcacagggtaagtatgtacttcgcaaaacattctggaaggagctggacttgtatcatccccgctggaattccagggaactacaaattgccgaggagagatattaccgtttttgcaaagtatttgctctcaatgctcagctacctcaatggacacatgtttttaggcccctgcataatatttctaaaattgcaacatcgaaagctgtccttcaaattgttcgcgctgttctgttctatgctgtttacagtgatccattatctgtatcacgtgcccctgacaacgtccttgtgactggtttgcacttgctttggttggcacttgatatatgtgaatcggagagcaaaaggtatgccaaccaatatggtatggatatagtgcagcatgatgatgaatcatgggtgtcctgtcatcttatgcagaagaggcttttcccatattgacctattctactgaactagtacctccagtttctggcaaagtgaagaatgagagcatgcttaccttgctggtttcattaatgcacaaatacaaggaagagaatgatatctccttttctggatccaagtactgcaatattccatcactaattgagagcttgttaaagaaatttgccaacttaagtaaggaatgcttttctgcaataagacaaatggcgccgcatatagtcccgtccatgccacaggataccagttgcaaacaaaatccaggatcttcagattctatggacaagaaggcaaaggcgcgccaacgccaagctgcaatcatggtacaatctaattatattctcaagccatctcatattcaagttcaattatgtttgttggatgggtttgctaagctattacgttgattttctttattatagaaatgctaggtctgcagttcccttgattgcctattattttttttctccttttttaggctttgatccataaatagtttacttgtcttgattgcaaatttacttgatgttggcatttcttcatttgcgttattatatattgttatatattaggcaaaaatgaaagcagaacagtcgaagtttgctgaaagtatgaagtcatcaggaagtgaggggcaggatgttccaatgtctgagccagatgtgtcctgttcaactggtgtagtctcagaggagtcgctgccagtttgctccctgtgcagggattcagattctaaaagtccattgtgctatctgattcttcttcaggtaaccgtagtttgcttggcaaatggattgctctatcaattatgttcacatctacatgaaatagtgattgccattttgtattttttacccatttctgttttgtgttcaaaacacaagcggataggattaattataactttgctagtatgctgtatgtgtgctggtgcttttatacatgcttgcttacatgttatatattccagagatctcgacttgcaacctttgttgagatgggtcatccctcctgggaaaatccaactaaatcaaacaagatatctgggtccatcagaagggaagaatcagctgatccctcaggtgcttcttcttttagttcggaggaattcattgctgatacagcagtagagccttcatttgattcagatgctatggaagttgatgcgttccttgatttctcaaatgagcaacatccactcattcgatatatatcatctttgcctggtgtgtactctaacagcaatgctggtgataccacctctcttgagacaattgaggatgatgtctgtaagactattttagatcatatgtttgggcccaacaatgtagaaactaaagatgatgaacaaacagtgaatacttcgaacctgtcaattggctccaagaaaaacagaagccccagaagttctgtgctgggaacatatgttaattgtctttcaacaaaacaccttcatccgtccaaatcttctggttcagttacaaggaacagatttggtcctgttgattgtgatggcatccacatatcctcttgtggacatgctgtacaccaggaatgccatgatcgatatttattctccttgaaacaaaggtaagctgcactcaaaatttatttagttcaagtaagaaattctttatattgcatcgtgtgcgtattgtgtggtaccatatttggatgagaatctcgcacttttagcagtgcacaactcgacaattggtagcttcttgatttaacaattattcatctgttcaatttgacaggtcaccttctcacagcttgaaatgagaatatgtactactaccttacacttttagacttttaggaacaattgttgactgaaaaagagtggtgtctcatattttatgccaagctgcttacacttctgttgattgaacatttgcagatatgtcaggagacttggttttgaaactggtcatattgttgatccggatctggtattttctatctatacatttcataactctctctctctctctctctctctctctctaactcagtaccttttttccagggagagttgctgtgtccagtctgtcgcagatttgcaaattctattcttccagcatcacctgatttctctagtaaatctttgaggaagacgatgccatctgttcagataccgtctgaagctcctcctgcgtcatcatggacgacgacaagtaacttacagttccctcatgcactctggcttcttgaaactgctggaaaaattgttggacaaagcaagtttttaaaagctttaagtgggaaggtcaatgatactacagagccagctctagatccttccctacgaagattgtgtatgctttactaccgtcgtagccacaacagtttttcagcatctgaaaggctaaacccgtccctatttctctgggatacactaagatactctgtggtatctacagaaattgcttctcgtggtagaattgcaagctattctgaatcgaagtcatgcatagaatctttacgccatgaactgaattcatcaaatggatttatactgtctctgttatttcgtgttgctcactctgcgagaaatttgagtcgccttgaggttcttttgagattcgaaggtctacaactgttagcgagctctatttgctctggcacttctggtgataaagatcttctgaatgccactaagcggaaaggtatatagtgcacacttaatttcccatctctgcctctaaatattattccctgtatatgtttcaatatcaatgtcatactcttgtttctgataattataatggcaaatgttaatatattaatgcaagaagtgtttgataaatgtaatctgacagccttaagaaaccaaaatgtcataacaaggtagtttgatgcacttctagaatcggtgttcttttactcgggctcttgtttcacaggaaactcaaatacctctatattttgtactgttacccagatacggggatacagatacgtgatacggggatatggcattttctaagaaacacggatacggggatacgtctatacatacacacagacacacagagagagagagagggagagggagagggaataaaaaatacagaaaactgaataataagtgtagaatactaaaacacccaaattggttctctcttccatcgccccgctgcatcagcagccacactagcagttggaatgctagatgcattaccattcaagcttccatcaatatccatcgcatctaacaagatatgtcacttgtagtcttgtactaagaaagtaagatctgcagtggactggaagaaccaagtactaggcagcacaggctgtgcggctatgcctggttgcggagctgtggcagccggctgccagtagagaccctgtttcagatggtggcaccacaatggccggcggatggcggaggcactgtggcatatggcggcaccatgacggccggtggatggcggaggcgctgcggcatacagctgcaccatgacggccggcagatggcgaaggtgctgcggcataatggcagtccttggtgtccagcatcatcgttgctgcgctttgtgagatgggcgtcgtcatgtcgaggccaggagatggcggcggcacattgatcgtatcgagagcatatcctgaattattctgtttatttgaaaaccttgttaatcaagaatatgtatgggatatgtatcggagggtatccgatctgtatccttatccgagaatgtatctgatacggatacgtgagctgtgtgccgtatcttgcatcctagattctgcatgtgcatttttaattgcatatacattatgcacgatatcatacttgaatatcccctcacattttttcattttcaacaggcattatgccaccgatgggtgaccccactagtgagggtggagtcttccctgatatccaattttggaaacaatgtgcagatccagtccttgctcaagatcctttttcatcattgttgtcaactcttttctgtttacctgttcagtttctaatgtccactgaattcttcatccctttcgtccacctattctatgttgtttgtgttgttcaggtatgctgttttgccatctcctggaatgtgcatattatccttttttattacttcattacgttttatggcatgcattgtgttgtaggcattgataacatgctatggagaagaaacatttgacagatcaagtttcagcaactgcctccttaatgatgtttgccagactatgtcaacaattgatattgctagagaatattttgtatccaaacacattgatccttcttgtcacccaaaagatatggtccggagattgacttatccgtatcttcggaggtgtgcgttactatgggagcttctaagatcgtcttcctcagcacctttgtatgacagttctaatatctgggaaggatcatcacatctttacttgaataatagcgcggcagactcactggcagtggagctgaatgggataagggaattggaagacctgtttcagattcagtcactggatccaattctccaagatgaatctgtacatatgcttgcgttaaaatggacacaacatttctgcgaggattacaaaacccgtaaatatagaggcgttcatttctctaccccagcagtgccatttaggctgatggagttgcctcctgtctatcaagttctcctggaaaggtttaatctgaacctaattttgattgattccctccctttctggttctgggtcttcaggaaccatatattgcttttaaggctgaaggctaacacttactgtttttcccattagatatgtcaagatgcaatgccctgattgcggttcagtgcctgatgaaccagcattatgtttactttgtggcaagctatgttcgcctagttggaaaccatgctgcaggtgatggtgttcatttagttcttgtttcactcttgctggttgtgttttaattatgaagtgagggtaaacttttattttgtatattgtgtgtaggactggaaagtgccttaatcatgcgtctcaatgtggtgctggcgttggcatatttcttttggttagggtatgtattaagttgtgactgcatatcattcttgttatcggtgttgagattgctttcttcaattttgttgtctgttttgtgcagaaaacaacaatactgttgcagcgatctattcgtctcgccttttggccatctccctaccttgacgccttcggtgaggaggtactggattaatttaaatactgaatagctttttgctggcactaaagcatgtttatttgcctcactatccccgcttgccttgctatccttgcattcttgcgccagcatgcttctatgctagtgtgcctcatgaaattatgctcttgaatggaccttggctgagcaatcttctccacccataattcgatgagcaattgtaagatcgaacactaactgccttgatgtaaaataccatcatcaaatgaactgaagaattatcctgtcaataccgtgaagatcccattgactgaaaccagacgtaacttctctttactgccactgttgagtatacatacacggaaccagggcagggtgctgtgaagattttttacctgtatgcatatcgtttaaaacattgcacctaggacggattgatggcatatgatttgatttctagatgggatgaattagagtataggatgcatgccttgtagattattgagatatttccttgcaatgcaaagaagctataaaggttagggtaatgctacaaggatgaggcttgttctcacctgaggttggggcatatgctaccaaggatgtgtgagccaaacgaccccttgatggccttgggcaatgctatgggtaatttcattatatgtgatcctatgccttttttcttctcatgtattgctatttggttgcaggatcatgacatgcacagaggaaagcctttgtatctaagccaagaaagatacgcagccctcacatatctggtagtaggctcacccgcctttattaacggctccatttcaatcatcaggaattttcgaataacatgccctccttttgacatgataggtggcatctcacagccttgacaggacttctgaagtacttaggcagacaaccatcagcatttatggatctgattgagtgcagtgtgctgtgggacaatatccaaaggtctgtatcatctatattttgttagtgtttgattctggaataccaaaagctggtttcttccctttttatcaaatgatgttaatcagtatttaaatcaatgaggccttatatcctccccaggattgagataaccggcagattgccctgcccaagcagctactgctattactactcatttatgcattctaccctattctggctgggtgtcgtaaaggggatgaaaaagtaacacatctccatggtagtcagtggtgaccacccaactaaaaagttatgtcccagccatccagattattctaatttacttagtcacattatttgtcagtattactcaccccaggctgataccatagtagcaatccataactctcaccaattaccatcttctaccaaggcaactattgttagaagtagaaactataacgagagatgaactgactgacaactactgtaaaaagtagaaactataacgagagacgaattgacatagctgaatggtctgcaaggcttcttatttacagaagattatgaacatcttccttcactcttgtttatcagttatggataatcaccacaacctagtctataaacaatattgccatattgcaatgtgagtgctttttttcttaatatcagtttattgtgttttgtcgataggatcttgtgatgtgaatattttctggagctgtgcgggggaatgcaatttgggatcaatgctttttaatggtaacaacgcttcctcacacaaggtataaccactatgctctgctcatgcatgtaaatgccgttgtgttgtactgcgttgtttctgtcgtctgattcttctgctcatccagatggcactgttcttcagct

SEQ ID NO: 8673 - DNA, 2943 bp, Oryza sativa
gaccagcccaggatcctgggccatccaaatgggccattagtatttggattacttgtcacaaagcctgtgagctcatgagcgccagtaagaggcattttgcacctataatattattattattacacttctgtcatggaattttaggcagaatcagagtttttgacatgatagaagtctaggaaactttcagatagatacatgaattcctgctcctcaccatttgttgactggtattttttttccagcattacttctacaagattacgcattccaaaaactggtgcaaaaacaattgctccttcaaccccactcaatatataaatttcaaaacctttcagcacatgaattgaattcctaagccctaacaagtaacaaccacccctccaaaccttgttctcttcaaggagagaacagaaagaatgttaatatatacatgaggataatagcattccaccatatagaacagctaaaccaacaaaatttttaggggcaaaataaaaaaactagctaggctcaaaactttgcaagctgaagagtgaactctgtcagaagcctgtcaaacacaaagtctgccaacatgttccccaagtgatcagcatctctctgaaaattcacccagtgatcgttcttggatagatcattcgacaaaattgtgtcaatttctatgctggactgtggctgttcatccagatggcagcttactttagaccacaattccttgagggcatggtttcccacaggtttcggtctatcaaaagacgaaaaccgggagagcaaggacttggaaacagaatatttcttgtagatgtcgagcaacacttcatttgtcaagtcagacagaagtagctgatcagctgacatctcagtgaaatcaaatgcagcggcagcagcctcgtagtgttggcaatcctcttcttggagaactgtaatgttctgtgagcaccattcatcaaatagtacttcattgcggaagcttgatttcatgaatatattcttcacatagatcaacccatcttcattctttggatctgcttggagagagcttagttcatcagagtcactttcttgaacatttttgtgacccaggccagcagttgaaagttccatggaagtgctggtattgagatccatatcagctgaatcatcggtatcacttaaatggaggactcttggcttcaacgacgaatctgcaaaaggaaaaggaaaaaaaaactcaatttaaaattgaagctgaagcttgaaacaaaagctaattaaatgatttttttaatgattgaactgtattggactttttaatgtcccctgcaactcataaagtaaaaatacttgatctggctacctttatgtaaatttaattcagacacttacagtgacaggtcactgaagctccaaaatcaaaggctctaaactaaacatcgtattttttttcaaattatagaaaactaatgtatgtatgtaagttttctgctactaaacggaaatctcaccatccaggattgtatatttcactggactagcaggatcatctgggaaggtcatgtcaagaacagacattggactatcagtttcttgttcacagcttagatttatctcagcttcaatttcttgactgggacgaggaacacaaaaagtaccttctcttgacttcagaacatcggatgaatgaatttgtttgtcatctgaagttgttgtatgttcttctgaaatccttccgtcttctgaaactttagtagtatgcatacctgcttctgttgacaaattagtatggtcatcgtcacaagttgttccatgttcttctgggacatcaatttcttctgattttgaatgaacagtacacatattatcttcagttgatgagtgaacctgatcgtcatcacaagttgctacatgcccctgtgaaatatcaatcacttctgaaagtaaagggggagtacatatattagcttcagttgacacagaaacaccacactttttgtcaacgatgtactcttcgattaacacagtattttcagagccatcagcatccttatgaccagagatctcatccatagcagcatccacatctccatccacaataattctctctggaacatatggtgccaaggcatgttctgggatcacgagattttcagcagtcataaccaaactctgcaacccagtcatcacagcaggcgcatccaaagaatgatccctagtagattttgaacttgtcagcgtcctcttcgactggttgcttgaaatagaatccagcaagtgagaatatttctccaatgattcagtgagggaacgtgaacgccgaaaaccttggtttacaggtctttttgcagcagttacagtataagatttcaaaccatccctgtcatatgtggcggaggctgaccgggaaagtccttctttaattacatcttcagatgccttatgtccataagggaccttatgaagaactccatccattgaaatgctacggtggctcctttgtttcacatgaatgtcacctctctttagaagcgaagaacttgtatcattatcgcaaccatcctgggtgttgaatgtagcattttggatatttgtatctgtggaatttggcataatactttgtgaagaaccatcaccattggaagcagattcaccatcaagaacatactcattgctttccaggtaatgtattgaaagggtacggagtagcttcggtgcaacaggaagcatcttttctttatggccttcctttccatacagcttttttagaatcaaggagcccaaacttcccttaccagaactcttttttgaagacttgtttttctttgttgtctgtaataggagaaatgaaaacaacgtgataagccaactccaatatgaaataaatattgactatatgtgggggttttttttacgtaactatatgtggttttggaggagacaagtactacctccgtttcaggttat

SEQ ID NO: 8674 - DNA, 13603 bp, Oryza sativa
gttatcaaaaactaggaggctcttcaagcacttgtgcttttctatagcaggtatttcttctacatcattgctgatacataagtggcgtagatttggtaaggctttgctatattccatgttcatgaatatggagtgatcctttgtcaaaaattgaccaagtgacctcaatagatcatgcattgttgactcgcctttgtctacaaactctggtcgtggctgcagaagattccttctgattagctcatggtagtactcttcagcaacctcatgtattgagtacccatgcacttccgtcacgaaaccttcagcaacccaccagtaagcgacagcatcacgacgtatcacaaaatttgacggcaacaaagcacaccagagaaagcattgtttaagttcagggggtaagttgctgtagcttaagtacagagggcctcctagttctctgggaagtccatgaatggaccacttgctatctcggatactctcccattctgcccttgttcttttagtagatagaacacctgcaacaactttgatggcaagaggaaggccatcacactttttgacaatttgatatccaacaccactgaattctctgctttgctcgtatggccctaatgacatcttcatcagcagttctaggccatcgcaatcattcattttgtttaccttgtgggtataagttgcatgcatttcaaccaaaacatccaggtttcttgaggtcacaaggatatgagaattcaaacctctcaagaaaggcaaacgaagaagatcaatccatacatcagatttccaaacatcatccagcacaagaaaaacactcttccctctaatagtgtccactagaagcggtagaagctcagtcttagtctccagctgatcacaaattcctccagccattctgattgcctgttttaacaaactggtctctgtgtaattctgagaaatgcacaaccatatatgaacttggaatttctcccttatcctctgttcattgtatatcttttgagctaatgttgtcttaccgatgcctcccatcccctggatcccaaaaacagttgacctgctttcattgtagttactactaacaatcattttgacgatgtcatcaatagcccttctgatatcttctccaaccacctcaagttcatctacaggagatgtctgacttctgtcaacaattgttatctggatttgttgcccgttggttctctccaagccaaacatctctttgttcattttaatttcttcaaacttttcatttatattatcaattcttttggcaatcatgtgatcaaatgaaaactttgcaaagctagagaacaagggctgattgcaacataccggccttggtggcagcaagagcttctgtgaatgaaccatgaaaagatctacgatgtcatcgacatcaaacataacatctctcatgttcttccaccatgaatctatccctggatcctccatggccagagcctcagcatcctcatgaacagcgttgaagaattccagatttttcttcaggctctcaataccccttttcacacttaatgtcatgataacctcatcctcaataagttgacccagcttttccaagaatttccaagcgagagcatccaaaactgtgcccatagtgctagaacctacggattcccactggatctctcctatgggagatgcttgaaactgcagatcccagaagagatatctcacagagctgctgagtgccgatcacttaaatacggaagatggaaagagatattgaagcagtgtggctaaaacctgatgagaacagagagggcaatgcagattgcagaagagagctgttatagattctcctccctttcttgccaccaactgcctttgtcacaatggacattgacattctctattgcaaaacgtctgaaaaacctgaaaaaaaattaaaacagtatgaaagcactttttgaggcaaaatctacccacaaagatttttgtattcaaatctaaatgtttcaacgatgatgcaatgtgaaaaagggcaagtagtgttacaaaattgcaaggggattcaagttgaaagctcttccaggctgtgtattcttttcctttcatccccttgacaataataatttgattttattgcagcaaaggagccacttggtgctttactttcttttcctgtttaccacctaagaagcctggaagcactggagcagagttctctttttttcaggaatatgcaacaaaaaaaatatatttatattggcattaaggttgggtaaaacaaggttcagagaaaatgatacattagatcaccagagtgcagacagcagaccgaaggaaaaaatagagtcaaacaggtgctggccggtgctgggcatgcaaccgcacgcaggaatctactgggcatttcgtcaaacagctcatctgcgccccaaccatttgttgcaaagtccaagtttcagagcttagagaaaacatcgaaaggaactcatcccattcgcatcagtcgcgttgcacataatcaagtcagaaaagaaaaaaaatatgatggttgattacctacgcaagaaagagagatgcttctcctagcgaaaccaaagacggcgacaacgacccacaagcaaagataagcagggcctaggtcgaactgagcctggatcaggatcacatcgcataactccagtataaacaaagagcaaattctctgattcatctcgcacgtaacgtaacgtaacgaatggggcgctcggggagagcgatgcgcgaatggcgttcgatgaaatgcccctccaagttcaacaggcgcgtccaggccaatcgattttgttttactttctgaattgggccctgtcgcgaagactgcgacctgaattgggccgtaagcccgtaacctaagctctacgccgaaggaaagcccaaactctaaaaactcctccacccccgcgcggcgggaaaccgctcctccccactccgttcccgcgcacattttttcggcatcccacccgtcgatttttccggcatccaacgtcgtacatccctccacgtcatcgatccgcgccgcgtgccttccaccaatcagggcgcacgtcccctcctctacaaaaccatcttcccccgtctcctttccccacgccgcaatctcgcgaatcccaccgcttccctttcctctcctctcctctccccgggaagaagacagcagcggcatccatggcgcccaaggcagagaagaagccggccgcgaagaagcccgcggaggaggagcccgcggcggagaaggccgagaaggcccccgcggggaagaagcccaaggcggagaagcgtctccccgccggcaaggccgagaagggcagcggcgaggggaagaaggcggggaggaagaaggcgaagaagagcgtcgagacctacaagatctacatcttcaaggtgctcaagcaggttcaccccgacatcggcatctcctccaaggccatgtccatcatgaactccttcatcaatgacatcttcgagaagctcgccggagagtccgccaagctcgcccgctacaacaagaagcccaccatcacctcccgggagatccagacctccgtccgcctcgtcctccccggcgagctcgccaagcacgccgtctctgagggcaccaaggccgtcactaaattcacctccgcttaggcttcacccctgcatctatctattgctattgctaatagttgtagtttgatctgtttgtgttagttttagtgctatcgatgattggaaaatggatgttagatcgttagcttggtagtcagatgtcagtgatctggaacagtagctctgattttaaaccatgtgaatgtgattcctgggtatgtgatgtttgaccgccctgtgcctgctggtcaacgaatgataactagatctaatttttgtggaactatttacatggttgctacttgcattctgttcaactgttgtaaattcctctgtcactcgttggagttttattctctgaagcatgtgtggaattgcctgggcatgcttttgggaaactatagtctgtagtcttatgttatgtttggttgccctgagcttgttggaattaatctatctaattttgcgcaattacatcctgtgagtatgctgttgccatttgcattgtcttgcaaactcctttgtatgccacaggaatttgatttctggagcatggatgtttggagtgtgatactgtgcttattggcccatgtaatttataagtacgagtaggtttcatctaagggcactttctggatggagtccaatatttttttagcctgatggcaattttggtttttgatctttgcgtttgaaacaaaagaagagttgtgtgaattagttagtactatatagtatgacagcttggccatcaccgttctattttagctgataactttgacatctgaagtaagttttgctttaccttagtactgtactgtttcaactttcaaagaagtttaattggaaatagtaactgaaacaccgtaagtattttgcttgctatttcaggatgctgctacactagcctgtttcctataaatttcctttgaatcaaagggggccttatgttccgaaggtctaaggaaggctctctctttgttcttgattagcttgtaagctaactggcaagcatgaggtatgcactacactgctgcatcttttatcaaagcttgctgttggagttgttgctctgcaggatatgccatgtgtgaagatgatgaccaaactcttgtggactctagaatcttataatgttatcctttggttctttgtccagtgaggttgtttgaggtgtataatttttttcgaaggttctactgcaagagcatcctgaatttctgttgggcttgtttgcattaaacattccatgctgaattgaagttaactacattctgtttacatctttacagtggcatgcatctaagcttaatgaatattaactacgcaaccttgtgttcctccaattattcctggtacaatcatcaacactgtctacatatgtatcttgcccaacgtttagctcacagtgctatgttcttcatggccgaccatccaagacctgagatattcatctctggttgcatgcatctctgatacagcttctgccaacatcattcgctctctgggttgttgctttgagcatgatatgccgagcctaagaacagacaccaagcactgttgaataattcttgtttttatgctttcatttttaacatctgcaacattttcttcttcatgaagccagattgttggatcagctatgtctaggggttggtgaagaaaagaagctgcaacaaacttgtgcagatccattgaatccctgaaaatgtcatcagtagggctccttccagtaaacatctcaagcaacaatatgcctaagctgtaagtatcgcctgctctggttattgtagacccttccccatactctgcaatgtttgcaatcaaagttagttgtcaaccgtaccctccacatgtaaaacaaatacaaagtgccccagtactccaatccacacccatgagggaggagggggagggattatgggaattaatgtaagaagttcagtttttttttaaaaaaaaaaatctacctggtgcaatataaccaatggaacctctgattccaattgagcttttcgaactttgaagagttttagtactacttttcgggaggattcttgatatgccaaaatctccaaccttagcactcttgtcttctgatagaagaatattactaggtttcagatcacagtgtatgattggtggctggcagtgattgtgaagataatccagtgcatcaaagatatcaacagcaatgttgagtctctgtgaaaggctgagtgtattgctaggagtgagattgcttgacttgggatgaatccaaccatccaagctaccattgggcatgaactcaaaaaccaatgccttgaactcttgaccctgtggaccaatacttgagcaacaagtgatgatctttatgagacaacggtggcgtactcttctcagagcctcacattcagcctcaaagctttttgaagatcctgattgttgaaggtcgaacacttttacagcaacaagtgcactctcatcgtctaaagtacatctaaaaacagaaccatatcttcctttgccaagcaggttggcttctgaaaattcattacttcctcttgataatgcataatatgaaaccctttgatactgttcctcaataaccagggatgttgcttgtctattttgtctttgtttgaacttcctttggtgtaacagaataactacaatagcagaaactaacaccaatattgcacccgttgttggcagagctattgcaagagacttcagatgctggtttctgttcttgcttacattgagaatgggacatggagccaagtgaagctggggtattccaccgcacaagttattccccacaaccgatgcaaaagtcaggtttctgaaaacacccttaactggaacttccccttgcaatttgttgaaggacacatctaattgccacagcgttgtcaaattttgtagagttgctgggattggtcctgaaaaattgttgtgtgctagaaacagctgttgcagattgggaatcctagcaatggtgttggggatcctgccagataacttattcatggttaggttcagtatggtgagcccttttaggttgctcagagattgtggtattcctccttcaaatgagttctcttctagatagagggcttccatcacttcacaatttcctatactgtcaggtatttgtccagatagctggtttccggatagatccattccatttaggttaaccaagctaccaacttctgatggaaggggtcctgacagagaattatatgacaagtccaagaaccacgagagtgactgcagctcaaaaatttctttggggatcgaaccatttagatggttgtatgacaaatctagaacaaacagtttttttagatccccaaggcttggtgggattgggccttccaaattgcagtagaatgcgtatatcctattcaaatttgtaagatttccaacagatgccggtatgaggcctgacaggctggtattgtacagggaaatttcaaccaagtttgttagcttcccgatgctttcaggaatcactccagataatatggaattgaaccccagatcgagaaagctcaagcctaccagattgccaatgtcctcaggtatgctccccgagatattgttgttatctaaattgagcatttgtagcgtcgttgacaggttcccaattggccttggcagctgcccactgaaagagttgttagcgaggacaaattcttgcagctggctgcagtttgacagtgaagtggaaattcccagcccttggtgttatctgcctcaagttgatttcctaccaaatacaaatactgaagatattgcaacctccccaagttgggaggcacaaatccggtgaatttgttgtctgagaggtacagatccgtgagtgttgaaagattggagagagaatgagggatgactcctgtaaaccggttaacatccaatccaaacacttgtataccgggaagcatgcgaccaatgtcagaagggatgctgccatgcagcatgttattgccaacctggagcatcatcagcgacgacaaattgtacagagatagcggaagttcgccggaaaggttgtttgcattgagaaaaagataacgcagacctgcgatatcgccgaggcctggagggatgagaccctcaagcttgttgtaactcagagacaagtgctgcaacgacgaaaggttggctagcgaggccgggatcttccctgttaagctgttcttcctgagctgaagcttcttgagccgtggcagcgtgttaccgagctccggaggaattcgcccgccaagctgcgggttggactggatccgcaggattgtcaagctgatgcaggagctcagattagcagggatcacacctgagatggagttgtggtccatatcgaggaccaggagacgccggagccggccgacggccggaggtatctcgccgtgcagctggttggagctcaggttgagccgccgtaggaaggtgaggttcccgacggccggcgggagcgtgccggtgaggttgctcgacggcaggtccagcgccgccaccctcgtcggccaccggtggctgcatgtcacgccctcccagccgcagaagctggcgctggtgttccatgaggcgagcgcgcttgagctgctcccgctgagccctgccttgagagcaagcagcgccggctcatcgcttgccgtgccggtgccgatcgtcatcaggacgcagaggagggacaatgcaagcctcatccgacgtatcgccatgtggattcttggttcggtttgagggagcgttcttggagcagagtttagttaacacgactagctattttagttaaatggagatactagcatatctctgtttcctgctgatcaccagtaccagtacatttttctttttcttcttttggaagatttcacctgactttgttgacctggttgggactggttctcagttgcactagggcccgcccggtttagttctcaaaataaaaattttaactctgtcactttgaacattcggataaatatatgaagtattaaatataaaaaaaatactaattatatagattatgtgtaaattatgagacgaatcttttaagtctaattacagtaaatatttgcttgttaatgataaattaattatgtttaataaatttatctcatagcttactatcggattttgtaataagtatttttatcagtgccggacatttgctaatgctggactattagaagcagtgtacattccactatgccaccaaacgcaagtggtcggtcaggaaaagtgacaaatactgccaacatgccgtgagaatatcttatgacaaactagtgttccttttcagcgaccgtggcgacgaaaggaaaaaattgacttgactagaatgctaaatgattaagaaggtgtgttgggggattagaacgtagatgacttattaatatatgattaattaattattaattattttaaatttaattaattaattaatatgattttttttgaaagaaaaaacgaggctagcacctcctgtgacgccgcgacctctcagagacggcgagctcgagctttggtgttgggactctgccgagcattcgtgccgtgcatatctggaaggagatttgactgaacagggagccacttcgccgtcacaaaggactagatttgcgttggttttaatagctgtcttacagctaagtgatgtagatgaaactcgatccataactgagggacaagaagtgaactttttttcaagctctgaacatatggattgcatttcgaggaacatgaaggaattaaccagcccactgaggtccataagtaaacacgatgtagacatgtagtacacaaatccataggctcagcccattttgtactgtatagtccaagcaggctcaaagctagattctttaccagcatgaaacttcagatgaagttcgtgtagccagcaacatccaagtaagcaagataaacatccagtgacacaagtcacattaaagcaacattcaagcaaacaagcaaaattagtataccaactcactagttcagtttcactagatagaaagcataccacatgacacagcactgcattcttaattacgtacacaccacaagactggagaggaaggactacatcatcgtacacacgccatagatgtctcaaaacatctttattcttagcacttatttaactaggatgcatttcttcagtctcaggtcttagatcacaaactcagaggaaacacaaagttacagtgacaacaactcatcacttgtaactggatcaaactactagcttagcagtactaggcccttccatctccttggtttcgtcaggaggttgcttgcttcacttgccgcagttgcaggggttgcaggtgcagttgtcgccgcacttgcacccgttctctgctcctgctccggcggcggcgccggcctccaacccctcggcatgactgcatccatcagagaatcagccaaccatagatcagtaattaattagaactcagcgaaacatgaaacaatcttggattgttgctacgcaattttcagagtaaaaggcatcatcgttttcttcagataaaggggagagtttttgtcataacgtgcatgaagtttttagtcgttttccttacgctgtagctagcgctgcaattttgtcatacgtacacgtaaaatggaaggcagtgagcctcttgactctcgacaaaatgttttgttctttgtgactcagaaggaaaaaaaaaaggcaggaaacatatgacaattgacaaaagaggttggtagctagaaagatggaggtactcaattctgttctattagagtatatgatagttagagtaggataagattgatttacatggacttctttcatatctataatcttttcttatctctacactgtactcctatatatactgccccctgagactcattgtattacaatggtgtcgataatcacaatatttccctctccctatactattctacaaattcagtaacacatggattttgccaatgaatcacaagtacatgacatggagaaggaaaggattagtgcacataccccttggaaggtgcaacacccatgatgacagtctgggtagtggtcacctcctcagccatctccgggtacatcttgcatctgcatgtacaaataatcaatcagaaattcagagcctatttcttgtctgttcaaagaagaggggataaaaaaaatcagatccttatcagccatcagcatgcatgctcctcatttaataacggtggaaaggagctaaatcaaaatctcctataatgaatcttttttttcctctcaagtaagatcatcatcacattaagccaccatctcaaaaaagatttttctatcatgaactttttcctctcaagaaagatcatcatcagatttggccaccatctaaaaaaagatttgttcacagactattgagtccataacatgttctattatccaaaacaaatcccaaggagaggcacacatatgacacatacaacacatgcatgtcaatatgtcatgaatacataccaagatcaacaacatggataaacacaaattcattacggatcacaacacacaaaaaaaaccccagcaaacgaacaatatcccttccgagatccaccgaatttccatctcaccaacaccaagactagacagttattatacatgacagatcaagaacagaaattcagaagatggtgatcggatcttaccctccgcagccgctgccgcactggcagccggatccgcagccgcagtttcctccgcagcacgacatctttctttcaaagatcaacacggatcgatcgaactgcgggcactgatcgcacaacacacgagcactcactctgaaaatctgaatatcaccttcagcacctgaaccacacgcagggaggggggcggagagggttgctacttatagagagggagggaggccatccgccgtacacgtggcacgcatcgggagacctgccgtgaacaaatcgtcgatttggggaagggggggaagtcacctcctgtgggggtgagtgagtttacggttttgcccctcattgattgagcgattcttcgggactcaaccgtccgtccgtcgctcgcggacaaccgaacgcatatgcatggcgtgatcacgtatgatccgcgagtttggcgtctggtttgtggcctctagttcatagtgagaattgagaaggttgtgtacgtgtttgtttgttgagttgttgggagttcgtgtatatttttctaaactaaatcagcacagaactatcaattatattttattttgaatgagtataattaaaaaaaaacatcaacgagaatagacttgtcaagcatcaacctattaacaactataccaacatagggttatttacgtgcctggcgatgatatgtgtagggtttacaatatatgttataacatttatggtactaaagtttacattcttttacatatgtgcttgtggacatactaataagttagtgatagatcaggtacacaatcacctagcctagtcatggcttatctaaaagtagatgtcctattaaacttcagcaaatattttttaaactttatcgaaaaatattttctaaagaaagaaaatattggaactataaattacgggtatgtttggctgtctgttttgcgcaaacggcgtagctgacaccgacagtgccgaaaagcgcagccgcaaccagcttgccgaatatgccctatattatgggatagatttcattctcatcattcatgtgctttatatatttcttccacaaagtttatgcatttctttataatatgtcatcatacattcggcgcgctagaggtgtataatgcacgttcaaggaagaatcaaaataccacgccgcatcgctcgcagcacagaggagattcagaagatcacaaattcatggtgcttattgatgtgttgggccatgccattatgtcaagcacttgataacactgaaaatggcctggaaatggcccggatggtaaggtcgtaggtaggcataaagcaggttcatgtctactctatcaatggttgtttactgaaaagctattattgttattttatgttttctctatttttgtgaagttattagtcaccaccactcgctgggaactaggaagagataatcgtgacaaataaaataagctccatatcaatctgctgatcttttgcatcgaaaattttctaatcctttttattctaacatatattttctcagttttaaaactattgacttttaaaaataacatttcattatttgtcttacttaaatatgcaaaaataatatggcatgtttaaagtatatttcataataaaataaatcatagcaaaataaatgatacttatagctttttaatacgatggacggttaaacgtcgtgttcaaaagtcaacaagttaatatattaaaagtctgaattttcttttagttccaatacctgatgatatattgcacataataccagtttatttcacttcgatcataagaaaaacatacatgcagtagacaatgttcttgcaagggtagtggcacaaatttcaggtccaccgattctctgattctggtgccaatttgaaacttttttcgtgtttgacgtgcatggatcacggataatgtctcacgcacaaataaaagaaaagaaagagaggagaagagttcaaatattcattgcagcgagttggaacacgtgtaatccacacgtccataattgtctatgctggccagaatggacacgccgcactttgttttaaatttaaaataattttttaaaaaattaagcataagaaaagctgaagaggacatggcctgaacctccacggcaaatgaaaatgggcgtgtcattatcggatagagaagagacaatgccatcattgacttttgactttgcgaatcccactgattagtactcccaccgttattttaagtgcgaccataaatttaacgtttaattttgattgtccgtcttattttaaaaatttttataattagtattttggttgttatgagatgataaaatatg

SEQ ID NO: 8675 - DNA, 5088 bp, Oryza sativa
tttcatcaccaacaaaattggatgaaaatcaaagtaaaggatttgttactttcaactctatactttcatctaggaatgctgcaaaaaaaaattattatataaatatcttcaagtaaaaaatcatcataattatcaatatcataattaatataccaattggataatataagtgtatttgggttttatgaaacgttttgcaacaatatcgggtgttctttgaaacaaattacaaaacctgggattttgagtgaggaatgctccaaacttaaggttttgaaaattttactcttatttattttttctgtaattactattatttaaaattggcaaaaaaaaattacctggatttataagaaatgatatgtgaatttctttcaatgtattgaacatatggcaaatcatcttctgatcaccttctgcctactgccataagaaaaaaaagattaccttagatgaatgaaaataatattacgcgtgtacacaaaatatacacattattcattatacttcaaagaagagaaaaaaggttgcatctgctccatttttagaaagacgttgacaaatgtatgcctttccttgaccatcataaggtagaagaaatgaaatgtcattctagatatcaactgaaattgcattttctctattttaatcgggttcgccctgggcgtgtagtcattcccagggcatgtgcagctgaagctgttgttgtagctgtaaatcttgtaaagtttgaactttctcccctacttaaataaacttcgaccggctttcgcactggtccagcgaaaaaaaatgtaattgcattttcatacatatatatttgtgtgtatgtgttctgaaagaaccttcaaatgaggttaagcgtataagcgacaactacattcaatccactaggccttaattatatctacttcggttgattataccgatacgaagagtttggtttccctcaatcctaataacattagatttgcctccttggttcataccagcaaaagaaagcagataatcgaattttgatccaatttttgcatatgaatttaatccactctaacatcctctcaaaaagtgaactctaatataattacccccttctcttcctttacttttttcccccttgactcctattgttgtatttgaatcctatctttctataaagttaaagcccactacatcttaagctcaacatgcaaagatgctatatcatcactaacatttactacatctcaaatctcatgtaggcatgctaatttattaagttttagagctttaaaatgcaagcatgttaattaaattattatcccacataatccacataatatttcaatatacctctccttcactttttataatatcctatatgcttatatagttaattaaaattttagagcttaaaaaaatccaagcatgttaaatcatcatttcacataattctcaaaatatttcaatatatctctccatcattttgtataatatctatataccaatacaattcattctcacatagttaatgttatttctttcttctttcattaagctatatcacctcaattgtttctaacgctcaaatgattaatttatggttggaattatcttcctcatttttttctttcataaagccacatcatattacttttaaatttgggtcatcattctgtatactatttaaattattataaaccacatcaacttatgcaagtttctatcatctagctatcttacacattatttatatttcttattatcataccaaactcccgcagcaacgcgcggggtttcatctagttatattatattttactgccatacctgtgccttctctttcttactgcactgaatatatgaaattgaaattgaggccacaggaagtttgtatggctgaatatgaggcacttccaagggttcatcacccttgtctcaagagttcaatttaagtacaagcaaaacccactatttaagccactaaaagaaaaaaacagaatttaaatggcacaatcggggtaagaggattattggttatgtcaccccacataactgaaacagatgtacttcgatcgttgtttatcacacccagttcttgcatattccaagtttaacatgttgatcgatctgaagtcctgaaaagtatttgtattgagtactgggaacgtctattggtcatgctgttcaagatatttacatggaggagcccaacggacaagaacatgttcaaaaactcgttggatttgaaatctgcacaagctctcagaggctgctcagcctgaatcagtcttggagatagcatcacactatgctgcaatcgaggcagcatttacacccaccgttcttacctccagcagtggcaaattgatgttagtcttaaccttgagtcaggcaacttcacctgaagggatatctagttttcgacagtgctgaccaagtttccaaatttttgcatttatattaagctgatgaattcaagctataatctcggtaaacgatgttgcttccttctgttaggactgcaccaagctgcatttaccactggactgcattttgaataccattggctaccacttaccacagaaattgaattgttttcctgtaacatttcaggtgcactagtatcaccatttccttaagtgcgctccactctagtactgcaagaagagtgacaaaatgattaaatgaaggatattttgattgtaaatagtttaaattatgatgtctcggtgcaatagccagaattacaaaaacaaaagataaaccaaaccatagtacaaacagaatcaaaggaaaagatcgagactaacaaataaatgtagtagaacttcctctaataatttgtagagtaaattgctcacctgcctaattatagagagattcatctggaaagatatccctgccatctgcaccaactgtaacaacatggacggcaagttgttggtcttccaggaggctcatcctgaattgcttcgcgttgtggcaatcgaccatgtagagtctctttagtgagattagattctctgcctgatacagcgctggacagtcctgcgcaagcaagtcctttagattacagagattggaaattctcctcaaacacctgttgttcttgaccttgagccataacactgaaggaaggttgtcaacttcttgcagcgtgtgagcaccttcgatatggattcttcttaagttagcaatcctatgcaagtcttcagggagagcccttagttttgggcagtcgttaagaaacaaacgcttaaggcaaggcatcagaacaagctgttcagatttgccacacaaattccatgtgttgagagaccaactttccaaattgctcatgttagtgatgagaagcaattcgagttttggaaaaatagttatatgctttgcgctattgacgcctttccctagcagctctgcacccatattcactattgcatctgcgcctttaatcttaaaaactagcagttctggcatctggcctgctggtggaagcactgaacatgaagtgcagtcgttgaggtgcatatgacccaaatttggcatcttacgctctggttctgagcacaaccaatctgggaaccttacaccagggaacccgacaagaaatatatacagtaagcttggcgatggaattagcagttcgtagacttgctgaattctctcaatctcgttggtctgataataagttttatcatgacctccgattgtgcaaccgagccacaattctcgaagatgaagacagttcttgagtacaaatgaaccccctggtgctgctttttctagcttcacaatccggagacgttggatattggagagacattggagttcatctagtctgaatccagttccactgtcaaaaactcctctaaggttgtagagttgctgcaactttgcaactccttttggaacatggtcgattgcagtctgttctagctctaggaaacttatgttcgacagtctcattaaactatctggcaggctatccaaatgtatgcaaccatgcaaagaaaggtattcaaggctggtaagatttcctatggattctgggagtttctgaatttttgtatagcttagatctagaagcctcagtaacaagaagtttcccactgactctggtatgatttggatgcttgttccactgagaactaagacacgaatatgcttgagttctctgaaaatgtccttattaattttcatgaagtttttgttatcaaaaactaggaggctcctcaagcacttcagctcttctatagcaggtatttcttttacatcattgcttattactaagtgacgtagattcagtaaggttttgctattttccatattcatgaataaggaatgatcctttgtcaaaaattgtccaagtgacctcaaaagatcatgcatcgttgacatccatttgtcaacaaactctggttttggctgcagaagattcattctaattagctcatggtagtattcttctgcggcttcatgtattgagtacccatgcattttcgtcacaaagccttcagcgacccaccagtaagcgacagcatcacgatggatcccaaaatttgatggtaacaaagcacaccagagaaagaattgcttaagttcaggaggtaagttgctgtagcttaagtacagaggacctcctagttctttgggaagtccatgaatagaccatttgctatctcggatgctctcccattctgcctttgttttcttactagataggacacctgcaacaactttgatggcaagaggaaggccatcacactttttgacaatttgatacccaacaccactgaattctcttctttgctcgtatggccctaatgacatcttcatcagcagttctaggccatcgtaatcattcattttgtttaccctgtgggtataagttgcatgcatttcgaccaaaacatccaggtttcttgaggtcacaaggatacgagaattcaagcctctctcggaaggcgatcgaagaagatcaatccatacatcagatttccaaacatcatccagcacaagaaaaacactcttccctctaatagtgtccactagaagcggtagaagctcagtcttagtctccagctgatcacaaattcctccagccat

SEQ ID NO: 8676 - DNA, 18745 bp, Oryza sativa
cggcccattcaaaagaaaagagaaaggaaaagaaggaaaaggaaaaagaattttccagggattaaatattgcttatgctccattttaattggttaaatttatttctagggctctgaaaattccactaaaaatcttgttagcgaatttcgacatgtagaactcaagaaaaatccacatgccagtttcgattattatttgcattaatttattagggttttctcttgatttgcaccggcattttcttagggtcatttataaattcaattttaggcttgggaggagaacttcagggtgtgacacccagtatctctctcccccttcatccttttccatccgccgtccctccccccccccctctgtccgccacccctcctagtccctctctttccaccgccgcccctcctcctcctctctccagctgcatcctctcctcctcgacactttctcaccacttccgagctgtctctctctctataaccgtgctggatgttaggggccaccagattcaggctccttgaggtcggggctcaccggatccagccgccgggcagcgacgcagctaatgtttcagctttttatttttcacgatttttattttttttcggatttttgtttttgcgtgcggtcaacataagcacccgcatactaaaatccgattttcgcgcgcggtgcgtcacccgcacggtaaaattggatttttcgcaacccttccgggcagacaggccagagatccacacgcaaaaactacttttgatccatctggaacaattgttttttactagtgagtggccttattttggtaccgattgagaaaccggtacctataagggattctcaattggtacatatggagtgttatgtagtagcagtgattagtatgtgttaaaaattttcttactgatatcattttcactttcaccccaaggctagcactacgcagtaccactgtgccggttgaccaagttctacgaccaggtcaagtcgacaacgacacagcgcccactaattatctctgtccattctacagataatgatcgtggtgtgtctaccttcaccgttccctgcccaccaaggcaaaaaattctccaatccaataaattctccacagacaaagacagtgatgacaccacatgcagatttgcaactagctaggccatcatctctgcactctctaaagctttgtctgatgacggatcatcattcaattcgtagctccgatccatcgtcttcttcccggcgacgacccagccatgaacaacacaatgtccttgctgcttctacttcttggcctcagcatccttgcaatgaattctaccgctgctaccaccgataatggccagttcatctacaccgggttcgccggcgccaacctcaccctcgacggcgtagccacggtcactccggcaggcctcctccagctcaccaatggcaccagcgcgctcaaagcccacgcgttccaccctgatcctttgcacttccgcgaccttccggtcgccggtggtggtggcagcggcaatggcaatggcaacgatgtgcactccttctccgtctccttcgtcttcgccatcctctccatctaccccaacctgagctcccatggcatggccttcttcgtctccccgaccaagaacctctccgcagcagcgccgaggagctacctgggcctcttcagcaacaagactgatggcgatgtggccaaccacatcttcgtcgtcgagctcgacaccatccagaacaccgacttcatggacatcaacaacaaccatgtcggcgtcgacatcaacagcatccgctccgtgagatcctaccccactggctactacgacgatggcgacaacggtaacctcaagaacttgacattgaacagccatgagccgatgagaatctggatcgattacgaccaagaaaccacacggatcgacgtgactgttgctccgcttgagatatcaaaacccaaaaggccccttggctcagtgatctacaatctttctacagttttaactgattctgcatatgttggcttctcatcatcatcaggtgacattgactcacagtactatgtgcttggctggagctttgccatcaatggagctgctccggccatcgacatagcaagctgcccaagctacccagagaaggcccaaagagttcatccaaagtaatggagatcaccctgccgatagccactgcgatgttcgttcttgttattggcgtgatcgttcttcacttgttgcgaaggcagttgagatatgctgagctgcgggaagattgggaggtcgagtttggtccacatagattctcttacaaggatttgttcgatgcgacgcaaggtttcaagaacaagtacctacttggttcaggggggtttgggagtgtgtatagaggagtgctaaaatcttcaagatagaggttgcagtgaaaaggatatctcatgaatcaaggcagggtatcaaggagttcattgcagaggttgttagcattggccgtcttaggcatcgtaacctagtgcaactacttggatactgtcggcgaaaaggcaaacttcttttggtttatgaatacatgccgaatggtagccttgacaagtatctgcatggacaagaagataaaaacaccttagattgggctcacaggttccatatcatcaagggaatagcattaggagtgctttaccttcatgaggagtgggatcaagtcgtcgtccaccgagatatcaaggcaagtaatgtgctccttgatagtgatatgaatggacggctaggagatttcggcctagcaaagttgtatgaccatggcgtcaacccacagactacacatgtcgtcggtaccatgggctacctagcacctgagctagcgcgcacaggtaaaacatcccctcttactgacgtatttgcatttggcgcgttccttctagaggtcacttgtggacgaagacccgtggagcataacaggcaagataaccgggtaatgctagttgaccgggtgctcgagcattggcacaaggggttactgacaaaggcggtagacgaaaggttacaaggcgagtttgacaccgacgaggcatgcttggtgctgaagctagggctgctatgctcacacccggtccctcaagcaaggcctagcatgaggcaagccatgcaatacctcgacggagacatgaagatgccggagctgataccggcaaacctaagcttcggcatgcaggccatgatgtccaatgaagggttcgattcgtacatgatgtcgtacccatcgtcatcgatggtgagccatggcacattcatgtcaggactctcaggaggaaggtgatagctagctggcatgaaggggacggtatgtgatcgatggcgattgataatacccggtaaactactcaatttgctagctagaagtatatatgtacattacttatgtgatcatatatgctgttatttaaacatttttacatcagcgtgtgaatgaatgctgctcttttttttttttgtgcatacgaatacttgaagctgccagtgattgagaaatgagcatgccgtagcattgtagccagttggtacggaccgtattggagatttggaatagtggttgatgggctgaaagagctttcacagaaagcccatacacaagaagctctttgtttctgtctttgtggagagctgagtagaaccgaattcagatagctacaatagtttttccccttagaagggagtgtgatggatggataatttgttttttccatatatttgtaggtttaaattaatggattaactactataaagttgaatagttgctttgacaaaaaaaatatttaagaagattttatatagaaaattttgcacgaaacacactctgtttaacagcttgatgaacgtgcaagcggaaatccaaaaaccagaatcaaagcagtatagtgagtattcttcaccgtttgatttgcaatcaacgaatgcggaagagagaggtatacataagcgctatttttactgcggtctaagtattgttagagcaggtacaatagcagactataagttagctatagacatatttcaagaagatataataggagagaagagcagcgggctacaaatttgtagccagctgcagcacggactccaagatacttgtgtgtataacaggtgggaccaactatgaattgtgtagtatacgtttataggtactattgtatgaatcggctattaaattgactataaatgatttggagccggttgttggctatactattaaacttgctcttactacaaggtagttcaacactgtttagcgcatattattaatttgcggtattgcacatatacagtagttaccgctgacacgtggaatcggatccaccggacgtggaaccggatccaccgattttgccactatcacttcaggagtgtagtactatatagaatccgtgtccaacaacaatatagatggcacgtcactgtaagtaccaacaggtgccgtttgcaatacttgaggggactaaaatctggacgacacattgggcctgttcactttgatgacatttttaaccttaccaaactttggtaaagttgtcaaaaaaatggctacatttagtttgctgccaaatttttgtaactatataagaaatcctaccaattttggcaagttgtcaaaattttgacaactatgctaaatttttggcattgccaaaatttggtaaggttttttttttcatcaaagtgaacaggcccatcgactctccggtcaccaggctgtctcaacctggttctcaagcatatgtacatgcttgtaatattcacttttataggaaaaccagtaacgttaattaagcatttgaacacaaaggaagaagaaaacttaactactactccatcaattggaagagctagcgatgctccggtagtgacacatgagtatatatgtacacaccagataggtggtaaaaagctactagtttttcctccgatcatgtccctctatttctcaatgcttcaaccactatccctcgctcccagcttttccgtttcgagaatcacctccttcttaaccctaattttctgccgtcggttctttctaactgggatcagcccaccaaccttgctgacccagctgctcgcgtggctttcaagctgaagcatacccgcaccacaattaaaggctggatgcaggctaacaggaaaagaggaattttatgcgaggattgcaagttcaccatcgactacttagattgcattgaagaattcaggcggctatctgaatggggaacggtgcctccgtcgtctggtgcaagacagattagttttggaggtgcaaggcaagctggcatactcgaaacaaagaggaaaggttaagcgtttaaaactgggactggataatacagctttcttcaaagctcatgctacaaaaaacttcaggaattctcgtataaagacaataaaacacgatggaatagaagttgccgaccactttggaaagtcccaacttatgttttccttctacagccggctcctgggatcatctttgcagccttcttgggagttcgatctacaacacctttactcagatgaagggagagattcaaacttgctggctgctcagggtctaccgttttcacaggaagagattcttcttgctcttcaggcaatgaattctaacagtgcgccagggccggatggtttcagtccaagcttctaccgtgcagcatggaacacaattaaagaggaggttcttcagtttagcaacaggcttcacaacttctggggcagacatagagcgaatcaacagagcctatattgttctaatccaaaagcccgggaaagaaaacacagtcgatggatataggccgatctctcttcagaactgctcagtaaagattctttccaaagtgcttgcaacacggctgcaaagggtattcctgaggatgatacatttagaccaaacgggtttcctcaaagggagatgcatctctgagaatcttatatatgcgacggaattgattcaagcatgctacagaaggaagtgccaaactattattgtaaagcttgatttcacgaaggcgtttgattccgtcatttggtcaagccttttcaagattcttgctgtccgaggtttcccagaaaactggattagctggattaaggggttgctttcctcctccaagtctgcagtgcttcttaatggagtccctggaagatggatttgctgcaagaagggccttctacaaggcgaccccctatcttcatatttgtttatcttagttgctgatgtgttacaaagattgcttgaaagaaatactgaaatcagacatgcaatctaccaagacaggccatgtaccaccatccagtatgcggatgataccttgattatctatcgtgcggaggaggctgatgttcttgctctaaaggagactctgctacagttctccaaggcaactggactgcaaatcaattttgctaaaagcactatgattactctaaatgtcgatcaaagcaaggaactagttttgtcgggattgctacagtgcaagctggagaaatttctgatgtcttatcttggacttcccttatcaattcataaactgtctgcagcggacttgcagcctctggttaacaaggttgatggtttcttatctggttgggaagcatctctcctatcgcaggcggagcggcttgttctgataaacgcaatcctgagcagcctgccggtgtatgcaatgtctgctttcaaacttccaccaaaaattatagaagaaattgatagacgacggagggcttttctctggacaggggatgatgtctgctcgggagcaaaatgtctggttgcttgggaatcagtttgcaagccaaaagaacatggaggacttcgtattaagaacttaaagattcagaacgaggcaattcttctcaaatgactccttgccctctacaacttgaagacctcctggactcgatgggtctgggacgaaatttcagattcctcgttactgtcctcaactcgtctagggcatcactgggcatcctttcaaaagttgttgccagaactgcgatctttgacggaagtcgtggtaggaaatggtgagcgaacctccttttggtacaacaaatggttttcgactgaaagcttttcaagtcagttcagcaatctcttctcccacgtgtgtgacagacaaatctcagtaaaggaagcccttcacataggaatttctgaaaatcttgttccacgtttatctgaaactgcatcggcagagctgggctgcttacaggaattgctgcagaacttctctctgagcgatgagatggatttccgcctcagtgcaaagctaggaaagttgacaactaggaaattctatgaggcaagattaccccctggcttgccatctccaatctgggatcttatttggaaatgcagagcacctctaaaagttaaactcttcgcatggcttctggtccgtaatcgcctgtccacaaaagaaaatttgctgaagaaaaccattattcaggaggcaatctgtgacatctgcaatcaggaagacgaaatagctaatcatatgtgtttcttctgtccgttcgctcaggctttctggacgcagatcaacattcaaccgcaagctcaagacatcacgcagttccatcgtttgggtccaactatgcaagtgctggcgctacactggcaggtcttcttcctgctttgcatgtgggctatttggaatcatcgacacgatgttgttttccaggggaaaagcccctcactaagagcctgccttacaacgatgcatcaccgaggcagctctctgggcagagaacttaacggaagatgatcaatttgtaatctctgtttggaaacagatcttctcctcccccttacaatctatcaatcttttgtaatgaacttcttacctctaattgctactagtcgtagttgttacaaagattgcgaaggtcttccttcacttcattgcgcatagacgacagaatgaagagggcaatacaatatgctgaaacagcacccgttatcaccatcctgttgaagcttctccgttcttcatatcgtttaaccaattcatcaaaattctgtggtggatcgtattcaaaataattgccccagtgccgccccgtaggagcttcagtcttgggagatgtcgtgccgcccagcttattatcctacaattccatcaaggaaaggaatatttaataataataataaactacgatgaatatataataataaactacgatggtaactagatatattttaagtgttaatttttatttttatttatttatgaaagaaagggacagttgcatccacgctctcactttgaaccccagctgttgttttactcttactttttaggatttgcaattgtatcccatctttttaaaaacgaacccaccgtttgccctcacttttaaccctgttagatgggtcccacggttttgggataaaaaacacaaatagaaatagaaaattcattttatgaaatattaaattactgttgtacccttagtgaatggataaggatccaagcacccattccttcacagagctcaggtcaacatcccaaaactctagaggaggcggcggcggttccagcatcggcgtgcgcagcgacggcggcggctccgttggaactcgtgtgcgacggccgcggctccagcggaacgcgcggcgacactgacgatggttccggcaagaagcgcggcgatggcggcgaaactaacgtgtgcgcggtgacggcggcggttccggcgggaggcgcggcgacggtggcactcaagtgtgagtcgacagcaagtcttcggcgtggcggcagctgcgtttcatctcccttgcgtggtgaggcagtcggcataaaagttggtgcaaaaatacaacaacaatcaagggtataaatgttcttttgctctaaaactaacaccgtcaaactaggcatcaaaagtgaggacaaaataattggtttgttttcaaaaagagagggaaaaaatacaaaccctacaaactgatggtaaaacagcagttgagattcaaagtgagagcatgaatgcaattgtcaataaaaaaaaccaccaactaatttaattgattggacccagttgttcttgtccgttcaccaactgttcctgccctatacactcctactactgcttacgacaattacgtgtccgtcacttctgttactgcttttattatatatatgtgtttcagaaaaatagtctatcttgtcgtagacaagttgccaagatagactatttttctgaaacacatatagataataaaagcaataacataagttaggggataaaccccattatgttgccagaagataacaaattaaagcaaagagccacccttttgaaaagggaggttaattggactaaagaagtagacttcctaatggaactgagcagcagaaaaggagcaagtcgatagggagctacggcaatgtcgcaacgactgctacctagagcctcataagacgtgcaaaccgcttgacaaaccggtaatccccatctcggctgcctccacagaaacagcacaggacagaggtgtgatgctgagccgtagatattggtgtgagcttcaccggacacagcaaaggatctccacggagctcgtcattgaatctgaggaactctaacaaaaaccctgttgaccgaaatcgcgcatgtggtccgagctcaacccgaatgacaaactcggcatggtttctgctaatcaggcacaaaagagaagactgaaccaaagaccaatcaaccttcatcatgcgagcgttgtagtggctgcaaagatcctcctgtcttgctgagacgacgaagttggctggggaagatgaagtctgcatcaagagtctacaagagtctggcaagagcatacacccatccaccgccgcctccagaactccaaacatggcctcctccacaagaccacccagcaccaggaccatcatcgatgaggtcaacgacaacaacaaccggcgcaggtgagactgatggaggggaaccaaaggaagaagccgaggaggagggaccaacgaaggacacgagaagccaccgcagccgacgcaagggacaaggcggcgacctcccagccgaggatgacgacgctgccgacgccgccaccaggagccagctccagccgacgatttgcccacagatcttcggatctcgcacctccactgccaccaaccatcaccacctccgaccactccggcacccatggagctagccggcaaaagcaccaactagagacaaaccctaacaataggaagaacctgacgacctaataacagacctaaccacacaatactagtaaggggaggtggccggacccctataaccctcgccggcggcaagccgccggaatcgaggaggaagaggggccggagagcaggagaaacggggagggctactgtagaaaggggaaaggggaaagaagactcgagaacgaaggggtattcattgcctccttctgtggccattccagtcaccaagatagaccggagtttttctgttctcatgatagacctaagtcttaaccaggggtggattcacaatgggggcagaggggtcttgagaccccactaccgccccgggacagtggagacccccctaagccccactaattttttttccatagatccataggatatagggactggaggtttgatttatgctgatgtagtttattcagcccccactactatatttttctagatccacccctggtcttaacggtcactcgcctgatctgatgactatggattaccagacaagtttgcgaggaaaatttgtgaagtgatggacgggtaattgtcgtaatcggcaggggtgtagggcaggaacaactggtgaactgattaatcatggattcatgggttggtatatatttattcaaaaaaaaaaggtgacatacattgaacgcaatgttgtcagtatcccgatccatatcatagtatcttaggatactatacaatcctaccaacccggaatgataccgatcacatcttgtatcctaatttccatagtatctcgattgtactattcattattacacgatcctacgaaatcttgggtaatatcctaattctacgatcctacaaaatattatttaaaataagatggtttgaaaataatgtaaataaatatgctcaagtttatataaaaatcagttaaatatatcaaaactaatgtggtttctcttaataaatgtctctatttgtatgatatatattattactatatttttttatatataatgactatatgtaattaatacatatattaattgaattttaaaaaaaattatagtatcccgatcctacgatacgatattactttgatcaaaacggataacctttattgaacggcgctgatagtgggtatgatatagattgatagactttgttgttgactgacttgggtcgacgaccattgacgaaggcagtccaatgaaacaaactcacatatagagaacagtcatgatgaataaacaactgatccaagtgcactagaaagttaagtttcaagatccagcaataacagaattaaggcaaggctgcagcaccaccatgcccagtctcgtcttgctcttgatgatgaatttcgtgatgatggtaattgccacctttcctgaattcacatacaacggattcagcggcgccaggaacctcctcctcgacggcgccgcttccgtgggagaagatgggatcctctccctgacgaatggcagcagcggcgcccagcagcaggggcgctgcttctatccctaccctattcccctgcagtacaccggtggtgagacccgctccttcacctccaccttcgtcttcgccgtcacatgctccggctccggcagctgcggggatgggatgacatttgtcatctcctcgaccgccgacttcccggccgcctcttcgccggcgtacctgggccttgccaacccgcacgatgcatcgtcaaaccctttcgtcgccatagagctcgacaccgtcgcagacccggacgcgacgaacggcaaccatgtcgccattgatttcaacagcctgacgtccaacttgtctagacctgcagggtacatctacgacgacgaaggagccgtcggcaactctagctttcaggcgctcaagctttccagcggcgacccgatgcaggcgtgggtgagctacgacgccggagcagcccggctcgacgtcacgcttgcgctcgtccccatgttcatgccctccgtgccgctactgtcttacaacgtcagcctctcgcgattgctgtcggcggccgacgattctcccatggcgaccaaagcatatttcggcttcaccgcttcgacgggtggtgatcccggtggcgctggcgccacccatcaagttcttggctggagctttagcaacggtggattgccactcgactactcgctgctgcccctgaaacgagctcatcagggtcaggattatagcagaagtagacgagccaacaggaagagcttcgtcacatggttgcctgcagctgcatcagtgctcgccgtgcttgcagccatggcagcgtgtcttgtgctccggtggtgctggaagaagaacgcccggagtcgggaaaactgggaagcagagctgggacctcgccgcttcgcttaccgagacctccgccgcgccaccgacgggttcaagcatctgctggggaagggtggctttggccgcgtctacggaggcgttctctccgcgtccggcatgcccatcgccgtcaagcgtgtctcgtctgagtccaggcatggtatgacgcaattcacggccgagatcatcatcctcggccgcctccgccaccgcaacctcgttcgcctcctcggctactgccgccacaaggaggagctgctgctggtctacgagcacatgcccaacggcagcctagataagtacttgcacgagcacacgtactccagcaactgcaggacgctgggttggcctcagaggcttcacgtcatcaagtgcgtcgcggcggggctgctctacctgcacgacgactgggagcaggtcatcgtccaccgcgacgtcaaggccagcaacgtgctcctcgacgccgacatgaacggccgcctgggcgacttcggcctcgcgcggctgcacgaccacggcgccgacgcgcacaccacccacgtcgccggcaccaggggctacctcgccccggagctcaccaggttcggcaaggccaccaaggccaccgacgtgttcgcgttcggcgccttcgtcctcgaggtggcgtgcgggcgccggccgatggggcacaacgcccgcggcgagctgctcgtgctcgtcgagtgggtgcgcgacgcgtgggcggcgggcggcggcggctccgtcgtcgacaccatggacccgaggctggaggagtactccggcgaggaggcggagctggtgctcaagctcgggctgctctgctcgcacccgctccccgccgcgaggcccggtatgcgcctcgtcatgcagtacctcgacggcgacgtgccgctgccggagttctcgccggattatctctgcatcaaagacgtcgaccaggtccaagttggagactactctccctcggtggtcaccacgatcacaggtctgtccggaggaagatgacggccaatttaggcgccaccatgcctcatccttgaccacgctacatacttacatagtaggcaaaagtaatgcatggttcctaaaggtgagatggatgggtagctagtaagttttcttcttcgtttgtgttcaaatgttctttaaagttgttggatttcttacatgagatttgcttcggttcaacaaaaagtatcccgaggtacaggtatctcacgatatcaatcgtttccgatcattgaatctaacaatgcccatcctgtccaactaaatcaaacgatagaaaatgatttagtactgcgaggtaccggtactttttgttggactggagcaaatctcctaacccttacctctacggcggcggccacgacgcccccacggagggggtgcccgacccatactatgcctggagcggcggcggcgtcttacaagcatgtagaggcttgtgaatgataaagtgcttacacacatgtgcgtgcaacggatgaaggctattttaaacttattatttttatatggtttagttaagatgaaattcaccgtgggaattcgtttggatatatatatttttagaaaatcatgagctgcagtttctgtccaagcatctcaagttagcatgcgagtttttttaaacagatttcttatatgactccttttgtatttccaaaaacgaacgaacttaaaaatcgactcaaatatggacatgaatttccacaagcgatccttctgtatttgcaaaagcgaatgaacttaaaaaccgattcaaatacggatatgtattaacacaagcgaacgaacttaagaaccgactcatacacggatgatgtactaaagtactggtaaaaacatcttcaatttttataatagtagagatagagatatgttgtgtgtgcgcgcgcgtatgttgaataaacttgaagctgctgatctgcgagcaatcgcctttggttggttggttgattactgatgagcatgggtactgtagagtgctgatgagcttcaggaaagagctagagagcttaatatacagaaagcccaaacaaacaagacaaacaaagggatggcttacggagagcgctacaaatcgaacgtccgatgaaaggcgaaacatcggacaagttccagcacatgcaaaaaaatgtttcatatgttcataattcgatgagaaaatgtttcgacgagaattgttttagcatgttccatgacttgatcaagaatgtttaattgctctatcgaaaaatgttttaatcacatgcaacattcaagaacacttgttgcaacacacaaaaccagaatattgcaacatcaagaaattattgtaccaatttatgcaacatccaaaagagactgatcgcaacatcaagtaaatattgtgcgcaacatcaaaagaatatggcgtgcaacattcttgcccaactagtcgggcacaccagtctcacctttgtcagcaccagcatctgcttcttcacctgctctgacggagatggtggttgcaagaagctcccaagctgaagccatattcgtgcctctctccccatctctatggtggcctcgccccggatctgtcgatctgatactcgaggtcagggatggctagatctagccggaggaacacccatgttgggagagctgagggtgggagaggaggaagagtacacgagttgaaaaggagaagaacaggaaggcttcctaggagccaagaggtatgcggtggcggcgtctcgacgactgacgatggtggcgtgtggcgagagagagggacggagcgagagagaagaatcggggaattgaagaaggggcagttacaacgaggaggaggagttgtggacttgtggtgcgagaagtggagaaacgtgtggagcgtccgatttttgtggtggtatcgaacgaccgagttaaagcgtttttgatggcttacgcatagtaccaatgggctgcaagatcgaacttgatttacagtccaaacaaaacaaaaaaaaaaggccgtaatttacagcccaaacaagcaaaagaaagaattggtgacggactcggagaaccgaacgtacccgtatacacgcaacgtataaacgtacgtacggtctcgtcgatcgatcggtagatcggcatggctatggcggcgctgcgctctctgtccctgtctctggccaggacgacgacgacgacgactctccgccggcggccaccgccgcgttctctccaccaccaggttcgtttcttttcttctcttcgttcaattctctccctccgatccggccatatatattctcaatccgccatgtctgatatatatgtgttcttgatctcttgttcaatccgtcgtggaactgtatctgtaattctgaatgtataggataataagctcatgatgagcagctggagtacttctcgcaacactactggttgtaagggttgccaagatcgggatcggcttatcgatgaactggaacaagaacggaggcggtttgcgaggatgacgacggtaatcatatatatttatattttactagaaaaaatgcccgtgtgttgcaatgggtaaagacgtttttcactgatatattaagagctgagcaataagttgaaatattaggatcgctatatacattataattgaaaaagttaatgagaattttaacattgggatcacgttaatgagaattttaacattgggatcactatagattataataaaaaaaagttaatgaaaatctttcctgggttgggtcgatagacttccttccttttcagccctaggccagtccgctacctccctttgtttggcctgcttcccttcgacccagccacaagtggagccgaagcacagctcgcacagtctactaccatcttcagccagtctactacctccctccgtttggcctgcttcccttcgacccagccacaagtggagccgtaagcgcaaatctgccacaagtggagctgtagtgtagctcacatagtctactaccatcatcaacctcccgaagatagtcaagtggccgttcggttgccagagcaaatctccccattaaatctgggccgtacggttgccaaagcaaatcagcccataaaatctagtcgaatttttctcgatcacattatggttgagggtttttgatcattcgatcttctctttctgttttttttccaaaatcagagtgtaaaactatttgttcccatcaaatccggtcaaatctttctcgatcatccaaaattggttgagggtttctaatccactcctctttccttttttttccaaaattagtgtaaaactcggaataaaaacgaccatggaagatcgccgtcatcatctgcaactgttaaacggagattaaatccaccgaatcgaaaaggaaaataacggagaaaatgatgagggaggagtggggagtcgatttttgcaatcaaattggaggagaaaacgcacaatcgatatggcggcggcgcagcgctagggttcaaacataagaggtgtgcggcgaatagatcggattaaaaagccagatgaaaaaaccaaaagcgcataggagaaaaaaccgacgacaaaaaaaaattacggaaaaaaccaaaagcgccagggaggcgcgatcttctttttttacctatttgagtcggacttttttctttcctcttttaacatacagcggaaatttaagtagtagagataacataaaattaaaaaatcgactcaaacacggatgacgtaccaaaataccggtttagtacttcatctgtatttctactattataaattattattatctctactattataaaaattgaaaacgtttccgccagaattttagtacttcatccgtatttgaatcgattttaattctatgtttcgtttttaattttatgtttttgtcaaatcattttcttttttcttactatatagtgtccctctaatacgcacgcgacttaattgggtctgctcctgagtccgttttccacacgcgtctttgcgtgccgccgtgattgttttactttcaaaaagaacatgccaattaaaataaagaataatcgaagttgctcggatccatcaattggcttatgttgttgcttctcagcataagcagtctgatgcttatcggcataagcatttccatcagccgtagaaaagagtcgggaatgattggacccactaccaatggctgatgcttattcagcccaataagtgaaccgatgggcttttgctgagaatcagcctcagcaacagcgaaccaatgaggccagctaattatgtccatcatcaattcctatccgacttgtgatcaagctggatgacaaatcgagctcgtgtttgaaagcctaattgtttggcttattcaatcctagaagtcaaattttaaattttagaacttaactttaaattcgactttttggttttttattatactttattttacaacattcgcttttgtgtcgctaagaacatgtatataaaagatttgcacgcacaaatagtcttttatttgataataagtgattcgaataagcacatgaataaatgaaacaatacgatgtgattatttatccattgcaacacatgtacaaattaaattttctctacccgttgcaacgcacgggcatcttttctagtttttataatagtagagaagtgttaattttgatgtttattcatcgtagtttattattattattattattattattattattattattattattattattattattattattattattattattattattattattattattattattattattattattattattatccctttccttgatggaactgtaggataataataagctgggcggcacgacatttgccaagactgaagctcctacagggcggcgctggggcaattattttgaatacgatccacctcagaattttgatgaattggttaaacgatatgaagaacggataagcttcaacaggacggtgataacgggtgctgtttcagcatattgtattgccctcttcattctgtcgtctatgcgcaatgaagtgaaggaaaagcttcgcaatatgtaacatctacgtacgagtagtagttttttaccgcctatccggtgcctacatatttatatatatagtactcatgtctcaatgtgtgtgtattcttaaaaaaaaaaagaacataagacgcgaatattgaa

SEQ ID NO: 8677 - DNA, 29628 bp, Oryza sativa
cgacgacctgggcgtcgtgctgcacgccatgcttgccaagaaggaggagctgaccgcggtcggcaacaacgggtccgatccctgcaagaggctgcggatcggggccgacacgggggcggtggcgtggggacccggcggcgacgcggccgagatggcgcagagcagaggcatcgtgccgttcccgtgctctgctggcggcgctgccatcggagtcgtgctgggtgccgcccatggacgaggacgactactcgtcgctgtccccgtggatgatcctgtcgaccaccaagtccgtcaagtacatcgacacggcgcactacgcggtgccgggcggcgcccgcgtggttgagttggtgaccggcatggagacggcgatggtgcaggaggtgagcaccgtgcccgggctgtcgtacaggctggagttctccgttggggacgccggcgacgggcgctccgggtccctgaccgtgcaggcgtacgcgtgcggagatgagagaggcggccggcgaggaggcgggaggaggagggcggcgctgctggcctgctgctatgccgtgcgacgaggagggcggctgtctgccgaggagaaggccgatgtcggggccaccgccacggcagtccgctccatcgacgggcgcacggccatcgccgcggcgtcgggcggggtagcggccatgggcaaccccaccgccgccccttccgccaccccgtcctccaggggcctgctgctggggcggccggcgaggccgacgcggagctcgtggccgcgcaggaggtggccgtggaggttgcggcaagcgctgcgggtcgtcccgtcatcccgatggctggcgagggagggagaagcggggcacaccgtcgatgtggtggcggcggaggaggaggacgccgggcaccgctccgtggctggatccggccgcggaggaggaggagacgaggaggacaccgacaaccactatggcaacgccgacgaccaccatgctcaccagccgccgcgcgctcgcacgccgcctccgccgcccgccgctcagccctgctcgccgccgcccgttcttgctactcccctgccgcaaagagaagtaaaaaagaagagaaaaaaagaaaggggaaagagagagatgacgtggcacgctgacacgtgggtcccacgctgactcagccgccacgtaaaccaaaaccgtggtcaaaaccaccgaaggatctcggggtgatcggttttgtatagttaagataccccgtgtatctggttttgcggttcgaggacgtattttatcccgatgataagttgagggaccttcggtacactttttccttcaccggccggccacgccggacaagctacaggtgcggcatgggctgtaaagcgcatggagaggcccaactctctaacagttacgaataaattactttgagtttggtcgaagtcggttatagacaaatataataatatttatattactaaattaattttattaaattaataattaaatatgtttttataataaattaatcttaggtcgaaagtattactatttattttataaactttattatacttgaagcagtttgattttaaccaaagttaaaacattttataacttgaaacggagggtgtaatgtatttgttgattatcactggattttcaaagaaaaaggaaatcaattcattattctattatccatcaagaaattaaaacgaaagcagtcagcagcttagtcaaagggaaacgtacaaactaatgtccaatttttgaatcaatccaactcagaaataaccacacacttggcattaatcaaagggaaacaatcagaagcagcagacacagaaaggtagcgaacacaaagagccagccaacaaagccatgcaaagaaattaaacacgcattaaccagcacttaaataaacttaaacagcagatgaagaagccgcagtctcgttgtcggcggcggcggcggcgggcctggagacgatgccggcgtggttgagcagcgcccagagcagcgtgatgagctcgccgccgcgtgggcgtccaggttgtcggacggcgccaggtacaggatgatctccgaccaaaactccgcaagaaccccccacgccttattcccttcctcctcctcctcctgttggttttggaccaacgccaccagttgctccgcgagctgcgcgccattccttaacaccttgtgcctgcagcctgcgctgagcaatcggaccagcttctcgtactccggtggagcacgaccggcggcgagagcacggcgagcgtctgccttgacggccttgtacaggtccttgctccagccatcgtcgtcggggagcagctcgggacagcaggccaccaggtaggcgcagtagcctgacaggtgagtggcaacaaccctgttgctgctgtcagagcttgagcttgcagttgtacttggatttggatacttcacctcaaggatggtggtggcgatgtggcacaccaggaggacgtcggttgtggctgtcacatcctcccagagcagctggctgtcgctgccctgcagatgcagagacgccgtgcatgctttggtcagctgcaggctccccttgctgctcctgagcttggcgacgatggcggacttcacttggtcgggcaccttgacgatcttggttttctccggcagcggcgaccactttgctgttggacgatgcatgtccaggattgagcagaggttgatgttgtccttccatgggttattcaccagcttgcaactgcatcgcaataataagcttcagcatccaattaccaatgatgatcgtcgtcgtcgtcgtcttggcatatcaactggaggagcagcaggagacgaagatgtggtctggtgatgatgatttgttggttgcaggtagcggcagatgacaacaactttggtccagttagagaacaaaagggaagcaatattcctcgcctcggaaagcacaagtagcacacaaagaagaatagctggcactagatcaaatgtgagacttccaaatgtataataatcttcgaatcttttgaagtgcccaaggaaatctctggccccgacatctttgcatggcatagtacaccatagttggaaggagttggagaaattcacgcaagcaagagtggtcgacaaaacggctagacgtaagctgtaagccaaggtgaagactgaggtagagaaggtgaggataggaagccagcaggtgtttgaataaaaggtagggatggatgcatagtaataatcgtgaatgaatgagagctcatctgctataaccttaaacaccctcctgctgctgctgctgccaccatcatgagtactactggtcagcaacaggccttgccaaatgaaattctcgacccaggtaaacttgagctcatcagctgtgtaccttgcgaatcgacaacgtaacagcttgaacaatgcaaatgaaagacaaacatctttcagctgtttgtgtcctgcaggtgtccagcttgtcagagaataattcgtgtactcgtcatccatttgctgccaaacttcatctaagttcaccaagccagcagctcctctctgctgtagattattatcaactacactagtgtaactattgggccctttttgtacattaacagtgtcctctcccataactaaaagtggcggaggaggcacatcatcgccagttacatgcattactgatggtaggacgacgtccttctccttctccttcatgtatccaagcacaagccgaggattccgtccaagagcaaacgattgtcgggccatgaaaaatgcaaccaacttgaaaaccaatttgacaaacataagacacgctgaaaccagcacaaatattctacgaaaatcactcatatcctgtgagatggttttgactgaaaaatcattgccactaccaaggtccgtccccaggaagtagatgaccaggtagcaagtccagattgcatgaataatcaataatgcagatggtgcaatgcttcgtcctaattctctagcatcagttgccactagtgttatggtgttgatagcggcaatctgaacaagcactgtccactgtaagatacaaaacgtgtgtaggagccatctgcaggtcgctgtggttgtaatgggttggatgagaaaggtaacaaaagtactatcagagacaacataggacactataggcatgaagagtgcagcggcaccctggaagaggaagcgagtcaaggggtggtgtcggtagcgcggggcataggctccaatccccacaaccactcccatcaacatggcgttcaccattgacagagagttcactcgccatatctcccatttcgcccgcttctccagcaacctcacctcagcatcagtacagtttctgataagtgaacttgcgcggtccatcgtcgacctccaattccagaggtatgtgtgtgtgtgtgtctatatatatatatatatatatatatatatatatatgaagggtatgaatcaaccgatgaagagttagatttaattgacgaactagccggtttaaaaatagaaatgatggatcagttaaattgtgaacatgattggattagaggaaaaggagattataacattaaatgtgctttttgcatctattacccaagccaagataatagagtaacctgtagtatatgcttaaaacaagcttgtgctgaatgtataaaagcaaataaacaaaaatggagaaaagagatagaattagaatcagatgaaaggatattatctagtagagtacgagttttacaaaacagaataaataaactagaagtagaactagagaacctaaaaattaactataatattaaggcattaccagaaatataaggatattgatgaagcattaagccaagctagaaaaatattaggaataaattattatctagagcctgctgcaaaagaatatattcaaaaatgcaaaaaagctaaaggaaagaagacttcagaaatacccattaagatgactataaaagaagaagggttttttaaaaaacccacatacaaggaatgcttaacaaaaggagtggatccattagatggggaatatattgattggaagataatagaaaaatttgaagaagcctccccacaattaaagaaggaattgaaggaagaaatacttaaagaattaaaacaagaaatggatcagaaatttgagcaaataaaaaaggcagtagatgagaaattagaagtttctttttctgatttggacacaatggatcttggtgaccatgggcaaccagatgaataaattgatataagctaaatatgtttttcaatatatattgataatagaatatcaacaatttgggcgtggaagaagaataaaagaataaaagaaattcagaaagaataaaagaaattcagaagactacccaagaaagaatccagaaggacaccctataaagtataaggggacaatatagggtgcggtgaatgacatatccctgtgaagaataaaactttcggtggaaaggcctcaactttagccagctctcatgaagatacagtagcgaagagataagcaggaggcacaggcgacgccatccctggcctctataaaaggagacgttggccttcactccggggacacacaaccacgaagacaccattcagagcaaagcttccaagcgcgctctcaccctccattccatctttcttagtagtagttcctctagcctaccttgcataatatatattgaagcaaggagttgtaatataaaggtttgtaaagtgagaaaaacttgtttgtatctaccttcggggttcccgaaagggaaaaccgtatgtaagcctatttgcttaatatgaagtaattttctttaagtttccctgtttgtttgctctagataagcgtttatgctagggaccctataggagaaacctctcggttgttctcgtttttagcctgcatcttgcataggcgtctggagaaccagtatccgtagagaagtgttcccctcgggtggaactgcctggggagacggtaaacgcttagctagttcaaatatgactagggatacctgaagatggttgcttaaataggcagataagtgaggcatacggctagtaccgagtaggactttaaaatttctaaatcaagcgccggctgttattggattcgccaccctgcaaagatcctaaaaatttaaagaaaattttcgagtgaacagtaacctgtgaacagtaattctgtactcataatagtgaattcagcactaagaatagtagtgaataataaagtggtatatatatatatatatatatagacacacacacagtggcgaatccaggatagacaaagagggtaggcttgacctccaagtactaagttaataaaaagtaaattgcagtacttacagtagctgttcaacacatacatgatacatgattgaatagaaaagaaagaaataaagaaaaataccttgccaatgcgaagtaattgcttacatcagtcatatgagaaatcagtgataaattgaaggaaaaataacattaactgaaagatttggcctaccattaatcaaaaaatacatgtaattcatttaagaggcaaggatattctatgggtttctaatgcttggaatatatttatgatgattgcatcatcgtcgtcatcatcatttttttttgaatatttctcgctcagtatagcagaccatcaaattcaaatctataagccacccatccgatatcttattgtgcacatctgtcttgaaatgctcgtgcttgaaaatatgcgctccactcaatcaatagattagtttgcagaaattgaatagaataatagaaataaccaatacagccaaataggcagcaaccagcaagaccatgattccatttattcaatgactcaccggacgctagtttatcctgctgctgttggctgctcctcgccgcgacgccgcctgacccgctgatcctgagcctgctgctctgctagtgctagcggctgctgtggtgctgctccgcgcgctgccacggcgcctgctgacgcttccccgcgcggccgctccgcctgcagcctgccggcttccgcgccccgctcgcgcctgcggccgcctacgcttgctcttactcgccaccggacagctagctacgacgctgcagcctgcagctcgaggcctcgagctcttgcgagttgcgactcgcgtcggccgtcggcgtcggccgctcccagtcgccaccagccgccagcccccaccccaaacgcccccaaccctaagtccccacctgacctgtgtgagtgtgtaagtgtgggaagtgggccactggactgggccattactatcgaattgggccaacctagtttatctgcataccgcttcgcttcttctctctcatgtgccctgttcatcttcttcccagcgccgagcacatatcgccatgaactccaggactccggctgatgcttgaggatacctagttgatttttttttgcaaaaattagagggtaggctagaacctaatggagcctacctgctagaatcgccactgtatatatatatatatatggtactcttaattaatgggagtatctagctagagacattaatttttgtaaacaaaatttcaaatataactatagtacaattattctaactacatatattccagttaattataatgtaacttgtatataagtaacttatagtcatgaaacacaagcgcgcgtagtgtgcgcagctggctaccatcgggatcgagttcgaatcccaggtccacaaattgattgtagtttttgttaggttttcgtgtgtctatccggcctacgtaccctgtattcctctgcattttccatggtgccactcacagacataatgcatattgaggctagctagctagagggtagggatctatttatagaatcttcttccagatatacactatatctatttccggtgggagatttgcaataatgatactgtaaacattaatctttgctataatgacactggacccacatttcatagatacagataggcctatttgccatccactcggagtatcaaaacagcgaagccccaatgtttgcagtctcaatattgcaattttcttcggtacaccgttaaactcccaaccacaataagacagttcagttaaatgagtctacaatataatagtcccgagcacaaatgtgtgagtcatgtgccatgatcatattgtatatgagattaattccaatataatcatgtgggtcaatggcttatagagcagatcatgtaaacaaaccctgctattccaccttctgctatacccaggtataaatatgtatgtacatataaattctatagtatatctctattattcatctactgtatttcagcacagtcgttcttggcacctctagtattaattcctcgagttaaattccacatcaatatataattcctcatcacatgcagcacaaatgttttccacattgagttaaataaataccataatatataaatgttgtaagccatataaaagtccaacagttttaactaagagggaaattaaaaaaaacttgcttcctcgaaaaaaaataaaaaaaaaacttgggcaagaaatctagctagcaattccgatcttaattatttgggcaaaagtactatatatatatgtaccaagctcgtgtgcatgcacatcatcacaacatgcaacaattaattaaaaactaacaggtgtgtgtaagtatgtaaaaggtagctggaaccggatcctttaacgtaattcattctacgtcagagggacgttcaaccacggatcgtcgttccttgcgcatccgacggcaaccaccgtttcagtccgtcctcgcctcagaccccacaagtgcgatgtctctgcttgctctctggcccattcgttgatagcggcagcggcgccgcgccggccggccacccggaagctcaggcagccgtgcgctgccgccggcggggaggtcggactggaacgcagtgctaccgccgtccgccggcgaggtcgagggcgaggactctgcaccgcctcggtgtctgctgttggtcccatcgcccagcaactgctgtttctcggaaccatcgccggcgaggttggattggaatcgatccgtagtctatcgaacttgcatcatcaggttgccttttctcatggaagaggcagctagttgaaattcttgctaaggcattcgtgctgtcattggcttgtcccagaaactaccaagtaacctgaagaattaaaatcagagctgaaaccagaactttgccaacagattcatatagaatgcggcatagcaagtctgcaattgcaataaaaaattaccaaaaaagatggtaaaagatggtttttctccttgaagaagagatcaatcgagtgcagatgttaaccaaggaaagaaatctcatggcacgaaccgaagagaagatgagtaatttttctgttctttttgttccccgtgtagctcaccaaggacggttccgagaaacaccgacagcaaacaccgaggcggtgcggagtcctcgccctcgacctcgccggcggacggcggtagcactgtgttccagtccgtcctccccgctggcggcagcacacggctgcctgagcttccgggtggccgaccggcgcggcgccgctgcccctatcaacgaatgggccggagagcaagcagagacatcgcgcttgtggggtctgaggcggggacggactgaaacggtggttgccgtcgaatgcgcaaggaacgacgatccgtggttgaacgtccctctgacgtagaatgaattacgttggaggatccggttccaaggtagctagctagctggtataaaaacaggtctgtaagagtattgagaaatcttacattcctttgagtctcaagtatctcgaggtatttagattttacattaaaatttctactatcttaaggtacttagcatatgatgatattaaaattttatattaaaaaatgtggtatctcccactaccttactctaaggatggtaaaaaaaactgacgccaaactaactaattaaaggaagatgcgtgcatgcaagcttcttaataattattattttttaaaacaagctagaaagaaaagtaatagctagaaatgagagagatcaattacctggtactccctccgttccaaaaaaaggcaaaccctgggtttgcgtgtccaactttgactatccgtcttatatgaaatttttttataattcgtatttttattgttgttaaatgataaaacatgattaatattttatgtgtggcttgtctttttaatttttttcataatttttttaaataagacggacggtcaaatattggacacggaaaccaggtttgtttttttttttgggacggagggagtatatttttatacgatcgaacggatgactgacggcctgatcaaatcgccagctggcccgcagctagaatgaatatataggatcaactaaataattactccgtatcagatagctagcagtagtgcagagcaggtcgctggatatcgtgttaatttgtattatgcgatcgagacaggacaaggattatatatactactccaaggctgtgtttagttcaagcgaaagtttagattttggttaaaattagagatgatgtgactgaaaagttgtgtgtatatgacaggttgatgtgatgaaaaaagtagaaagtttggatgtaaactttggatctaaacacactccaaatgtactactatttacaaattaagatggccccggccccatgaccccatctcatgcatatgcaaatatgccttttgtctttttctttttcttttccttttcctcgtgcttgtcgctcaagagtgttcttctttctcggaaaactatagctacgctacgtactcccccaattcccaattaatcaccatgcatatataattcttttagttatacgtaaataatcatcgtattagttttccttcactaaatctgctcgctatgtgtgcatggacgaagtaaatgtattgatgcatgcatccatgcatatgcatacaaccatttacaacaaacatgcaatatcttttatggtttggtagtggctaggaagtattagggcaagttttatagtggagatgatagtcacccttaatttagttcacatcatcaactcattaattataagaggcaatatatataacaaattacctctagcacacttgccccggtacatcatatattaattttactttatttgtttcctatcaattcattggtctcttgttcttatatctctagaagtttgtggagagattgcctcttgcataagatgtggctccttctctctccttgcatatctcaaccacctcattatgtgagtttatatggcatctagaaataaatgtgtagaggtttatagtacttgcccttagaggatttatatggcatctagaaataaatgtgtagaggtttatagtacttgcccttagaggatggtacatgtattcagttctgttaccaaattaaatgtaatatgggagagctactgatttttcttggttttgtatacattcctataatatgataatcaattggcaatggaaggagtaaatatatgggtaaggtgttttagtgatttattaaattgcatggctctgcttttgtcttgcattgccacaccttttcctttttatttcctctgacacttccctcttttcttaaagagatttggatcgaatatattggatcgcttgcattgcgtatgcgtactcgatctctccttttcattttgggaacatggttctttgcttccgatcatgctgatctatcatgcatattgttgcatactcctttcgtctcataaaaaaataaatgctataaatgaatctggacataatgtatctctagattcatccatttgattttttatgagatggagagagtatattgcacaagaaggaaagaaatgctcctgccagctgcagcagctgacaaataaaggccggccgggcccctattgtctcagaggttaaagacggaaggatgtgctataaggggatcaaagtactctgtctaattctgatccgatcggattttgtttggatgggctgggatcagcagagatcttgggccaattaatccacttgtaaaataaggcccagcttggcttcatgatcactcttcctgtacgttccatgagaattttgtaggaacaaatttttgaattcaaataaaaggattcaaaaaagaaatccaaaattaaggtgtgatttgctgtgcagtcgatcacaccatcgccagagccccgcagctaatggatacaccaagggggtcgacagggggagcttagagatgtgcactaaccatcaacactatcgtcgtatttgctgattgcaagaccgtacgtgctctccggccggccactcgagctcgaccagaccgggtgcccctaacgagcgaccagtccgctcctactagctacctgctgctactgatgctgctgctgctactactactgcttctgctgacatgcgctactactactacaacagtactactacatgtatatatacgtatatatatactttatatacatacctatagtttatatatgtgtatacaaaatatatgcatatgtatatataatttttatgtgtaccagaaaattggcgtataaaaaaatatacatgtatacaaactttgcatacgcgtatataggggtgaaaacggtacggaatatttccggattccgggtaagttttcgaaaacggaattggccagtcgaaatttttcggaaacggaaacgaatacgaaaatattttttcggaaacggaatcgaaaatggtaagagcaatttccgtcggaactcgaaatcgatcggaaactttctgaaaactttctcggaatttccgaagttacaaagtccataatacctcccacttgcccagcccaacccactactggctggccagtggccactaaccagctaaccctagttgacgagagtgagaaccagaggcagtgcatcgcacgcaccacgcaggcacaccgcacgcaaccagacctggcgctgtcggccgccgccgtctcgcgccgtcctccccccgccgtcgctcgccgtccctgcccccggcgtctcgcccctctctgtgcttcaccgtcgccgtccccgccgcctctcgccatccacgccgccgacgtcgatgcccactggtgactcttcctcaccgccaccaacgccgacaacgcctcgccgccccgctgcccgggcatcatccccctgcgtcgccgcccatcccctctctacctggttgggaagcacaagagaaaaaagaagcggagaaagaaaagatatagggagagatagaaaagagatgaggaggaaagagagaaagaaaagaaaagaagataaaataaaaagagagtgggacccacgcctctccctcagcccttgactcaacgttgaccggcttacagtcgggccccattaaaatatttcatttgatatgattgtgttttgtaatgtattgttgattgttaaaacttgagaattgtacctgacaaagtttgaagcttagcttgagggacttttgtattctgataaattttcgttaccgtattcgcgccggttcattttcgctccgttttttgtttcgataatattcgattctgttttcgtatccggagtttttgattccgattctaattctgaaaaaaatatgaaaacaaaaaggtaaagattgtttccgtccgttttcgtaccgttttcacccctacgcatatataaactttacatatgtacatattaaaaaccgagagaaaaaaatataaatacaaactttctatacgtacaaatacaaaacttggtatacatacgaatataaactttgcatacgtacatcttaaaaagaaaaaaaaagaagagaaaccgaaaaaaaccaaaatagaaagagaaaaccgaataaaaaacccggaaaacccctccgcgtgggtaccgtccgccgcccccctctgcgcgcgacacgtgttcaatcacgcgggagggcgcgcgtgactggtcaccgattagctttttgtgacaagaccagccacttcaccgctagctagcgctggctggtggaaaggagattgcggctgcaggctgacaccgcaagtcgccgagacgcacactcgcgataaatacggacgcatcaatccagttcaggaggataagggcaaatccgtcctttagtttctctttattatttggcagaaagcaaatgaaaaacatattaaaaaaattatagaaacggaaggcaactaaaacttttgatggtatatttataaacttgtaaactttcggcgacaccaaactaatttttttatataatatattatagatgtcggtttttaatctagccgacccaagccagagggtgtgggagggagatattccagtgaggagaggagcgtgccttatcatctctatctctatcgcccagtgtcacgcccagaaattaccgaatagaattccaagcagaatgtgcattaaaacccccgtccaggaccggccggggtacacaaacgacaatgttgacatacagatccacgtcttacaaatattataaaagtcttacataaatacagcggaaaaacgaaagataacaggagctaagccttgacttgaactgcagcgggaacaccactccacaggcatcctcgacggcacggacgaagcctactcctcggagaacccgccatcggacacatactcaaactctggggttggggggaaatagagcaagactgagtactatccactgtactcagcaagtcataccggaatagaggtatgatgcagggatttaacaagggatagctatacatgttcatttgcataatactggcatttataaacagaagttggatgcgaaaaactgttgtaataatttaaccaatattaatcatccactgtccaacgctaccccacgttgcaacaggcccaaccatccacctgtactatccaatttcattagactaaactaggataagactaatcacggtgaatctggttgaccgcccataaccgcgggcacggctattcgaatagttttactctgatcagaggtgtacaactgtacccacaagacacagccccacgacacgtttccgtgcgccgacatgtcaccacgacataccggaaagaggccgtgacaggaccgttcgcataaccccctctagccaagcacaccacacctcaggtttcacccccgtccccagcgggcgacgggcagtcccctctcgtgcctaggtgaatccggaagacgcattggccgtcgcagggcccatccaaactccatcacgcccacccttgcctggatgcgtcagctagagaaaagctacactacaagcccagccgttgcccacgctggcttgtggtaagcacgataaattcttccagggtttcccgtgaaccggtccttaattgccatgggtgcgactagcaaaaccatgcacccacagcccaccatgtgattcattttaattaaccaacaccaaaacggtggtactaaaccaacattaccatttgaacctaaagtctatattttaaagagatttccccattgtgtgctagttgaactaagcatggctaagcaattcctagtccaaagtctattcatgttaggacccaagctaacaaaggagcatggtaccaaaatagcatggctgtaacaataggtaaacatcccatagtattattgcaaaacaaatgcagtatttgaaagaaaacattaggacatttgcaatataggatcaacatgatcaagtgacaggcatgacttgccttgctctgctgctggaggaacctcggcgactatctcgaagtacaccggagcgtcggaagagccggaatctaacgacatacaaggcaaacaatgcaaacaggctataagactactgaaacagagaacaaaaccatttttaatggattctacatatttttcttgatttactgagacttgaatgggcttaaatggagctcggatgaattagatatgaattttagaagattcactgtgtttatttctataacaaaaagtccttaaataatttattgcacaataaatcgcagggctgacgtcatcaaggggggcagcgccgacaggcggggcccgcatgtcagtggcgcaaggggagagaggggcgccggcaagtggggcccccgggtcagcggcactaggcggccggtccaccgtggaccggaccacgtgggtggtccaccgccggtccacgggaccgacggcccagatcgacccggggccgatcggacgggcggcggcggcctcgctcggctcggctcggcacaaggccggccgaccggccacggcaagggcggcggcgcgcgcgcgcacgcgttgccggcgacggcaaccggcggcggatgcggcggcgcaaaggcggcgcgaaagcggcggcgctaaagcggcggctaggaaggagagggaggggaatagaggggaggggatgcctcaccgagggtggccggcgcggaggaagacgacgtcgaacggcgacggcgagccacgggaggacgacggcaaccggcggacgagcttcgggatgccctaaggaaggaaaagagatagattagagggagggagatgaaccacggcggccggaatccatggccgaaggcggcggtaggggtagagctcaccggagtgcgaggggatgcgggttccggcgacggacctcgacggaggaggggcggacggggtggagttcggcctcgcgaacccgtcggcggcgacggtgcggtgtggcgacgaccctaacggcggctagcggcggccggagcaacggctaaggcggcggcgggcggaagcatggcgagggagcgatggggagcacgagggagttcggcgagatgggaaaaaagagagagggggtgacggtggagcttaaataggggaggggaatcccggacgtggccggtaggggcgggatttcgccagccaatgtggggagtgggggaggagagagaggcgggattcgaaaatcgaatcccggccatctcgcgcgcgggcgcgggcgagagagagggggagtgggcgcgggaggtgcggcgcatgcgcgggcgtggccgacgtggcccggaggaggcggaggcgtgggcgcggcggcggttgccggcgcggcggcgcgggcgcgaggtgggagacgggtccgacaggtgggccccacctgtcagcgaccccgggtgagaggagggaggcggccggcccgcgcggcttagctgggccttggccttcggccggcccagcgggaggggaggggaggaaggagaatgggccggcggcccattcaaaagaaaagagaaaggaaaataaggaaaaggaaaaagaattttccagggattaaatattgcttatgctccattttaattggttaaatttatttctagggctctgaaaattccactaaaaatcttgttagcgaatttcgacatgtagaactcaagaaaaattccacatgccagtttcgattattatttgcattaatttattagggttttctcttgatttgcaccggcattttcttagggtcatttataaattcaattttaggcttgggaggagaacttcagggtgtgacaaacctaccccccttaaacggaatctcggccccgagattcggaggagttggcgaagaggtgcggatgggcgactttcaactcatcttcccttttccaagttgcttcctcctctgaatggtgactccactgaacacggcagaacctggtgaccttgtttctagttcttctttcactggtcttaagaatgcgaattggcttctccacgtaggtcagatcctcctggatatcgatgtgctccgaattggcctgttcttcaggtaccctcaaacacttctttaattgggatacgtggaacacatcatggatgccgatcatattggaaggaagctctagctgataagcaacttctccccttcgttccaagattttgtagggtcccacgaagcgtggtgccaacttgcctttggtttgaaaacggtgcactccccggagcggagtaacacgaagatacacgtaatcccctgcttcaaaagtgagctcccttcggcggttatccgcgtagctcttctgtcgagactgggcaattctcaacctttccctgatggttatgactttctcttctgcctccgctaacacctctgttccaaacagttgacgctcgcctgtctgatcccagaagagaggtgtgcgacacttccggccatataaagcttcaaacggtgccatctgtagactggcttggtagctgttgttgtacgagaattccgcatatggcaagcttttgtcccaagctccaccaaagtcaagagcgcaagctctcaacatatcttccaaaatttgactgactcgctcggtctgaccatctgtctacggatggttggcggtactgaaatttaaacgggtccccaattcttcctgcagtttctgccaaaattttgaggtgaactgactccctcgatcagatacaatcttcttgggtaccccatgcaaacacatgatccttgccaggtacaactctgccaatttctttcccgtataggtggtatgcactggtatgaagtgagctaccttagtgagtcggtccacgactacccagattgaatcgtgacccgatgatgtccggggcagtcttgttataaaatccattccaatttcctcccatttccattccgggattttaagaggttggagtaagcctgctggcctttggtgctctgccttcactcgctggcaaacatcgcagagtgcgacaaattcaactatttctcttctcatgctgacccaccaaagcttttctttgaggtcttggtacattttggtgctgcctgggtgaatggaatactgtgtctgatgagcctcggtgagtatcatatccttcagttctttgtcgtcaggtacgcacaatctttcccccatccagattgtgccatgctcatcctcaaggaaatctcgagcttttccgactctcatgttctttttcagttctgctatttcaggatcatttacttgagcggctctaacttgatcgacgagcgtaggccgtgtttctagagcggctacgaacccctgttcaacaattcccacgttgagacgctcaaacaactgctgcaattcctcacacatgccctcgatgcatagggcagtgcagtaacttttcctgcttaatgcatctgccaccacattggctttccctgggtggtagtgaatgctcatgtcatagtctttgattagttccaatcatcttcgttgtcggagatttagatccggttgggtgaagatgtattttagactcttgtgatccgtatatacttcacaacggttgccaatcaggtagtgcctctagatattcaaagcatgaaccactgctgccaattgcagatcatgagttgggtaattcccttcatgtggacgcaactgtcgcgaggcatacgcaaccactctgccttcctgcattaaaacacatccaagcccgtggcgggatgcgtcgcaatagacttggaagtctttcatctggtcgggcagaatcaaaactggtgcggatactaatttctttttgagctcctcaaaactcttatcgcactcagctgtccatttaaacttctcatctttcttaagtaactgagtcatgggtcgggcgatcctggagaagttttcgatgaatcggcggtaataacccgcaagtccaagaaaactccgaatctgcgacacggtcttcggtggggtccatttggtaactgactccacattagatggatcaactgctacgccctgagctgtaataacatggcccagaaatttgacttccgtcaaccagaagtcacacttgctaaacttggcgtataactcgtgctccttcaacttctcgagtaccaaacggagatgctgctcatgttcttcttcggactttgaatagataagtatgtcgtcgatgaaaaccacaacaaacttgtcgagaaattccatgaacactttgttcatcagattcatgaagaatgcgggtgcgttggtaagtccgaaagacataaccgtgcactcatacagcccgtaccgagtggtgaaggtcgtctttggaatatcctcttcccgaattcttagctagtggtagcctgatcgcaggtctatcttagaaaacaccttagctcccttcagttgatcgaacaagtcatcgatccgtggtaaaggatatttattcttgattgtgacctcgttgagtgcgcgataatcgacgcacatcctcttcgtcttatcctttttctccacaaaaatgactggagcaccccaaggtgaagtactcgttcgaatgcaccatttctgcagttgctcatcaacctgcttcttgacctctgccagttcattggctgccatcctctacggtctcttgtagattggagtggttcccggtgccaaatcaatccagaattcaatctctctcttgggtggcatggtagtgaggtcttcgggaaacacttttgggtactcgccggctatggggatttcatccaatttcctcgaattcttctccacagtgaccactgggatttccgcctcaatctaattcaaggagaccccttgctttggtgagactagagatttgaacactacggtttctcccttctcgttggtcaaggcgactgtgcgattcgcacaatcaatgactcccttgaacttggtcagtcaatccatcccaagaatgacatctaggtctttggagttaagaagaatgaggttggctagaaatggtgatatttgaatttctattagcactgaagggctaaaattgaccgaggttgaactatttcccggggtatgaaccctcattggtgtactaagctcttctttccttaacccattcatccccacaaacttctttgaaatgaacgaatgcgttgcaccagaatcaaaaagtactgttgcagggattgagttaacaggaaacgtacccagtacgacctctggtgctgcttgcgcctcctctgcagacgcgtggttgacacgagcctggacgaaccttggcccggcacgcctaggctttgggcatttgtcggcgaagtgaccaagctcaccacagttgaagcaggaccctggctttgttctggtctccttcttggcttgcgcgggcggagctgactgtgctggtgccactagtgggcgtggagctacaccgcggtggggctgacctccatggtggttctgactaccactggcgccctggtgaaagttgcttgagttgaacgggcggtgctggcggacgatcatggtggtaggtccaccctgctgtccgggagtgaagcgcggtcgctgatggtttccttggctggaccgaaactgtgccgcctttctcttcctgtccattttgttgcgctgatcctcctgacggattgccttgtcaaccagcctttcaaagtcggcgtagtctccagatatcaactggttggttagctcatcatccagacctgctaggaatttctcctgcttctaggcgtcagtgcggacatcctccggtgcatatcgcgcgaggcgattgaactcatggagatactctgtcactgtcctgttgctctgatggagtgcccggaattccctcttcttttgtgccacgaccccgtctggcacctgcgccttcctgaagctgcgacagaactttgcccaagtgacttccgtgcctggcggacgtgtggccatgtggttgtcccaccgagctgacgcgggaccttggagctggtgtgtggcgaaagcgaccttctcctgatcattgcactgcaggagattcagcttcttctctatggcatggacccagtcatttgcctccatggggttggtggtgctggagaaagtgggtggcctgacacgtagaaattctggcagtttggattgagggggagggggaccaaactgctggtgatgctgttcggcgtgctgttgcatcctctggtgcatctgttggtgctgctgctgcatctgttgcatcatggctgccatcatctgagtctgatgtgccatcacttgggccagcgtcggattctcgggaagtggtggcggactattgtcggaatcactgttggggtgcacaccatcagtgcgctcttcgccgttgctgccctcgcctgttgtgcgggtgccattcctggtgtagaccatctagaggaagagcagacggggaaacggagaaaaacagatactcaggaactaagctttattatatagaaatttaaactgcaattgttctgatctgaattaaaacacttaaacagcaagcaaccatccttattaagacagccatatcataggcacatgatatcgaccgtcgactgaccccaagcgaacagacctacacacacaaactagcagacagaaactaagcagtcgataaactaagggaaatcgagcctaatgctcggaacggctcctgcggtcggtggagtcgaaggcgtcctcctgctcgtcaccaggtccctctgagcgactcctggagcctggcagatatgtctcgccgctgcccggctctgagccactggaactgctgctgctgcggtcgcggctgccactgggagtagctggcaaccaacccccattgccactggcggggcccctgacggctgatgcaggcgcgaaggagagagcggatgccggagctgacacgggaacaggagctggagctgctggagctgcgggtggagctggaggagctgcgggagctgctgacggaggtgggtacctgggcgcaagctggatgcgcatgggtgccgttgtcgacttgcggggcgtagtgcggatccggactcctcttggcgtgggtagcccctttaactgagcattctccctcttcaggcgcgctatctcgtccttcagtgcgatgatcctcacgagcttcccatcattcaaggccttggacgccttgtgcaggtccgagtgcatcctgtccatccccctcatcacagcgcacatgtgaacaaaggtggtgtcgttcttgccggctgtcggacggaaagaactgacatcgctgccgctggctcgacgagggtggatgcggtacgccgtgtcgtggaagatgtagttgtggcgctcccgtactctggccatcatcaggtatgctgcctcctgacatgcgtgatctgctgtgcctccagacgcctcaaccaccatgttagcgaggcaagtacccacatagccatggacctccaggcggacacggtgaggaagctcgccactgagcggtggaacagttgtgtactctggcgcgttggggtagcccaccaccagtgtcatgcgtgccaattctgccacgaaatcatccatgccttctccgcggtggttgggtgggtgctcggccatctagagaagacaaaggagtaggatcaatgcatgctcaaatccaaattaaataaagcaataaaggactcaaataagagaatcgaataagagcgaaattttatgcagagatcattttgcatgagagcgaataaataagacagacttacatcgcgataaagtaatgaggaaattagatacatactaataataactataaaagcataaataccttacaacccatattcctgagctaggacctaatgcacttcccccatcaaatcccaactgactgtcgaaaatgtctcaaatatttttactaaaaccctagactgacttgttttgacaaatcttactcaaacgagcgaccaagattttttcccttgaaccacaagaacagatcccgaattttcccggaacaaattcaattgcaaagaacttatgcaatgaaaaggattcagagggctcctaagtttccatttggcttgtcctacggtcaaggtcggctctgataccaacttgtcacgcctagaaattcccgaatagaattccaagcagaatgtgcattaaaaccccagtccaggaccggccggggtacacaaacaacaatgttgacatacagatccacgtcttacaaacattataaaagtcttacataaatgcaacggaaaaacgaaagataacaggagctaagccttgacttgaactgcagcgggaacaccactccacaggcatcctcgacggcacggacgaagcctactcctcggagaacccgccatcggacacatactcaaactctggggttggggggaaatagagcaagactgagtactatccactgtactcagcaagtcataccggaatagaggtatgatgcagggatttaacaagggatagctatacatgttcatttgcataatactggcatttataaacagaagttggatgcgaaaaactgttgtaataatttaaccaatattaatcatccactgtccaacgctaccccacgttgcaacaggcccaaccatccacctgtactatccaatttcattagactaaactaggataagactaatcacggtgaatctggttgaccgcccataaccgcgggcacggctattcgaatagttttactctgatcagaggtgtacaactgtacccacaagacacagccccacgacacgtttccgtgcgccgacatgtcaccacgacataccggaaagaggccgtgacaggaccgttcgcataaccccctctagccaagcacaccacacctcaggtttcacccccgtccccagcgggcgacgggcagtcccctctcgtgcctaggtgaatccggaagacgcattggccgtcgcagggcccatccaaactccatcacgcccacccttgcctggatgcgtcaactagagaaaagctacactacaagcccagccgttgcccacgctggcttgtggtaagcacgataaattcttccagggtttcccgtgaaccggtccttaattgccatgggtgcgactagcaaaaccatgcacccacagcccaccatgtgattcattttaattaaccaataccaaaacggtggtactaaaccaacattaccatttgaacctaaagtctatattttaaagagatttccccattgtgtgctagttgaactaagcatggctaagcaatacctagtccaaagtctattcatgttaggacccaagctaacaaaggagcatggtaccaaaatagcatggctgtaacaataggtaaacatcccatagtattattgcaaaacaaatgcaatatttgaaagaaaacattaggacatttgcaatataggatcaacatgatcaagtgacaggcatgacttgccttgctctgctgctggaggaacctcggcgactatctcgaagtacaccggagcgtcggaagagccggaatctaacgacatacaaggcaaacaatgcaaacaggctataagactactgaaacagagaacaaaaccatttttaatggattctacatatttttcttgatttactgagacttgaatgggcttaaatggagctcggatgaattagatatgaattttagaagattcactgtgtttatttctataacaaaaagtccttaaataatttattgcgcaataaatcccagggctgacgtcatcaagggggggcggcgccgacaggcggggaccgcatgtcagtggcgcaaggggagagaggggcgccggcaagtggggcccccgggtcagcggcactaggcggccggtccaccgtggaccgggaccacgtgggtggtccaccgccggtccacgggaccgacggcccagatcgacccggggccgatcggacgggcggcggcggcctcgttcggctcggctcggcacaaggccggccgaccggccacggcaagggcggcggcgcgcgcgcgcacgcgttgccggcgacggcaaccggcggcggaggcggcggcgcaaaggcggcgcgaaggcggcggcgctaaagcggcggctaggaaggagagggaggggaatagaggggaggggatgcctcaccgagggtggccggcgcggaggaagacgacgtcgaacggcgacggcgagccacgggaggacgacggcaaccggcggacgagcttcgggatgccctaaggaaggaagagagatagattagagggagggagatgaaccacggcggccggaatccatggccgaaggcggcggtaggggtagagctcaccggagtgcgaggggatgcgggttccggcgacggacctcgacggaggaggggcggacggggtggagttcggcctcgcgaacccgtcggcggcgacggtgcggtgtggcgacgaccctaacggcggctagcggcggccggagcaacggctaaggcggcggcgggcggaagcatggcgagggagcgatggggagcacgagggagttcggcgagatgggaaaaaagagagagggggtgacggtggagcttaaataggggaggggaatcccggacgtggccggtaggggcgggatttcgccagccaatgtggggagtgggggaggagagagaggcgggattcgaaaatcgaatcccggccatctcgcgcgcgggcgcgggcgagagaaagggggagtgtgcgcggaaggtgcggcgcatgcgcgggcgtggccgacgtggcccggagaggcgaaggcgtgggcgcggcggcggttgccggcgcggcggcgcgggcgcgaggtgggagacgggtccgacaggtgggccccacctgtcagcgaccccgggtgagaggagggaggcggccggcccgcgcggcttagctgggccttggccttcggccggcccagcgggaggggaggggaggaaggagaatgggccggcggcccattcaaaagaaaagagaaaggaaaataaggaaaaggaaaaagaattttccagggattaaatattgcttatgctccattttaattggttaaatttatttctagggctctgaaaattccactaaaaatcttgttagcgaatttcgacatgtagaactcaagaaaaattccacatgccagtttcgattattatttgcattaatttattagggttttctcttgatttgcaccggcattttcttagggtcatttataaattcaattttaggcttgggaggagaacttcagggtgtgacaaacctaccccccttaaacggaatctcggccccgagattcggaggagttggcgaagaggtgcggatgggcgactttcaactcatcttcccttttccaagttgcttcctcctctgaatggtgactccactgaacacggcagaacctggtgaccttgtttctagttcttctttcactggtcttaagaatgcgaattggcttctccacgtaggtcagatcctcctggatatcgatgtgctccgaattggcctgttcttcaggtaccctcaaacacttctttaattgggatacgtggaacacatcatggatgccgatcatattggaaggaagctctagctgataagcaacttctccccttcgttccaagattttgtagggtcccacgaagcgtggtgccaacttgcctttggtttgaaaacggtgcactccccggagcggagtaacacgaagatacacgtaatcccctgcttcaaaagtgagctcccttcggcggttatccgcgtagctcttctgtcgagactgggcaattctcaacctttccctgatggttatgactttctcttctgcctccgctaacacctctgttccaaacagttgacgctcgcctgtctgatcccagaagagaggtgtgcgacacttccggccatataaagcttcaaacggtgccatctgtagactggcttggtagctgttgttgtacgagaattccgcatatggcaagcttttgtcccaagctccaccaaagtcaagagcgcaagctctcaacatatcttccaaaatttgactgactcgctcggtctgaccatctgtctacggatggttggcggtactgaaatttaaacgggtccccaattcttcctgcagtttctgccaaaattttgaggtgaactgactccctcgatcagatacaatcttcttgggtaccccatgcaaacacatgatccttgccaggtacaactctgccaatttctttcccgtataggtggtatgcactggtatgaagtgagctaccttagtgagtcggtccacgactacccagattgaatcgtgacccgatgatgtccggggcagtcttgttataaaatccattccaatttcctcccatttccattccgggattttaagaggttggagtaagcctgctggcctttggtgctctgccttcactcgctggcaaacatcgcagagtgcgacaaattcaactatttctcttctcatgctgacccaccaaagcttttctttgaggtcttggtacattttggtgctgcctgggtgaatggaatactgtgtctgatgagcctcggtgagtatcatatccttcagttctttgtcgtcaggtacgcacaatctttcccccatccagattgtgccatgctcatcctcaaggaaatctcgagcttttccgactctcatgttctttttcagttctgctatttcaggatcatttacttgagcggctctaacttgatcgacgagcgtaggccgtgtttctagagcggctacgaacccctgttcaacaattcccacgttgagacgctcaaacaactgctgcaattcctcacacatgccctcgatgcatagggcagtgcagtaacttttcctgcttaatgcatctgccaccacattggctttccctgggtggtagtgaatgctcatgtcatagtctttgattagttccaatcatcttcgttgtcggagatttagatccggttgggtgaagatgtattttagactcttgtgatccgtatatacttcacaacggttgccaatcaggtagtgcctctagatattcaaagcatgaaccactgctgccaattgcagatcatgagttgggtaattcccttcatgtggacgcaactgtcgcgaggcatacgcaaccactctgccttcctgcattaaaacacatccaagcccgtggcgggatgcgtcgcaatagacttggaagtctttcatctggtcgggcagaatcaaaactggtgcggatactaatttctttttgagctcctcaaaactcttatcgcactcagctgtccatttaaacttctcatctttcttaagtaactgagtcatgggtcgggcgatcctggagaagttttcgatgaatcggcggtaataacccgcaagtccaagaaaactccgaatctgcgacacggtcttcggtggggtccatttggtaactgactccacattagatggatcaactgctacgccctgagctgtaataacatggcccagaaatttgacttccgtcaaccagaagtcacacttgctaaacttggcgtataactcgtgctccttcaacttctcgagtaccaaacggagatgctgctcatgttcttcttcggactttgaatagataagtatgtcgtcgatgaaaaccacaacaaacttgtcgagaaattccatgaacactttgttcatcagattcatgaagaatgcgggtgcgttggtaagtccgaaagacataaccgtgcactcatacagcccgtaccgagtggtgaaggtcgtctttggaatatcctcttcccgaattcttagctagtggtagcctgatcgcaggtctatcttagaaaacaccttagctcccttcagttgatcgaacaagtcatcgatccgtggtaaaggatatttattcttgattgtgacctcggtgagtgcgcgata

SEQ ID NO: 8678 - DNA, 24855 bp, Oryza sativa
tagattctgcaatgtgctacatgaggatgatgtaagatgaaccaaaaacctttatcttgctttagatttgctgttattttgtaccttgcactttgtttttgtcatactcaggtcgcggtttcagttgtgacatgaactgcatttttttttcagatcatgagtgtagtaagaaaattaagcccggtttcacaacatgttaagtacttcttgcagatacatgttcactttttttctcaaacaaaataattgtgcattactcgaataaaaatgaggatacaagacattgcaatgatgcaagaggatcatgctcacaaaacaaacttcatgagtttgaacctcaagacagcagtgcatgtactactgctattacatagaagacatgtattctgttgcctcagagaggcctaactaagaatcttaaacaacgacactttaattttgccccaaagaggcctgattaagtagtttaaaaaaactaattcagttccttggtgccctgcaatagcattagcatatcccccaccggaagaaaactctggcagcatatcatagaaccaccaagtgcttgaggaaggctgtaaccatcagcaacttgacctataaatttccatcgatagtgtccaattcagcaagccagtcgatgtcagccaaaaactggtcatcaataggaggagaacacaatggttcagcagtagcaatgccatcatcgctgacatcagccaacaactccaaaaggaaactgtcgctgaaggttggggtatggactgcattgtcattttgaggttgctctacgggagtgcatgcttgcacttcagcgggtggctgatccccaaaacgcatttgccattgcgtcagcaggggaacccgccgatgattgattagtaagtggctgttgccccaatggagcatgcattggaggaggtgccactgtgttctgcggcggtgatactgggggtaattgttgggatggcactaactctggagaaggaaacagtggtggccgtagcggaaatatctgagaccatggggagcccggcactggaggcggaggtatcatcggaactcctgatgtccctccaggaagtaatggagtgaatggacggtgtgaggccaagaagcgagaacacgaggctcggggaaaaaaattttggggttttgggggccccccccaccaaaaacgggggcccaaaccttttttggaaattcccccaaccccaaatttttgggcaggctttgctgcccacgacgtaggggaggcagccgcttcttgaattcttgctggagcggcaagagtacatctaaaagttcacgcatatcatcgtggctgagatcctctagcctggagaatagatgcttggccatacccatacctaagctctcttcttgggcctccttgaagcgctggattgattcttcagtcttcttgtccttctcttcttcttcattctctagctggaccagctcactttgcattgacgtaagcttggccttcagttgttcatcggcaaatggctctgcctcagatacaaaagcatcgacaacaggtttcaccgatggtgccccaaagaattgtgcctgttgtaaataatgcaataatataaccaaatatttcaaacgaattccatttaacattacaataataataatacaattcaaggtacagcatgatgacatattcataagcatagtgggacaacagtaccttattgctgtcatgtaggcaaattgcgacgcttgcatcagtgagaagggagaggtcatttgcaagcttgaacagcccatcacgcctcttgctgagggtgaggctgcgatctctatcctcttcgatgtacctcacgcctttccttctacccctcctcaccatacttgactagtaaatagagagagaatactgtatagtatacggtgtagcttgctggctacatatatatagcgagaagggcatcctcaaatagaaatcaaattaatacgataccaacaatatctaattatagttttatggtgagagacatttttggatgttgaatggcctaaaaacgaaagcgattaactacataccatgtagctaggttgatttatatggtatgaaatgcatcctccaatggataatgggaactaccgcgtgtaagttgcaaatagttcctacaaatctacagcgagaaagccattttccaatggaggatgggaactactaatcgattatagcttgttggagacctattttgagaaaaccatactccagtggagaatggaaattgctatgtttgcaaatagcttagtggagatgtatgaggggaagacattcgcaagggagaacgagaattgcaattttattgctgcaaatagcttgctaaaatctatgagaaaaccatactccaatgagattggatactactatgtgaatgctatagaaaacttcctatagatcacatttaccaggaaatgtgctccaatgattgaaaaagaagtttcaatccttggaaattgatgcctaaattctgtctcataaatgtcctggaatggagaatgaaatccactaagctataactgcaaatagctttgcagagatctccgtttagcaggtatcctcaacaattggataatagatggactactattagtattaagtgattactgcaaatagttttatagagatctacgtttagcaacaaaggtatcctcagtcggataatagatactattaaatgattactactgcaaatagttttatagagatctgtgtcgagcaaaaatgtgctcctttgatcgatagaagtgataggcaccttatatagaaggaagtaagggttgtacatatcaagatgcttacgttttatttgtttggtggataaacactctcataaaagctccacacaatatcactgacaggtggtacatccttcacattggcatggtgagctccattgtaagtaccagttacgaagtctttttgcacacaacactttgtctttagcatggtaacataattccaattcatcgaagtgtccacaaatgcgtaattctaccaatacatgctgatgagagtacaacttttggacattcaaatatttgcagataatccacacatgccaaaggaaagaaaaagaaaagcaacagggaaaaatagggataagttatttgattcataggttgaagagtagcttttatgtattattctaaataaatggattgagattaagtgtctggcattaattaattgaatgtctattggcagtgagtagaataaaacttgtattagatgcaaaaaattccttggggtctctgcctagatcatcccttgatgtatcagcgtgtataaatcgtttgatcattgaataataaattatatggtgtatgtttaagcaacagtgacagaaggtagaagacagattgttgttggaaagataagatttctgccttgatttccttctctggtattcctaaagaaaaaagaacatacttgctcagatccagactaatatagtagaaaatgccaccttgttgcaggaccctattgtgcaaacctaataatgctaggttagtgatccttgatttgaattatgatatatgtttgcttctaattggctgtggaagttggagaattctgatccagactagtatagtaaaaaaatgccaccttgttgctggaccctattgtgcaaacctaataatgctaggttagtgttcgttgatttgaatcttatgatatacgtctgctttctaattggctgtggaagttggagaattctgaaggacctcgacaagagatgataagtatgcaggcaaggtccactccattgatcactgcaaatataaagcttctgattctcgttttatcttgtttggtggctgttaaggatgtgtttttgttcttttgtaaaaaggtaactaaccggtaatgatctgcataggcatttcttggaagcagacaatttccttaacacttaagttaattttgacgggttaactttgggttttttggtgatctgaaaaagcaacagtgctgcttgttttcggaaagcgttgctcactggtctcactgagattgtgttcaaatgtgctattgtattgagttttggcttcccttgcagaaagaagaacgtcgtgtggaacttcaagtgggattacggtgagcgagcgggaagccactcctgggaggcagtctgtgcatttaactggaatggtttttccttttggagttgctgaatgctgattgttgacttctagaaaggtaccaaattggcaaatttggctctccatctctccacagaattccctctccatattccagtgcactccaacagtctctccatatcccaacggctagttcgctctccatattctaacacactccaacagactctccatattccactctccatatcccaacggctagttcgctctccatattccaacacactccaacagactccatattacaacagctagttcccaacagctattttgcaacactatatataggctccttctctacctctctaccaggctaccacaacattcttcttccttgtttgcttcttcacctccacaccacaaatgaatcactttggcttgagcttatccatgcaaattgtgttggagtcgtcgtcttcagatgacgacgatgaattcatggctgcaacaatactcctagtacacgcacactgccaaaccaggagacgacgacgacgacagtgatctgaaggcagaactaggcggaggcgacagagggaggagctggcgctgggtggagccggctatgcgtgggacgaggcggctgagctcaatgaagctcaggaggacacgccaccaagggaagaggcggccctggtaggggtgaggcggcagcagacggaggagccagagctggggggagccggcaatgcgcgggacgaggcagccaagctcaatggagctcaagaaacgcgcctccgaggcggcatgggacctcgagcctcagctcggtgctctgctagaagatggagatgatcatcaggatggagagtcacaggggctgccagatttagccacctgattctctcatttacatttagccagacagatggaatagcaatgcaaaaaaccaatctgttggagcacctgtttttgcatgtttgcttcttcttcttttgttcttttggcatggagaatgagatagcaagtcccttggagatgttcttagtctggctgttgatgcttgtggttagtataggttgtagtgctctgcatatgttctttgtggagaattctggaggatgttgagtagcatagcaatgtctgtccaattgcatcagccatgcactctgttttctactcattgttcaactcctgtcaatgaaatgggtccttgtcgtctgattatgaaagaaacaattggggtccctgcgtatgctctgattccttgctactctggctacatccatccagttctgaagttccattgacatttgacaaataacgagccatctgatcgagtaaactggtcatcaactgcttattttgagaggtcaattcagattttttttttgtttgtagcattgatgtataagtggttcatctcatatcaagatggtttgaataataattactgtcgtaatgaattcgtccgtggtgtcagttctgtacaacaagcatttggcatacaatatttatgtatatatgcttagaaaattttctgttcatattcaaattgatggcatatatagggcctgtttagttggcaaaaaaatttgcccctacatgtcacatcggatatacggacacacatttaaagtattaaacgtagtctaataacaaaacaaattacagattctgccagaaaacttcgagacgaatttatcaagcctaattaatccgtcatcaacaaatgtttattgtagcaccacattatcaaatcctggcgcaattaagcttaaaagattcatctcgcaatttcctgtcgaactatgtaattggtttttttttctacatttaacactatgcatgtgtccaaacattcgatgtgacagcgtgaaaaattttgtttgaaaactaaacaggcccatatttacatgtcgactggtactggtacgacgccaaaaacttgtgtgttttttctccaagtggtcagcaacattgccctgcaagccattttactgggtcaagcaagacaaatgatagaacggtaaatgaacatgaaagaagccagaattactttactttcaaaggaacaaatgaacatcatatacatgtactattgacttggtataatcttcaaaagctcaatgtcaaacaggagagttttatctatcaacccttgattcctcagaacaaaatccagagccctttgtccctgaaaacaatgttatgttggttatttaagaaaattgatcgacataatttgtgcatccatgccaaaaaaaaaaaagaagagaaattaccgagaatgtcgttggttttggacccaacttgttgtagtcattgtctgggtatccaagatctggtggtactattatcctgaaatgcataaatttcatccatgttacatttacatgtcataaatataaactataaagatctacctatattgaaactggttcttcaaaaaagataaaatgactcctgacctcctaactccacctggagccatgtctgatatagcctcctcaaaagctggtatgacctaaatgttaaaaatgcaatttgtcagaaaggcacttgtacagagttacagacagcagctacaagattctcaattgggcagaattgactacatttctatggagttgaaattttgagcatttgtatacgaacaattgaatagttagttttcactaacatggccatgataaaaggaaaatagtatgaaccaaaaaatgatacactagatgctggctagattaaatttgtcattcacctgtcctgatccaatcttaaatttaaagaagtctttatcaccaccctgcaattcatattacagatgtggaatcaatcaaataaaataaataattcaaatcaaatctaaacaaatatctgtgctgcaaagcgttccaatattattgagtgtattcctttctgtagtgtaaactacagtctacaggtggcaatatgtacctcaaaggaaccacctttggtcttgtttcgagcttcaaaaatgcgaccatagtatccaattgtgtagccatcccaatcaaccttaagtgcactcacacaatccaaatctatatcagggttggcataaatcaacaaatgataacactaaagattgaaatatgtataacacatgcaaatatacagattatctatgggtgaacatcaaatgtggtgcttataactcaccactactgtttcccctttctttggagaaggcccatcaccaactctcaagtcctacaatttaccattataattatgaacagaaataaggaacatgtgtgatcatgcctggataatgctacaaaatgtaaatcactccataaaagtatatatatattcaccttgtactgaagacctgattctgtttcagtgtaatctgggtacttcatcttcgtctttccataatccttcccacgaagcgcaggcactgaaattgtgacatgaaagaagcaagacatgattaacagtatgtgctaagagtgattccattctacctaaaaagtaaacagatcactcaatggagtatcgagtgtgataaatgactcactatcagcaaactcagcttttgctgcccccttgtcgaaggagccaatgctgatgctgattgcaggaatcaacagcagtcttcttctatccaacattccacctgtacagaagtaattaacagtgtcttgtaataagcatttaattttggagtcaaaataatccattgatgcttttgcctgctcttcaaaaaaaaaaaatccatcgatgcaatataattattcttgcaacagattctcttcgcttattatttttcttcatccagtaaacatgcatatcatgcttaacatcattgttaatcccaagaaatttatcttctcataactcctcaagactacattgagttctcatattgcatgtacttgggacttggggatgtactattatgttgatgctccaaatgtttggccatttttttttactagtcccaattcagaattgtagtataacacatagtttaattggacaagggaaattaaaatgcatcccgaggcctaaagtggcactatcacaataaccaatggcttcttcaatcctaatcattcatggtttcaagacaagtataacatgagaaaatgcttggaaatgagttcctataagctattgagtgtattggcagcaccacaggactacaaattcccaacaaatttctgcagcagtatttcacactttcaaatgaagaattcttttctttttcccccagactgcgagctgcggccttgaagaaccctagacctctacacgcgacgcgagtttacctggcaccggcgccagaacggtcgtcgatggttgaggcccatggcggcgagcctttgtcagcgaggagggagggagagggtgacgagccgggatggcggcgagcgcgcgcaccaagtccatcggagtcgccggagctcgtcggagtcggaggaggaggaaggcgatggcgccggcgtgtggcgtcgcgtagccgcgagaaggagataggctttgcttgctgctgcctcatgcgtcgcttgggctgggctgggctgataaggcccaattagcccatttcttctctcttttatatgttttttctcttccaaaattttactactccctccgtttcacaatgtaagttattctagcattttctacattcatattaacatcgatatgaatgtagaatagaattacttacattgtgaaatggaggaagtatataggagtactaatgttatctagatttttatagctttgtagtactcttatatgtagttcatcgaaaaaaaattagtgttggctacttccttagccaattagcgcacttatcgaatagtaaattagtgtacgtttataaggatgagtttacgcgtgttatgagcgcatgagaggtttgttctgtgtttcttattaaaaaaatggtaacaagaacaatgcaatgcaagattccctgcaaatataggagagaaacaagttgccccaattaaacatttgctttctccttagtatttgaataatttggtcaaagtacaatcactaaccaggcttgactacaagctcgatcgatcatcttgtcctaatccctgcatcctaatcgccagtcaggtcgatcaggattaattactactcctaatccattgattaatcagctcaaggtcttcaagtttttgcaacggttcacctgtcgccgcattgcatcggctaccggtatcctcaatgcagtagtggtcaaagtatccaactcaactgaaacaaaatctgcaagttaattagcctctgacacagctctgacctataacaagttcacaacgagggtttaaactaatcatgccatcactgatcgaatccttgtaaactgtatgtttgattacatttctctcttcccatttgtaattaatcaaatcgggcgcatgctgcagcagtaaactactcgcacgaggcctgcaagtttgtttgtttttttcagaggtttgcaagttgctgtaaattgcagtgcaagcacactactcgatcggataaaattaatcacatgatctcctggcgtaaagccaagcccagcttggtgattagtggcgtggttagtagtagtttaaattgtacaatagacgagatcagaagagcacaggtggaatcctatgttgttgtactgctcagcttgttgtgtgatgcctgctcagatacagcatacgcagcttaattactgaattattcttcaattgaacgatttgtgctaattgtactcactgatcaacattgccaagcaaagcataagatctttaggccatgtttaaggagcttctggtatggtttcttttagaatctccagctcctcaaatcatctagattgtcttctagattctaaaaatatatgattacataataaaaaataaattagaagtgaaaaaaccatacatattttctcatggatcctagaaatatatgattatataataaaaaaatgaattagaagtgaaaaccttagaatttcagctttggttattcatcagtcgtatttcgaatcatgagctccttcaaacaaaaccttagcttaagacagggcgattacagattaatcacctgacagagtgacagtagtacaattgaacctaacggtagatcatatcaatcatgaacaacacagcgacaaacactgaattgccttcaaaaactaataaaaagcccctagtactactatagctatttaggatgcaactaaggatgcacttttggatgattaaaagtgcaccctttttcaaaacgtcaaactgttgataaagaaaagaagaaggatgctgtgggtctaagctagtactactactgtaatctaatgaagctgaatttgcagacaaaagctcttcctgctggggccaaatgacaaagaaactgaacccaaccactggctatcagcagctaattgccaatcaatttagggttaataatttaaggtgatggcattaaagaaatgattgctagctgcaacaaataattggatagtagaagatgatgtgataaccaacagctatggagcaagcaggagaattagtggccatttgttgctccagctgggagcaatcaggacaggacagagagcaagtcagaggacgtactccctccgtttcaaaatgtttaacaccgttgacttcttagcacatgtttgaccgttcgttttatttaaaaatttttgtaaaatatgtaaaactatatgtgtacatgaaagtatatttaacaataaatcaaatgatatgaaaagaataaataattacttaaattttttgaataagacgaatagtcaaacacgtactaaaaggtcaacggtgtcaaacattttgaaacggaggaaggtcatgcttagctcaattagcttggtattgatgatagtgcaggccccaaatcagcaggctagctagtaatctgaataacacaagatttagactgccatttagaagggcagtctagctcaacagttcaatctgaattacaaaatatcactcccagaatgcatataactttatgtataaaaataatctagataattatatataaaaaaactactcccttcattcctaagtactacttatcaccaagaactattcaagtttgggccacttatctttttttttttgcaaaaagaataataagcacttaaagataccatattatcaaagattattatgtccttagcattagcactaatcttcgttcatcgtagtctaaccattaaaaaattactattattagtcagtcagtccatttcaaaatataacaaccttaatactactactaaataaaacatcacataatataattaatctgaaacatgtccaaattagtcattatctaaaaaaaagtccagattagtagaattagatgatattctattgtgttgctatgtttttttttacagatagagtagtagtttaagttagagcaacgatttttttttaaaaaaagtgactggtatattttacaagttaaattatacattagcgttaattatattgtggaaatcgtggcaatgtggaaaacaacaatcacaggatgcgacagcacacgtaccctcttcctacctgaaaataactgtagcggcacgagcacgagctggtcagtgtagtagtacgtacaggtgggccccacccccttcggttggctctgcaacccaaacaaacagctgggaggtggtccagccagcccagcctacaccaccaccgcagcatgggcatttcgaatttgaaagaaaaaaaaacataataatttcaaaaattttaaatcaaaactagaacaaacccccatccatccagtacagcctgttcccagctgcccccctcctcgtcaccccttcttatcctctctctctacacactctcgctgacaggtggggccagcatacgtcgggccccatgacattgacagtagggtaacgtgagctcgcgggacggatagatgcggctgtacctgtacgcacgcacgggttccttttttttttcttttttcccttttttttctcatcatgtgttgtttggtactggtacgttctgcctctatcccgtgccctgctgtctgcactgcacgacagcaagattatcaaaaagggcaaaagaaaaaaacagagatagcgtactctgatcctttttgtgcaggtcaaatcgacaggctgtttaggtttcgtgattcgtcgagcaggaatttaaaccgcactttccgtatcagccactggcattctgtactccccggtaaaaaaaaacatcagtaacctccgtctaaaaaaagataaaccctgattttcgtgtccaatatttgaccgtccgtcgtatttaaaaaaattataaaaaaaattaaaaagataagtcacgcataaaatattaataatgttttatcatctaacaacaataaaaatacaaattataaaaaaatttcatataagaccgaccgttaaagttagacacagaaactcagggtttgtcttttttttttttttgagacggagagagtatgagtaaaaaatgcagtaaaagaactttctttttttctattgcaactaggagtaatccgttcgtcctataatataataacttttaatacttagaatttgcttaaaatataataatatcttcaccaacattcccttcttaaccaatcataatcctgcactattcatttttcccatataccttcacttctcaataattttatattttacatatttaattttacatattttcttaataatcgtctctaactttaaaattttttatattttgggatcgagggtagaattatttttgtagatggggttccgttatttttacccacgaccgttaacgacttgactccacttcaaatcgcaactaaccacccgagccccgcgggcgcgggagttccacgtactgaggctgacagtggggcccacgaggagacccccgatcccactccacgcacaaatcatcactcaccgacaccgtgggtcccaccgaactcccgccttccctttcctcctcccacgcaaaccctctcctttcttttttccttttccatccacttcacccacggtaaaaactgcaaaaggttgaaaaaaaagaaaaaaattaccgcggagttcgagttatttccggccacagcgatggccccgccgcaaaagcggcccgcaacccggatccggtgcgaccgcgccacacgcatccccacgccaccctaaccacacccacacgcacgaaacctaatagccactgacaggtggggtcacgaaacaccggggcccacatggaagtgagttgggtatgagctggatcgcgtgaaatagtagtagcctcgcgcgggagggggatccaggctggccacggcaatggcgcgcgagtcttataccctatgatccctcgtcaccactccttccacctcccccaccgccatcgccattgccgccgacgaggaagaggagaagcttcgagtggagcgatctcgatggacccgtgcccgttcgtgcgggtgctggtcggcaacctctcgctgaagatgccggtggcgccgcgccccgccggagccggggccggggtgcacccatccacctcgccgtgctactgcaagatccgcctcaacaagctgccgtaccagaccgccgacgcgccgctgctgctgccgccctcgccggaggcatcggcggcgccggcgccagcgccggcgacgggcgcgctcgccgccgcgttccacctctccaaggccgacctcgaccgcctcaccgcgaagccgtcgctgttcgggtcgcgcacggcgaggctgaagatcgtggtgtacgctggccggaggggcaccacgtgcggcgtcggcggcggctccgggaggctgctcgggaaggtggtcatcccgctcgacctcaagggcgcctcggcgaagccggtggtgtaccacagcagctggatctgcatcgggaagcgcgggcgcaagccctcgtcggtgtcggcggcgaacgcgcagctcaacatcacggtgcgcgccgagcccgacccgaggttcgtgttcgagttcgacggcgagccggagtgcagcccgcaggtgctccaggtgcaggggagcatgaagcagcccatgttcacctgcaagttctcctgccgcagcaacagcgacctccgctcccggtaaaatttcttgccctcatggtgttcgatcaaattcccagtcaaatgtcacatcgttctgacgacaatttcatacgattcaggtcaatgccggccgatatggggagcggcgggcgcaactggctgacggcgttcggctccgacagggagcgggcggggaaggagaggaaggggtggtcggtgacggtgcacgacctgtcaggctccccggtggcgctggcatcaatggtgacgccgttcgtggcgtcgccggggacggacagggtgagcaaatccaacccgggggcgtggctggtgctccgcccgggcgacggcacgtggaagccatggggtcgcctggaatgctggcgcgagcgcggcgcgggcgccgccgccggcgacagcctcgggtaccggttcgagctcgtcctccccgacccaaccggcatgggcgtgggcgtgtccgtggcggagtccaccatcccggcgtcgaagggcggccggttcgcgatcgacctgacggcaacgcaacagttcgggcggagcgggtcgccggcgtgcagcccgtgcgggagcggcgactacgggatgtggccgttcggcagctgccgcgggttcgtgatgtcggcggcggtgcagggggaggggaaatgcagccggccggcggtggaggtgggcgtgcagaacgtcgggtgcgcggaggacgcggcggcgttcgtggcgctcgccgccgccgtcgacctgagcatggacgcgtgccggctcttctcccaccgcctccgccgcgagctctcggcgtcgcgctccgacctgctccggtgaggcacacgaggcggcggtgaatcgatcgatcgatcggaatcgggaacaacattgtacagctagcgctagcgttcgtcgtcgtcgttttctggtctctgtcgtttttgttgggtgatcagattgtgttgtgttttttattttgtttttgaaatcactactcgtgatttttttgtggtttttttgggtggtgaaatggtgatgagggggtttgtaattttggtagacttctaggtgctttttaaagtctagaagcagaggaggaagcagaagaagaagaagagcaagttcgggatcatgatgaatgaatgaacaagttataaaaacttttcgtgtctattatgttttaaatttcaaattcggagtttattttggccaaatcggtcccggcagtcaaaaaggtgtgtgggttgttgttggaacttggaagggaagagagaggaactcgcgctctcaccagctggagtggagtggagtggagtagagtaggaagaagacgaagctgaggagcccgaagtgggccagccgagctggaaaagggtgattgggctgtggggtccacggccacatgggatgtctcgttggttgctttgctttggtcatgctgcacaggccgggcccacccggcgggttgtactcttcctatctgtctgagtatgcggggtgggtcccactggctcgtgggtggggcccagcgggtggcagagagagcggagagtggagtgaagctgtgtgctgctgctgcgaagtgggtggttgggatcggtgccgtcgcgccgcgcgtagctagcgcacgccatgcgcccatgctcatcgcaactttacaagccacaactccagccttcaagatccaagtatgcagggcaagaaaaaaaatacgtcatccatcctaaaatatataagcacttttagcaataaatccaaacaattatggcccattcgaatccactgcaaggagtggatgaaattgtagattaaaatggcacgcttttcaaactgctaaacggtgcgtttcgtgtgaaaactttctatatgaaagttgttctaaaatatcagattaatccatttttcaagtttgtagtaattaaaactcaattaatcacatattattaccacctcgttttacgtgaaacacttaatctttatatttattttcatcttcatgagattcaaacaccactatatatgtgtctaaatttatagctaaaagttattatattttgagacaaaagtagtattaccgtctccgtcccacgtaacctaagatcgaatgccatttaacctataaagacctttatgtatactactatgaaaaggtattaatggtggtggtggctcaccattattatttactttgacaaattgttctactatatattttctgatattacacgataaactaatatttgttttaatcgaatgagtactatgtattcaaataagcaaacaagtaatactagcatattttataaaaacacattattattattattattattattattattattattattattattattattattattattattattattattattattattattattattattattattattattattattattattattattacccatagaaatatgctaaagagctctagtacaatttctttcccacaactgctggtagcagtacatggaccagcagaaaaggaattccggtacaaatgtcttcttgatttaaacgactgacgcctccattttggaaaataaatcgaatgtgattggaattgaattgaagcaaagcaagagggtcaggcccagctgttgttcagcagctttcagccagccagacatgagacaaccctcccaaatccaaccaaacatagcttaattcttcctctacctatctcttgtctcgccttcttctcctaaacaaggatccaaatcatgccagctcaaccctcccttgattcatcaattcccttacctatatagctagctatagccaacactctgtctcgtcatcaaattaattagtacactaatcagctggtagcatgttaattacgtcttgtttagctaatcatgacagcttaattcaacttgttcgccattaatttagtttagtttagtctaatccagtcttgttattaacaaaagctttcgatcgcttgcattggagccatctgaattgtatcatatgttcttgaaaaattatatataaaaaggggattgcagctgctagctagctgttgatgatgcggaccactcctaattatgtgaaaagtgttatatgtacctacctgaaatcttgtagtactcctactacttagctgggattatgatgaatgcctttatggattagtgttcataaagatataagtatatccattagacattgcacaaaataataaaaatatataagtatatctttatgtttgtctaaaggagatcaaaatggattgacctgagaaattaatttttcatataaattagtgagattgcgacgtgcaaggcgatattggcacgtaatatatatatatatatatatatatatatatatatatatatatatatatgtgtgtgtgtgtgtgtgtgtgtgtgtgtgtgtgtgtgtctgtgtgtgtgtgtgtgtgtcgttgggactgtagtacattgaatcttagctgcaaagttttttgaaccaggtcagtactcctatatagcaatattattttcattgtcaaaagcagatagggctgtcattatattgctactttatcatcaatatatttttaattagccaaatccaattatagtgtcttgtaatggcgactagaaacagtggctctatcagatctctgtatatgaaatgaaacgaagaactagtagaagaatatatatggagattagctgtacacatatgcctttggagtcaaatgactgtaaaataattgatgtttatgattaaaaaacatgttggtcctacgacccagtaagatgatccggatcttgtttcttcctcagtgtattgtaaatttgtaatgcccgatgaagaaggatacgatgcgatcgaatagtaagcttcttggcacattgcagactctcacacgtgcagtactcgtcccccacgtgtatagtatcagtctatcagattatcagaaatgattcttctgttcatgcatgcatggatcaaattcccttcacaatgtgcacttatagaaagttagaaaattgatatatagtactacctctatattttaatattttaatgtatgacgccggtgattttttatcaacgtttgaccattcgtcttattcaaaaaaatttatataattatcatttattttattatgacttgatttgtcatcaaatattctttaagcatgacataaatattttcatatttgcacaaaaaatttgaataaaacgaatggttaaacgttggtcgaaaaatcaacggcgtcatacattaaaatacggagggagtagtataaaatagtttaaatgttagcttggagcactgtacatgcatgttctgtagtggtagtttctttgttactcttcttggagcactgtacatgcctgctgatcgtccattttgtttctccaagagagaaacttaagtgcgtatgtcggtgtttgcttcttgcaatggagtctcatgtcttaaaaccttcgagagagagcaacagaaagtatttactacccatatgtttaggataagattcaaaagtttaaaacaataacttctcagatgcttagttttaaaaagacatgcaaatatttgtcttaaaagatatataagatcataacgcactataaaattggattttggcatatgagtcaccttctagcttacatcgtccacctgtgataatatcggtccgagaggacaaaactcgtatgaaaaagaaaaccaatttttataggcgaacttcctaacaggcccgcatgcgaaaataaacttattttcgtaagcggttctgttaagaggcccacctagcaccaggtcagctatcggcccatccccactccccctcttttttctcctctcctatctcttaaaaaaaatctcctcaccgcacactctcctcacccctctcctcccttcttctctcttctcctcaccccctcctccagcgcccccctttctcacccttcctccaccaaatatagtcctcagccatgacaatggtggcgatggtggctagggcaatgacggtgggcggatccggcgccagtggatggggcaatgacgacgatggctccttcgccgctccctctccctctctcttactctcacctccgctgtccatcctctctctctctcaatatgtaggccgacgaaggcgtgcgagaaggttggtggactgcgacgacgacgacggtgggtccagcgacgcgcgagaagaccaacggagcaggtgcgcatcgatgatgatagtggtgtgcttcggcaggggcagcggcatcacctcctcggggcgtcaccactgcggataaggatcatctgcaatcgaaatcacgtgactttgttactgatatgtgggcccatagattagtgacaaatgcaccgtgcatttgactgcaaaggattttaatcctttcgccgtctcgagagcgcgccccccacacccccgcgcgggtggcgaaggtgaataaagagattgttgctgaaaattattattttaaatagtgtacagagcattttctacaggaccacttgacaaagtactccctccatctacttttgatagtcatatttccaaatctgaaaaatctatttttgataggcatatttcaatccaacaacctatcatcttagtgtctttctcgaatttaatgcgtgattctctattcctccacacaagattggctacatgggcatcgagaaatgtaaatattaatgaatcgcttgttcacgaggaatgactagtagcatgtttaaatggatgataagtagaatcacttatcgttagtctgtgtgccaagataaaatatgactatcaaaagtagatggagggagtatattgctagcttgagattaatgagctgatccaaagcaaccagtaacattagtgtggttactacatatacgtacaagctagcaaagggtggttagatggaatgatggatggtagtagtttccaggtccagctgttgctcacaactccttccttccactgatacacacatcagcacacacaacacgtacaaaatcaggagtaactaaaagctattgatacggcagcatcacaagcaagctggagtagtagtagctcgatcaagagcagctaaatccgatatcgtccttaatttggttagttataccaatcgaggtaatcattatgaggatccaattgaagatccacaattaattgctgcaatggagtaattgcagtgtacttgttcaggttaattgagctggtagctagtaatagtagcagtgttctttatttattaattaaggcgagtatatgttgttggtatagtacttccatttactgtactagcaacttaattatcgataaaccttggccttatatatatgtaccttagctcaccgaaccatgcatgtaccagagctgtttcgattaaataatttatgcacctcatgtatgcatgagacaggcagcagtgtatatataccttttttttacataatggataggcagcagtatatgcctgatatatgcattgaacgtacagatcgatcgatgttcatatttagtttgtactactactccagctagtacgtactatatggcggggtttcccaaaccgccggggccggggttaccgcgcctcggcggtaagcacggtaaccgtgaaaaaccgtacgaaaccgtgtaaaatttatcaaaaaatcaaattatttttaaaatttatttaaatttaaggaggttaccgtgatttttctattaccgtaccccgtggtaaccgcgcggttatcgacggtaacatcaaccctgctgtatgctactccagtactgtcccggaaggctcactgacgagtgggccccacgtgcagtgggtgaattagcatcagctggcatgtacttacctgcgtctttctgtacataggctcgcattacttgatttttctcaacacttgtttttatttttcaagctgctgtgttattgattatggagtacaacgtggcgccgccgcgcagactgtgattgatttggtgtggatttggaaagtttaattaggactggatttggtgtatttgggcgatgtttggatcagatttggtgtggatttgggatcgatgtttgggattggattcgaagaagctgtcgtcggctgctgctgcccttggctgcgatttcttttttcggcgaaatttggtttgtgtagacggatggcataatttagccgcatgtgaagattgattactatgaaaataagcactttccacgtcttaattaacacgcagcacatttggccgtctgcagaaaataattttgcagtagtggacatgctaccgtgtacataacatacatgtattcagtagtacctgatcgactgatcaaggcaaggcatgcgttagattgggaggaattgaagcttgcaagcaaacttgtacagctgattccatcagtgagggatactttatttcgttttcttctcgagctagctcgttgatcatatatgcaggcagaggccgctggttttcaggtttggctagctttagagaggagcaagctaaaataagcttatagctatatcagtacgatctttagagtagtgcatgacagaggagaaccaggacgatacagcgagagagagaggaggctagaaaatttttagcctcatctttccgcttatgattgtatgtcaaaatttaaatttgaagtttattttaggattttccattgtggattattttcagcttttgcttttatattactaaaaacacatatataaatattttatttataaattatttttcgtttccatatatatcgtttggcaccgtttgttctatccttgttggtttgcttcaacggcaaatcagtcatggccctgtacgtttgcttcaacagcgaatcagacttgagttcaacgaatcaagtcagaggtaaacagtcacatgactttttgtgtggtgattttttggaacctgatctatacgatgaatcacgaacggacgacaggattaactaactcgctatagtacttagcaaacagtaaatccagagtgtatttgtgtagttgctacagtacccacgatgcacttgtaagctaatgtagctataaagtataaacatgttttttaactaggcgtacgtgtcaccggggttgcacccgccggattctatcggatcgagatgcttgcttttaaagacaccgttttctatcactaacaggtggattcatgattcataaggatcacatatcagtagatgacgtacatgtgaaattatagatcaaactatcaaattggcaaattttagtgttatcatagtatccgctaagttcgtggactggagataagcggactcgaactgctgatatccgccacagggtaaaccactggctctcaggtcttcccaacaggttctaccataaaagccaacactaggtttttgtctttgtagcgaagaaaatcacttgtctctgctttacatccttaattcaactgtgccccgctcaactcgacgggagtgtttccagccgataataatcccatgaggagtgatatggcaccatttacagattccaatagaagtttttctctgttgggtgcactagggtccgttggatgacaatcagatggttctcgatcgtcactgctctaatacgacttaaaacaaaatcccttctttcttacataaaaggacgaacaatggccatgtttagattcaaactttttttcttcaaactttcaacttttccatcacatcaaatatttggacacatgcatggagcactaaatgtgaaaaaaaaaccaattgtacagtttgtatgtaaatcgcgagacgaatcttttgagcctaattacgcaatgatttgacaatacggtgctacagtaaatatttgctaatgatagattaattaggtttaatagattcgtctcgcagtttacaggcggaatctgtaatttgttttgttattagtctacgtttaatacttcaaatgtgtgtccatatactttaaaaaaaatttggcacacgaactaaacacagccaatatagtattatagcctataaaaaactacaaaaaatgttacaattcataaaaaaagaaacaaaattgcatataaaaacattcaaagtaactaaaaccatataacaaacattaaaaagaagtataattgcacattacaaagcactacaattttaattaggcatagaaacatggaattttttatggttgaaaattttcaaatgtttaggcacctgaaatataaccatacctattaatatgtaatttatccgtataattaattagatcatgcatgctcgggtgctctctcaaccttcaatcaattatctaaaattaaaagaacaggtaaattaagctactggtgatcatggttgtggtgtgcttcaccttcaaaccacatcccaatgagaagggctacgccatagagagaagcaacaaccttgagcatcctccaaaacctcttccgacctgcatctcgtctcatcagttcatccacaaaccgatcccgatctgcgcaacgcctacagtaattatcgcctcctcctccataatcacgatcaggcgaactacttgtgcagctcatcgatatattcaccttcttaattaacctacagtttaataacacaagaattggaacacatatagtatcagatatgctggagaaatatggctggggattgattgtgattgaaagaagaggagagattaataagagaaagaatcgagttgattaattaccgattgatccaggaacaagatagatcgatcgatggatggatggatgcaagccgcggtttatgttagcgagaatgcgagataaccacaccgtactgcagatcggttgagaatatcaatgttacatcgagaaactgttttatctctgtaaccgatttataggaacagaatcgaaatagattggtatagatgcggaccggactgtacgacgatctctgcctcaacttgttaggccactttaatctctcagttatgatggccttatgtgtatgggcttctttcttataatgtttgggcttcctctcttgaagcctattaggctgctaaccgtgctctttttacgccgagtttggttcccaactcatctaccacgtttttcacgtgcacacgcttctcaaactattaaacagtgtaattttttactaagaaaacgagatattatacagaagttgctttaaaaaatcatattaattgtttttaaaaaatagctaatacttaattaattatatgctaatgagttgttccgctttacatgcgcgaggaattagttctcaataagtgccgaacacaactttaaaagtttacactaagggtgttttcgagagtagataaaaaagaaaaagtggtaagatacacaaaataaggttagtcattagtgcatcattaattgaatattacttcctccatcttaaaatataataacttttagcatttagattttgtcatataaaaactttaaaaagaaatttcaggtgcatagcgctctaatttcatcgaaaaatccgaagtaacatcgctatagatcaatcatcaatcatcacaaagtgttactttaaagcagatgcatacatcatgccgttgcattgtaaattagtgaaaatcaacacaaattggtaggattagcatgcaatttcttaccatata

SEQ ID NO: 8679 - DNA, 8602 bp, Oryza sativa
ttcttaagttagcaatcctatgcaagtcttcagggagagcccttagttttgggcagccattaagaaacagacgcttaaggcaaggcatcagaacgagctgttcagatctaccacgcaaattccctgtgttaagagaccaactttccaaattgctcatatcaatgatgtgaagcaatttgagctttgggaaaatagttatatgcgtggcactgctgacgccttttcctaggagctctgaaccaatattcactactgcatctgcacatctgatctgaagaattagtagttctggcatctgacctgctggtggaagctcagagcatgaaatgcactcgttgaggtacatatgtcccaaatttggcatcttatactctggttctgagcacaaccaatctgggaaccttacaccaggaaacccctcaaaaaataaataaattaggcttgatgatggacttagcatctcatagacttgttgaattctctcaatctcgttcatctggtagtgggtaatatcatgagtattagctcccattgtgcagcgaaaccacagttctcgaagacgaagactgttcctgagtacaaatgcaccccctggcgttgctttttctagctttacaatccggagacgttggatgttggggagacattgcagttcatctagcctgaatccagatgcactctcgaaaactcctttaaggttgtagagtttctgaaacttcgcgatcccttttggaacatggtcgattccagtttgttctagctcaaggaaacttatgttgacagtctcatcaaactagctggcaggctatccaaatgtctgcaacagtgcaaagaaaggtattcaaggctggtaagatttcctatggattcagggagttttttgatttttgtatagcttagatctagcaacctcagtagcaacaagtttcccaccgactctggtatgacttggatgcttgttccactgagaactaagacacgaatatgcttgagctctctgaaaatgtccttattaattgtcttaaagttcttgttattaaaaattaggaggctcctcaagcacttcagctcttctatagcaggtatttcttttacatcattgttattactaagtgacgtagattcagtaaggttttgctattttccatattcatgaataaggaatgatcctttgtcaaaaattgtccaagtgacctcaaaagatcatgcatcgttgacatccatttgtcaacaaactctggttttggctgcagaagattcattctaattagctcatggtagtattcttctgcggcttcatgtattgagtacccatgcattttcgtcacaaagccttcagcgacccaccagtaagcgacagcatcacgatggatcccaaaatttgatggtaacaaagcacaccagagaaagaattgcttaagttcaggaggtaagttgctgtagcttaagtacagaggacctcctagttctttgggaagtccatgaatagaccatttgctatctcggatgctctcccattctgcctttgttttcttactagataggacacctgcaacaactttgatggcaagaggaaggccatcacactttttgacaatttgatacccaacaccactgaattctcttctttgctcgtatggccctaatgacatcttcatcagcagttctaggccatcgtaatcattcattttgtttaccctgtgggtataagttgcatgcatttcgaccaaaacatccaggtttcttgaggtcacaaggatatgagaattcaaacctctcaagaaaggcaaacgaagaagatcaatccatacatcagatttccaaacatcatccagcacaagaaaaacactcttccctctaatagtgtccactagaagcggtagaagctcagtcttagtctccagctgatcacaaattcctccagccattctgattgcctgttttaacaaactggtctctgtgtaattctgagaaatgcacaaccatatatgaacttggaatttctcccttatcctctgttcattgtatatcttttgagctaatgttgtcttaccgatgcctcccatcccctggatcccaaaaacagttgacctgctttcattgtagttactactaacaatcattttgacgatgtcatcaatagcccttctgatatcttctccaaccacctcaagttcatctacaggagatgtctgacttctgtcaacaattgttatctggatttgttgcccgttggttctctccaagccaaacatctctttgttcattttaatttcttcaaacttttcatttatattatcaattcttttggcaatcatgtgatcaaatgaaaactttgcaaagctagagaacaagggctgattgcaacataccggccttggtggcagcaagagcttctgtgaatgaaccatgaaaagatctacgatgtcatcgacatcaaacataacatttctcatgttcttccaccatgaatctatccctggatcctccatggccagagcctcagcatcctcacgaacagcgttgaagaattccagatttttcttcaggctctcaataccccttttcacacttaatgtcatgataacctcatcctcaataagctgacccagcttttccaagaatttccaagcgagagcatccaaaactgtgcccatagtgctagaaccgggattcccgctggatctctccaatgggagatgcttgaaactgcagatcccagaacagatatctcacagagctgcagatcacttaaatacggaagatggaaagagatattgaagcagtgtggctaaagcctgatgagaacggagagggcaatgcagattgcagaggagagctgttatagattctcctccctttcttgccaccaactgcctttgtcccaacagacattgacattctctattgcaaaacgtctgaaaaacctgaaaaaaaaattaaaatagtatgaaagtactttttgaggcagaatctgcccataaagatttttgtattcaaatctaaatgtttcaacgatgatgcaatgtgaaaaagggcaagtagtgttacaaaattgcaaggcgattcaagttgaaagctcttccaggctgtgtattcttttcctttcatccccttgacaataataatttgattttattgcagcaaaggagccacttggtgctttactttcttttcctgtttaccacctaagaagcctggaagcactggagcagagttctctttttttcaggaatatgcaacaaaaaaaatatatttatattggcattaaggttgggtaaaacaaggttcagagaaaatgatacattagatcaccagagtgcagacagcagaccgaaggaaaaaatagagtcaaacaggtgctggccggtgctgggcatgcaaccgcacgcaggaatctactgggcatttcgtcaaacagctcatctgcgccccaaccatttgttgcaaagtccaagtttcagagcttagagaaaacatcgaaaggaactcatcccattcgcatcagtcgcgttgcacataatcaagtcagaaaagaaaaaaaatatgatggttgattacctacgcaagaaagagagatgcttctcctagcgaaaccaaagacggcgacaacgacccacaagcaaagataagcagggcctaggtcgaactgagcctggatcaggatcacatcgcataactccagtataaacaaagagcaaattctctgattcatctcgcacgtaacgtaacgtaacgaatggggcgctcggggagagcgatgcgcgaatggcgttcgatgaaatgcccctccaagttcaacaggcgcgtccaggccaatcgattttgttttactttctgaattgggccctgtcgcgaagactgcgacctgaattgggccgtaagcccgtaacctaagctctacgccgaaggaaagcccaaactctaaaaactcctccaccaccgcgcggcgggaaacccgctcctccccactccgttcccgcgcacattttttcggcatcccacccgtcgattttttccggcatccaacgtcgtacatccctccacgtcatcgatccgcgccgcgtgccttccaccaatcagggcgcacgtcccctcctctacaaaaccatcttcccccgtctcctttccccacgccgcaatctcgcgaatcccaccgcttccctttcctctcctctcctctccccgggaagaagacagcagcggcatccatggcgcccaaggcagagaagaagccggccgcgaagaagcccgcggaggaggagcccgcggcggagaaggccgagaaggcccccgcggggaagaagcccaaggcggagaagcgtctccccgccggcaaggccgagaagggcagcggcgaggggaggaaggcggggcggaagaaggcgaagaagagcgtcgagacctacaagatctacatcttcaaggtgctcaagcaggtccaccccgatatcggcatctcctccaaggccatgtccatcatgaactccttcatcaacgacatcttcgagaagctcgccggggagtccgccaagctcgcccgctacaacaagaagcccaccatcacctcccgcgagatccagacctccgtccgcctcgtcctccccggcgagctcgccaagcacgccgtctccgagggcaccaaggccgtcaccaaattcacctccgcttaggcttcacccctgcatctatctatgtgttagttttagtgctatcgatgattggaaaatggatgttagatcgttagtttggtagtcagatgtcagtgatctggaacagtagctctgattttaaaccatgtgaatgtgattcctgggtatgtgatgtttgaccgccttgtgtctgctggtcaacgagtgataactagatctaatttttgtggaactatttacatggttgctacttgcattctgttcaactgttgtaaattcctctgtcactcgttggagttttattctctggagcatgtgtggaattgcctgggcatgcttttgggaaactatagtctgtagtcctatgttatgtttggttaattggttgccctgagcttgttggaattaatctatgtataattttgtgcaattacatcctgtgagtatgttgctatttgcattgtcttgcaaactcctttgtatgccacaggaatttaatttctggagcatggatgtttggagtttgatactgttcaagtgcttattggcccatgtagtttataagtacgagtaggtttcatctaaggacactttctaaaagaagagttgtgaattggttagtatatagtatgacaacttggccatcaccgttctattttagctgataactttgacatctgaagtaagttttgctttaccttagtactgtactgtttcaactttcaaagaagtttaattggaaatagtaactgaaacaccggaaccgtaagtattttgcttgctattgcaggatgctgctacactagcctgtttcctcatttatgttccgaaggtctaatgaaggttctctctttgttcttgattagcttgtaagctaactggcaagcatgaggtatgcactaaactgctgcatcttctatcaaagcttgctgttggagttgttgctctgcaggatatgccatgtgtgaagatgatgaccaaactcttgtggactctagaatcttataatgttatcctttggttctttgtccaaactcttgtggactctagaatttttattggtattgtttaattttgcattacagtagtagccagataatatggtgtttcattattaaaatttattaaaggaaacaattttaaccaacttactaaactatcacatgttcaatttgtgagtatctcatgcaaaagtaatttattgacctcacagtgcttacactctaaacaaagttactaaacttttacttttggtaatataagtactattagatttattgttgtaataaaattacttgctcatattgctattgcttaagtgctacttcgcagtttgtataggaaagctaaaaggatagcagaagaacttgagaatgtccattaactacctgaaacacattatctatgttgtatgtgtaaaatatctatatatttataaaaaatcattttaggaacaatttctacaaatatgataatataaaattcaacttatattttaaaaaatatgcattctagattttctctattttaaacttatgcttctttctacaatgcaagtgatctaggaattactactacaacatagtgtatcttctagtttttacaacaatatgttgacacgccaatccactacgccattgttattgaatgagaacttcttatgttgaaagacatgattcactctttgtggaaaagtaaaaaactatgtatcaatattgaaaatttcttgggatcccccagtacatgccccttgggcctatttataggcttagtgcaggctcatgtgccctagggttactaagtacatgggaatttacatgattacccttacaatagggacatttatgaggataattatagacaatttatccttgggcctcttcttgggccgccaagtgggcctccattggttggttggccccctcgggccttgaatccctcggcttgggggcgaaggtcttcggcttcgctcgacgatttgcccagagcctctgtctttgtgacatttggcgttttgctgtcgtgcttcgtcctagcgattgtagacttgtttcggcaggctcggttgaaggccctcgtgacatgcctccaacagccatgctacgcaccatatcaatttttaagtacaggaacaatcattcattcatatgatgcataagaaattaacagttatgtgactttgaagaccatcaagagcttgatcgggatctgagccaataaaagcattgtggacatctaaaagcttgaggcaaaaattttggccaacctaaaagcagttcatatgtttgatcaagtttaggaatgtaccttgagtgctttatgtttagcgatgcattgataaaataataaagatcaggcataggggtgtaagtgggtgttaacgaaaaatccgcgctttgctaatggtgccagaattgtattggcgcgaactaagtcgacgaacataacggccctaggagatctgtttagctctagtgcaggtccaaagcttgtagagatgcgggcatgccagtcagtttgatcctgcaactaactagatatataaatatgttgatcaccaaagagctgatcggctgacgagtcgatcgagcgatactagccgatgccgatagcaaccgatgtcgatagagttttgagcaatcgactatatgtccaatgtagagtctgatacttgagtaaataatgatataaagataattggctgatgataatgtaataaaacaacaatataatccaataaaaaccaatcggctaacaatgatatgatagaataagtgacccgatggttaaagcatacatcggctagtggtatgatgtcattaattaaatccaaatgattagataaacagtgaaatctttgttacaatctgctaaaaacaacttgtatgcaatctttgtaagccgatacaacgtctagataactcattggctgaatcctcgatgaaacccttattataatcaaagacaggttagcgtttaggattctaagcacgactagggatgatgcatcgcaaagtatgcaaagaaacataaagtctaaacaatcaagcctttgactaattttcagggtggtggatatcttagttaatctaatctagcaagatactttagccgataccagtataaaacctaaaacgaatctcagccgatatgatcaaattaagatgctaaattagattaactaagatatatgataaataggtaggcaaacatatcaaccgaaccagagcaatccaagaggtcaaagctatgcagccttgaaccacgccaatgtagccaatacaattgccagagctagcagaacgtagtacttaccccgtcggatgataagtaaaaaccttggtaaagagggtggcgatgcgccgaaagtaattgtattgatcgagagatagtttacaatgtctctgggtgtacatatttatacccatgggtagatactagtccttgttggacaagaaaaaaacattcctaaagataaaaggaaaacataatgtccttatcggacactaaacacatttttctaaagataaaaggaaactaacagactctttctaattaatagataacttgccatgatgcatcatccttaaactcggtcttttctggataagcttaattgaatatattaattttcttaatcgaatatagcaagattccgactattggcgacttgatagtttccatcggccgattataggactctgaaaccgatactgactctaggccgatgatgacttcggggcttgccaaatttcactgtttacagtgggtcaaccgtgaacccacttataggtcaaaataagcaggttcgtggcttattttagcctataagtgggttttgtgggctagccacttacacccctaatcaggcatggacgagaagtttatatctcattaagaaccacattttcactgtcacctgcagggatactattgatctgggtaacaga

SEQ ID NO: 8680 - DNA, 18589 bp, Oryza sativa
tagaatttaatatgttttaatttaattttctcgttttttttctttccgttgcaacgcacatacaattttgctaatttatataacgttacgtgaaaaaaaaaaccgcctggaggcagtatatttgctatgtttgacttctataaaatcctttggtttgacttctataaaatcctttggttcgtccgttccaagaaaagccatacaggaaaataaacagaaactatttgccattactaaacaaggaataattaactatctgtcaatcttacaagtagtgaaaaagaatgtctcatactccatccgttccgcaacaactcaacctaggaagaaagggatttgcccctttaggacagagggagtatggtatagacacatgaagacagaccacaaagcatgcagagacttccaaaacatgaaaaaaacaatagcacggatatttgagcaaacaccaccaatacgtgcacacattttcggtcatactcaactaaacgtgattagcacgaagctgtcacgaactgagataaaccacatattccgaacacatcgagcaaactacacctgtgctgtgcggctgttctgaacacatattgtcaggcaagttcaaccaaaacgtgattccgcacaaagctaccacgagttcaaacaaataaaaacattaacagatgtctgcacagattttcaggcatgctcaacaaaaatgctattcagccaatccaagttgtcatgaatagcagatgtatgagaaaatcaatcggtcctactcccagcggatgtatagccaaccccagtttctccatcaaatcaaccacattgtgttccaatgaaaatccagcccgccctctttgtgtgtgaggtaacatcattttaacttcctgaaccaaacaaggaaaggataattcagagattggcatttgcgggatagaaagcaatagaactgttgatatcatcaaatatttaataccagaaacggaagtgtaaagacaaaacttactttcttgacttcatgtatggttccaaacttttttgaatggcacgcaagtacgttgggtagcgggaagttaaaatataatctgtccatgacaaacgaaagggggtgataccatcctgcagagagtagatataattagaataggaagatattataacacataaaagagtatcaaattctatccttttacctttaatgccttttcaggtatatgaacatcggaattcctcataaaatcaaactgtaagataccatttttagatggttttctcttatccgttccaaccttgttaactttcaaagccactttttttgaatccaaattagcaacgagctttagatactcattgtcttccgttctgttcatccagcagtccaaatacgggatgtgcttaaataaactatcacgatcatcttcgctaatagctggactaatattggttttatattcagtgtgcaaattgaccaataatcctttcttctctttagctgacattaatgagctgctgtctatcactgattcaagtctcttcaaaggattttcctttaaatcatgtagatcaccttgcagatcagccggtatcatttccccaacaaaacaacttttaaccaactcaacaacctgcagcacattatttattgcttcatcctcctcatatgcaatcacttcaagttgaaagaacttgacatcagatccttttaaaagaattttcctccttctcagaaggtctgttcccatcctcaaacatttccccaaagagaacaagttaacaaggtgtgacagcatggaacgaataattgccttagcaatatttcgaacaaaattacattcctcatcattccttgacccaacaatatgctttatcttcagaaaagaattcctctcgagaaattcttccaaagtcaaacagaaaccttcaaaatgtgataaatccaagccattctccaaaaaaaataaatagttctgattattcaaagcaactgagtggagagtgcagcatccaagtttatcatttggcacacagtaatatatatctggggataatttcaactcatttcttgtctgaaaatacaattccatatattgttagtttatattaagaataaaaaataaatgccataaatgcaactaacatcaatgctttaatgccaaaacaaaatataacgataaagaaacaggatatacctattttatgaataaccgtgtttaaatttgtgttcaagacgaaaaaaaaattaaatgtatattataatttgtattgctagtattattcagatatcctacaaaaggacttaaattttctctaaattcagagaatctccatggtgcagatgcatgatagaccacaatttatcgctaaattgtttttatgttaactattgctgtgtcaatgcacttatcgtactgggaaatataaatagaagtgcaactatgcactgccaccaatgatcaggtaaagtattgtgaccataggactaggaattgaaatgtgcaatccaaacaggtgattcagaatactccttaactctctaacaaatgagatagaagccacgattgaacagaaataagatacagtggactggcacatattggttgttactgcattctatatcctatcctaattcctacattcctatacaagtataacctatgtaggaaattatggccataaagcagccttctgatgcagccacatcaaccgttcgataataagttcagcatctgtatacgcacataaattaggcccatatttacggctaggcccagccagcagactccacactctactacccccgtcaactacactcatgtgactcgactcacaaccatttcttttccttcactaagtgcaattgtaaaatagaaactgacaccatccatggttaatcccatttatcctctctgcctctctataagattcttgtaattcctatgctcaattgatcattaatgcgagaagtcatggttgagtaggcaagcagacagtacccattgttattatcctctactactatcatctatccttccctccctcagtcttgagaaattatcaggtaaactcagtcccttactgtctgattttacaacaataaacaatttatagtttttacaacaatatgttgacatgtcaatccactacgccatgctaggtaccatccatttttaagtaccgggacaatcattcatttaatgcataagaaattaacagttacctgactttgaagaccatccagagcttgatcacagtctgagccaacaaaagcaccgtggacatctaaaagcttgaggcaaaaatttagcccaacctaaaagcagttcacatgttctaagtttaggaatggaccacacatgctttatgtttagggatgaatcaataaactaatcaagatcaggaatggacgagaagtttatacctcatcaagaaccagtgaattttcactctcgcctgcagggatactagtgatctgggtaatacaaaaaaaaaatctcaggacaagattatacatgaattatgaaatttattgaaaataaccagcaacttcttaacaaataagttagttgaataccttgaaaatcctgaagtaaacagaatctctactctttgtgaagacatatagatctgaagctgcacgctcatcttcttgaactggagaaaacatctgtttaacaatatcagatatggcatttatatacacgctaaaaactgaaccaaaaaattgaataaaatgagttcttaccatcattagcatctccttcacaagagcccaagtttcatcttcaacaaaattggatgaaaatgaaagtaaaggatttgttactttcacttccatactttcatctaggaatgctgcaagaaattttaattgttatcaatatcatcatgtagaaatcatcatagttatcaatattataattaattactgttgccaatcggattatataagtgtatctgggttttatgcagtggcagatccagaaaattggttttatccaaatctgccctggtttcatgaaacattttgtaacaaaatctaccgttctttgaaacaaattataaaacctaggattttgcgttaagaaaaccccaaaacaagggttttgaaaattttactcttatttaaaattgtaaaaaacattgaaattacctggatttataagaaacgatatgtgaatctctttcaatgtattgaacatatgacaaatcatcatctgatcaccttctgcccactgacataaggaaaaaaaaagattaccttaaatgaatgaaaataatgttatgcgtgtaaaaaaaaagcagattattcattatacctcaaagaagagacaaaagttgcatctgctccatttaagaaacacattgattttgtccgaaggacaagcatatgcctttccttgaccatcataaggaagcagaaatgagatgtttctcaagagagtcccatacctattaacaaatatcattttagatatcaactaaaattgcatttcatacatatatatttgtgtgtatgtgttccgaaagaatttaccgccgaatgaggttaggcgtataagcaataaccacatttgaggcacggggtctattatttgaattcttattttcctgcaatgaagtacagaaaagttcagagaaatgtgccaacaaagtctgcaatgaagtactgcaatgaattcaaatacagaaaagttcgaggtagtagtataatccttgctgctgcagtcaataaagtcttttccttagggaatcagtttccttagggagtcaagtcttagactacaagtcatagggtcaagtcatcccttagccagcaggttgcctcccacaatccttgcgcctgcaggataacacgcatcaccatgtaccactcagtgtagttggtccttgtcaacgtggggtagacgacagaacctgagctccacttgatcaggcgatcgacgatgacctcccttactccggcgcacgtggcaaggtaggggcaagacggagagccaccggttgcataggtcttcagctcttatggggagtgacatcatgccaggggtgtagcctcacccttataccacttgttagctgcaacagaggatgtagcaaacacgtgcgagagagagaagaatcgacaaaacgatgagcacacgtgttttggtgctttcgtataaaacttgcagcgttttctgcattctttccttcttttttttttcctttcttgcaaaacagagaatgtggacgctatgtgtacgatcccgtagcggcgctcccgttcgcgcacgtcgaacccaacggcgcacgaccaattcattcacgcgcccaagtttattcctaacaatagaaccctagatccctaaatttatccatgtccaatctgagttttctgaatattatgtgagaagtctgaatatgtgcatccatttcgagctcgggccgtgacaggaattacctcctcaagcttgcgtctgaaggcacgagctcttctacctcgaccatgtcgcagcctcctgcccccaccgccaccagatctgctgccggagaccgacgagcccatggcgtccttcctcctcctcttggcctcgactcccccacccccggctggcgatggggcccttcgcttgttcgcagcgcgtgtggcatccgccttggcctctccgacccggccgcccggatcgcccccgccgccgccgtccatgtcggcgccccgccccgccgttgttttttttttgtcttgtttaatctgctgagcagagagggcgtggtgacgtggtgtgaagtgtgtgatactacgagaatatccccttcatcctcgtctggatgggccagtatgggccgatgcttcattttctatgggcttgtgacgtccgtctcaaaatatcttggcactgggcttgttttaaaaagagaaataagttcactttttttttgcggggagaaaaataagttcacttaaggtcccttaatttgttgctcagtctgattttcgtcctcagttcataaaaccggatacaacacatccccaacttaccaaaaccgtgcagacgaggtccctcggcagtattgtgcccggttttggatgatgtggcacctacgtggttggtttgactaggttctcgtcccatgtggcattgacgtggcgcttacgtggcaattggatcttaaaaaaataataaaaaactatggaacccacctgtcaattacacacaaaataataaaaagggtggggccatgttgcagaggtcgcctccagcagcgggctggggcgaagcgagttgcggcggtgtgaactcctgctcccaccgcagctccccgacctcccgcggctgctgtggcgtcggcgataacaaggaggaggcaaaccgtcagttagtagcacaccccgagagttcaatctaaggggtcgtggcgcggagaagggcacattgatgcagcacgcattaacttggagaggcggtaggacacgctggaggaggaatcggggccagaggcgaaggaggaggagacgtggagggcgatggcgaccagcgcggcgacggcggtgatggtggtgcccgtcgcggcgagcgagagcagccaccaccgcatcgccgcccgctgcctcgttgcagtggcatcgcatccgccttgtcatggctaccacacgggagggagggagggagatggatccaagcacgaggggtggtcctccgatgaagatgttggcagcgaggatgaacgggaagatgcggtgcatgaaaacccccttcttcgccgacgccgcctctggcggcgacgcggggtcgggcacgacgacgggcatcgcgacgggtgcggatgggtcgcggtcgaaggacggaggcgaggcgactgcttctgtgagcctgaaatccatccaccccccctcccccggtgccaccacgccgccggtctcctccaagaagacgcctgcggctgccgccgcgccgaccatccccaccgcaacgcccaccaccccgccgacgacctcctttccccagtcaaggcttgcctccttgccccatcgctgagtccctcacccccgacgcggcgcacgccaagccgccgccgccggagctcggactgcccgcctcgctcacctgctctgctgcccacccgctctgctgcccacccgctcgtttgctgctcagaaagaagaagaagaagaagaagagagagagagagggaagaaggaagaggagaggattgaggatgaagaagagagagaagggaaaggaaagaaggaagtgaggctgacatgtggggccacgtgggccccaccatttttaaaatactttctgtgagtagctgacatgtggggccatggtttttattatctttctgcaatataattgccacataagtgccacgtcaatgccacgtggaatggagacctagtcaaaccagccatgtaggcgccacgtcagccaaaaccgccttcaaaaccgctgagggacctcatttgcaccggttttaatagttcagggaccggttgtatctggtttttgggttctaggacgaaatcggatttggtgtactcaaatgaacttattcctttaggccccctttgaattggaggaaaaatggaggaaaaacaaaggaattgaaatcctacactattcatgcctttgatttgtaggaatgtgaaaaggtaaaacgtaggaaactttcctattcctacaattctagagtaaaaacataggaaatttaacatctactctgacctattggaaaatttcctttgaggccccctttgattcaaagaaaattcataggaattttagaggattttattcctataggaatttttcctacaaagccctttgaatcaaatgaatgaaccctattgaatcttatgaaattcctatggaatgcctcttcccatacaagttttggaggaattttaacatgaggtagaacctcatggaagaaatcctttgagtctttatctctcctcaaattcctgtgtttttcctatggtccaatcaaacggtcattcctatgtttttcctgtgttttgcaatcctctgttttacacttacattcctgtcataatcatatgtttttcctattcctccgttttttcattcctatgattcaaaggggccctaagtctatctctctcatctgattcctgtgtttttcctgtggtccaattaaacggtcattcctatgtttttcctgtgttttgcaatcctctgttttacacttgcattcctatcagattcctgtgtttttcctattcctccgttttttcaatcctgcgattcaaatgggcccttaaaaggagaacttggcactaaggctaaagttgaaaaaagtacatgcgaccctcgtctttcaccgaattacaaaatcattcctaaaccaaaaaaccaatgtatgacattcctcaacttataatgtggctttgtttttgttttgttcgacgtgggtcaatgtgggacccacgtgggtcccataggcatatgggtctccatcttatttgcgagggccgacgggaaggaaatccggtgcggcggacggacgacgggggaggagcactgccggcgataggcggggagaaccggaggcttcgtgggcaatatcgccttcgacgcctccgatgacgagctctatgatgcctgcgaactcatcggccccgtccattccctctgcctcgccgccgacctagccaccaacaagtgtaggcgacgaagagatggcccgcaatgcctgccgcaacctccacggctacctcctgcgcggcctccttcagccgggccacgagctccgtgttgacctctccgaccgccccagcagcaggcgccgcagccaccgcgagcccgtcagcatggaggacgccgtccacgccgcgtccctcggcatggagtacttttgatatagtaatttgatatagtaattttctttgcattgcactatgcaacaaacatgctcggctcgaagcaaacattttgatatagtaatatgcatgcagtacttcatctccataaagcccctgaaagatcccaccactaacagcatgcatgtcctatatatagatcaggtttgtggcgatgctatccttccacatatatatttttttgaaaacaagggaagcttattatagatttttttacaccaactttattaaaaattaaagacaaggttcaagggaattagatccccggtacatcgctaggagcaaaataacatatagaacaaggccacccctttgacatataagggtaacctgaattacggaaacaactctgcggccgaaacaatacaacagtaaaggatgaaatagacaagggcaacggcgttgtcgcaacgattacattcaaaagcctctactacagtctacagtgacgtgcacaccacttgacaaatcagcatccccttcggctgtcttcatgggaacacatataattcgaggtttttagctgattcgtagattttggataggcttcaccggactccacaaacgattattgtggactccacaaacaatatctgaggagcgctaattgcaaacccaacgacaaatgccacattgacaaactatactcaactcgaacgaataacccgacacacatatatttcccccgaaaaataatgcttacatggagtaatagcaaacatgtgatattttggaggtttataatgtgcgtacacgctcaccaactagaaattgataagcttatactttgcactatatagtataccgctatgtactctctccgtcccataaaaaaccaacctagtactgaatgtgacatattagagattaacttttttttttggacggagggagtatatggagtatatcattagctaattcactagatgatgacatgcgctttgttgcaggatatatgttagatattggataaatgatgaaatgatttggattgaaatattatgaaaatgatttgagaatgatgatttaacatgtctatgtttagttttagaataaaataaattgtagacatgattattatatgcttacatgttaagcttcgtgtgtttaatgggttgatgtggcatgtctgttggtagattttagaagtgataataaatagtatgcttgcatattaatatttaggtgtttaatgggcattagctttatagaaagaagagattagccaggcgtcctgaaattaatgtgagctcacttaataagggaaaaaataaacaattagtgccctcttgcaataaggttgttgtatttgttcctacgagagagagaagatatatattccctccattttaaaatgcataaaatgtttgaccatttgtcttattaaagaatattatataaatatcacttattttattgtgactttgttttgtcatcaaataaaatataatctcaacttacacttttacatatttatattaaatttttgagtaagtcaaatggtcaaacattataaaaaggttaacggcgttatacattttgaaaaaggaggtagtatcatttttcacgcgcaagcttcccaaaccactgagcggtttggttaatttctataagtttcacaggaaattgctttcaaaaaatcatattaatcattttttgagttttaaataattaatacttaattaatcacacactaatagatcatctcgttttacatatatatcttccctatcttcttctttccctccctctcaataatcaataaaaatgtttttatttatttttacgatgattttcgttgtagcttaggagtatatcaaagtcagctagcaaatctagcgcttacccaatctaagaggagctcgtgaaggatgggagagagccaaccgtctcatttcaaagtgcgtgagaaatttagtccaagaggtgtgggagcctgcagttatgtaaaaatactctaaacaaactaaatgtttggtttcacattagtttattaataataaagaaagataatacttttgtttttaactgtcaaggtggttctattttgtttagacttagccacgagagtcggccggtggatgattgattgatcatctttttggtggtgaggatggttttttatttttaagatgaaccgatgactttagattaatgacccaactaaatcgctggcaaccaaacattccaaccaggcggacattcagcagcaaaggcatgagccaccttattacagtcacggggggccatagctaactgaaaaagagtagttcatatgtcacgaacaatccaattcttttggccgaaacagatgttggtaacactgcatcatcgagggtttggccttaacattcactaccagaaaagacgttttcccaggcggtcaaaacacgttttgacagacggacaaaccttctgcctgcatctaaacgatggtaaaaatctcctatttttacaggcggactatgattttcacaggcaacagttgggatcttttcagacgctatagtagccccgcctgcgaaaatactcgcggcaccataaaaaacattcccgtcagccccacccctccctaagtttcaaatcacaaatctcatccaggaaacaaaatccaatcactaacatccatacatcaacacaaaagaattggattcaaatccacagcatcaacttgcaagttaacatcaatcaacatgtaaacttataaaaaaaatcatcttcgccggcgaactcctttgcatgcggtggctgccgccgcccccctctcccgtcaggccagatctgggagggagggaggtgtccaccgccgccaccaccctcccttctcctcgtaggggccagatctgggagagggaggggaggggagccgcatccgcgccaccgccgtcgctccccctccttcggccagatctaggagcgggagggagagagggggagctgccgtcgccccttctgcgccgcggtcacctcgtccgcgccgccaccgtcgctccccatcctccggccagagctaggagcggggggagagagggggagccgccgccgccatcgccccttctgcgccgccgccgttgctccctcttctccagccagatctaggagcggggagagagagagagggggagccgccgccgctaccgtcggcccgtcctcgccacgtcaccgtccgcgcgttcgcgccgctgccgtcgtcgtcgctccccctcctccaacggggagggagagacggggagccaccgccgccgctcggattgggagggagggaggggaggggaggggaggagagtgagccggtggggaggggtggagaggagaagagaagtgttgagggagagatagagagttgagaggaaaatcagtggtggtcggtggggagtggtggtggagaagataaggatgacttaagatttattttaggtaggtatgatttttgcaggcggaccgcataaggttccgcatgcaaaaatcattttttaaggtgattttcgcaggcggacctcttcagtgatccgcctggaaaaattgattttcccaagcggatgacaaaaatccacctcggtttatattttcgtaggccaatatttgactccgagggtcatatccgtctggaaaaataaaaggacaacgtcgctaaaaaaaagttttttagtagagattgccaatcgagatactccctccttcccaaatttatcatcatataatgaaatttaaaatttatcaaattgatcatcatataaccgtatagacacggatttcatcagaatacaattaatacagcatgacagaatgtgtgcatgctaatgtgtaattgttatgatgttttaatcgatgcatgcattgtgggagaatgtgtgtacggtgtcttaattgatgtgattgaaattatccttaatcttggtgtataaacgtatatgatgatcaatttgggaaggagggagtagtgtgttataattttcattatttcttagttacaacaatggatataaaaatgttggttgtaaatttttgtctgctcaattgtaattaatagttattgtcattgatatggttatacagggaatggcatcaaacgcatattaatattcaatatattttattttcatctttgtaatgcatggtattttttaagtaaaaaataaaaatgagaaacttttaattctacgatgattttttttcaaaaaaaaggaaaagaaaaaaagaagactcaaaatgagtcaccgcccaggacctatggaaggcaaatcctaggctagagatcaaaatttgtgcgaaaaaacctctacagcttaattacttttggatatagagacaaattttgaaacatttatctgtcatcattttcattttcacatcaaaaaaaactagacaaagacattggaaaaaaaactatagacaaagaattttattcatatagtttaaccgtcaaaagcaaaatgatggcacttacggtcttgtccgtcaaatcgctgatgattcttaggattcaggtcagtaatttctttattaacgccatatttgaggatatgcaaaagaatgaatactacctccgttccaaaataagtgcagccgtgaatatacgtatccaacgtttgactatccgtcttatttaaaaaatttatgagaaaataaaaaaaagtcacacataaagtattgttcatgttttatcatctaataacaacaaaaatgctaatcattaaaaaaaatcaattaagatgaacggccaaacgttgaatacgaacaatgcagaactgcacttattttgagatggagggagtacgtttctcactctctctatatgtatgtagtactccctccgtttcaggttacaagacgttttgactttagtcaaagtcaaactgttttaagtttgatcaaagtctgtagaaaaaaaatactccatccgttttagattataagatgttttgactttggttaaagtcaaattgttttaagtttgactaagtttatagacaaatacaataatatttataataataaattagtttcatcaaataaattcttgaatatattttcataataaatttgtcatgggttaaaaatgttactactttttctacaaacttcaaacttaaagcaatttttgacttataacctgaaacagagagagtagtaacattttcaaccctatacaaatttattattgccagggttacggataaggtataccctttacccttgggtatatgtcatgcatcgatatggtatatctgcgcgtatatggacgttctctgtacacactaaggaaattcaccacggaatccacatatggaaagattcctactcggatagaaccgggtcgtcattgtatcatgcgggtccgatgtctccgagtcctacttggaggtcagttgacctgcagtataaaaaggatccccgggaagacctaagacatcgaatcttactatcaacacacctaccacagcctacgagtccggagtctacagaagccaagtcgccgggtgatctagtcgaaccaactcgactacggtctcgtcggtatcatcgaattctgttattccctttgtaatatgtggttttcactatataatctcatatcaactgaattggggctattacccatcagggggcctgaaccagtataatctctgttttctgtttcctcgatgtcgtattacgtagatcctcgtaccagcgtactccaataccctctatatccggtctacgggtatcccccgtcgataattatgaaaatatattcaattattgatttgataaaactaatttagtactataaatattactatatttgtttataaacttagccaaacttaaagtagtttgactttaatcaaaatcaaaacgttttgaaacaaagagtacatgtatttagagagatacttatatataaataaatttcttaggaaattagtttatttttatttatttattaactttacaatacctaattaacttcatgtacccttgaataataataaaaaaaatgagccgtaaaaagaaaaggcagtagttggtacctcgtacgttactcgataaggttaaagatgcatcaaaaatggcattggtgtaattatcttctctttacatatactgcatacgtcaagtcagaggaacgtggtggctgacatgtgagccccaccgctcacgggcccacctgtcagtgaccacgtcaggtgcgaggatccgctttcccagtagaggctccagtaggcaggttaggtcaggtcaggtacggacgcatcccctcgattcccctctcccctcactttctctctctctctctctctcgacgcgagcagatcagatgtgccgccgccgccgccgccgggcgagccggctggccgccatggagctgagctgcgacgcgcatctgcgattcgggccgccctcctcttcttcgccgaagtaaataatgcaaagatgagaatatgagtctagctagaggtgaggaactccgaactcccgatcgacctagctacccccctttaatcgatgcagaggcgcgcgctaagctgcaatttgatttcatttatttcatgcagtactagatacatatgtactcctgtatatttgatgaccaaatcaacttcgcatcgaggccgggttgcatacctagctaatatcaccgactagatctctctccttaattagtgctgcacttattatcatatcagattaatgaggggtttggtttgccaattaattaagttgatgaaaagaaatttacttatcgattcttaattcattagcgatgacctcccaattcccattagtatgctcttgagcctcttgactggaatcaagtagcagtacccaagcaactaatgatgaagatcgatctcatgggttagctagaaagaaagctcagaagttccggtatataatatccaacagtactagctcccctgcacccaaaagaagtggttcgtttaagtggtcatttggtcggcaaaagatgctaaccaccttaaccttgtatattggttgtgcgcttcatttggattttgccgttgtaagagtagttttcgtgatataagtgttactggtttggttgtgcgcgtactagttatgcacatacagggaatgttcttagacggttgtatcacctttgtataattggttgagtttaataaaaactttcattatctaaaaatatgtgtcaccgacatctagtacaagcatatcatcgatgttgggttaaccaaactatagcattttatttgtacctaattaggttattaccaattttcttttaaatccatttgtccgggctctatgataagaacacattgcattcaaagcttttctttagaagttcccaataatataatataccatacattattttggtcttcaacttttttccctcatcattacaatacccaagtccaatttggatggcaagggcactttgctttttcccaaaagtatatcatatactatctccatcccatatcatagctatctctgctattcacacatgcattaatcaccatctcaacgaatgtaaatatacgcttgaaaataccatatatcattgtacacatgaggattttgcataaatctagggttgtgaaacagtttaccccaaagagatagtatgttggtttttcttttttttttaaaaaaaaaggatagatcctcttgagccaggtgtacagaactattaagttaaggaaatactagtgcaatttgaaacaaacacttacaattgttattctagttttactaaatgaaacataatttgtgaggatttcttatgtggctccatatgaaccgagcatgatttaatagaggattattaatagtagtttagatcaactaaagttcacatttattattttttaaatatatttgaacaatataaatgaaatataaaacagcaataacctagcgagtttgtttgcggttatgccaagcggggcaatgagaaagtagggtgaatatataatttagggctcctttggattataggattttcataggaacaatgaagaattatactcatgaattttgtttgggacataagattttgagttttcaaattcttacacaattaatttatcgtattcctcaattccataggattataagcataggctcctttggaaatattgtttctttttttaaatactgggctggatttttaggaggggtagtttttacaagtgaggaactacaatggcggggagaaggacgatgacttcacttttcaagtagtacagataaataattatctccattctttctacatgtttgtgcattattacctttttttcatcaaaatcattaaaaaacaactacatgaaagtaattttcataacaaattaccgataccattttcagatattaaatattaacatatttttatattgtttgtgagttcagatttctaggtttgactacactcattataaaaactttatctattttagaactgacctcaaaattcctgttgtatttcatttatgtgggattcaacatattatataatattttagaactgacctcgaacttcatctatatacactgacgtcaaaattcctatttttttctataagctattcgtgtccaaatgaatgaattcaataattcgtgtcgtatttcatttatgtgggattcaacatactatataataattcgtgtgttttattcgaattcccatgttccaaaacacccacaaacaatattgaatttacatattattgcagtggcattgcctagcatgtactacatccgtcccaaaatatagcaacttaggaccggattaaacacatcctactaatacaaatctggattgccagtctaggttcacagttctaggctgctgagttcaaaaggaggggttaggaacccaacccttcaacatgtaaaacgaagcatggattagcgtatgattaattaagtattagcttaaaataacttaaaaattggattaatatgattttttttaaaaaagcaaccttcctatagatctttctttttataaaaaacacaatttaacagttcgagaaacttgcacgtgaaaaaacaagggaatagaagttgggaagatgtagtaaagaacacaccttagtatgcgtctaatcctgtcctgaatacaatattttggaacggagagagtagtaatgatatatcatgctgaagtagttgatgaagctgatggatgatagaagagaagatcttttcaattggcaaagctagtggggtatatatgctggcacactgctaattactacaactaggggtgaaaacagtcatagaaatttccaaccgattgacgctcgttttctactttaactagccaagcaatgtgaaaatggttactgacgaatactaaaacggtaaaaaaaaacgtaaacaattttgctatataccgtccgtttccaaattttgttgtattcttatgcaaattacctcttttatagtatactccctctgtcccataatataagggattttgaatataagggattttgattttttgcttgttttgtttgaccattcatgttattaaaatttttttggaattatcatttattttatttgtgacttacttattatccaaagtactttaagcacaacttttcattttttatatttgcacaaattttctaaataagacgagtggtcgaacccgtacgagcaaaaagtcaaaatcccttatattatgggacatagggagtagtatttaccgggtttctatttgtttcttta

SEQ ID NO: 8681 - DNA, 24894 bp, Oryza sativa
tggatatcggccaacctgtagcgcgacataagtcaaaattattatataactcaacaagtattcacattaatttcaaatagaatagtcatggcaaccctctgtgaaaatggatcaagatggttcatgagatatccatgtcttgctgcttattgatgaaaagggaagagaagaagagaaaacaacatatgatcctcaaagagaattgcatattcactaaatatatgcatgggattccatcagcaggaaatcatcggtgaccataaccgcagggcatcaacacagtaagtccagtataacagcatcacagtgatcatcagcacacatgcttgaaataaatcgattgtgatggtacatcgcggaggtaatatttgagaatttcaaactaaccatcgaagcgagtgttcaaataagttaaggtaagaaaatggtactcacaggaaaaagcagatccagtgtattccaggctgcatgccttactgctcgtgtagggtaggtaggacctccaggagaagtgaagctgtaaaggcaagccttcagtctagtgcttgtactcatcctcaattccaatcctggatgattttttttttcagaatgaagaatttacatttcagtggagaaacagatgcaaaaagtcttggattacttttggaatgtgtctgaaatctgaataactataccttgaaggatggtcaagccgggagaggtaatgcagaagcacaggttcaacttttagtttctggagctgaaaaacaaagaacacacgatttagtttgaggtgaagttttagcatgtcatgagaacaccgaagatacttcacttagagaacaacctgatcagtgagttcaattacatagtaatctgcagggccaccaaccaagaaagaatttggaaaagtaggaaaatgctcaaggaaacttgcaagcaagtgatctgcacatgcaaacttggatcacttcaatagcaaacaattgggaccaagaacgtggagaaaaataacataccttgatcatagaacagcataaatctcgagaggaggaggaaaagacctctaccagcctgttcaaaacatcaaattaatgacaacaaatactatcgtacatgcttattaggaaaactcatagcagagttcaatgtcaatagggagtgacctgtactgatatcttactcagttgatctgggactaaagcaacctcttcaaggagatactgtttaataaagcaagcatgttttgattttactaaaacacatacatcacagtttcaacgaaatttgagcaactgaaaccaaatatatccttacattatataatgagagaaagtgtcttgtattggtttggatgtcaatcctgtcaaaaagtaattccatcagatctatggaagtttcaggcaagaaaaaaaggaacatcagtgcaataatccctctgttagcagaaatattttgcagtaataactttctcagtcaacagatcaaatttatgggtgccatcataccaaaaaacattagtagctccttggacaagagcagagctgtatctcagtgatacttccttcccatcaagagggacttcgaataactgcaaatgatgaactagtaattcaccaaactgaaatagagatgaaggctaatacaatccggagcattcttgtatgcaagatcgaataagcgaattacagctagcatttacagaattctgtacttagcttgtttaactagctatttgcagtaaatggtggccagaacaatgggcagtataagcttgatgctgggatacaaattccccagtaagattatctttccttttgagatcatatatacattactcaaaagtgaaaacttaaaaccaccaagacattagctcattcagaggaacatatagcaaggagtaaaaggtaaaaggcacattcactgaggtactggttaaacaaattccttaaacgttactggaaatggaaaacatgacttcttgtgaacatgattgagtttgtacttatattggttatgaaaatcaacctattgcatgttctaaacatataaggttgtaagaattaatatatacccatctgtggaaaagaagtgcaaatatgttcgctgcaaaagactggctccagagttgcactatcaagtcaagtatacgcctcccactttcaggtactttaacaaaatggttagcaagaatctcatagaagcacaaccgggtatcttctcgctcatctactggagcaataccatcatcgttcgtgcttaaaatcacatctgttaaaaagaaataagtatgtaacatagcaaaaacacttgtaacaagattgagtagtattatgacccaaacattgatcataaaaggaagtaaggacagagcatgtgcagaaaataagtgatatactaatgtaacaacaaagttcttactgtcagaagaatccaagcaaccaaaactcaatactctgaatctaaaagaaaaaatggattgaatttctattaaagtatagccttattgttatgcacaattaagtcaaatatcatgttttcctgtgatgcaggtgtgcacagtaacgatggtgtatgcagtacttccctagttagcaagtgcatgccaaaacagccaacttttttagacacttcaatctacagatgcatataaaataaacaattaagatggattcctagaataaaaatgaagtaatgccaatcttggtaaacgatttttgaaaagcaaaatatagtgaaagtgacaagggaaagaactagtttttaactcttggctgacatcaatgaattgttagttctccgccaaaaacgttaaacaagggaatggatataaaccatagtacaaaggaaggcaatgcttttgccttccttcaaaaaaaaaaaaatagtacaaaggttcaaactctaggtaaaactaccacaaacttggtgccaatctcatgattactgtccacaaatacacacatgacgaaaaagcattagtttgattaacatctgaagctatgaaagaaatggcacctcgagcgcggtcatccaccttcaatgcgatgtcagcaaacaactgctgcagcagctgaagacgttgcgaattggagttgagagcctacacgcaagcaacaaccagtgaaacagtgccacctgccctatccaaaccactcaaattatcagtatcgtttcgagatcatataaagtaatctttaattcggtagagaatttgagaaaagaaaacgggagaaccaatttcgattctgtaactgcggtaattgccatcgacttagcgccattcgaaaaggggaaattctgggattacgaaacaggcccaaatttctctaactgatacgtggaaaacaaatcaaaatcgtatattcttcaacactgaaaactcccaacagaacaacagtctcgaaaaaaaccattgattcagaaaaaacaaatccaaacaaaaaaaaacaccttcctcactccaaaccgaaattaatcgcaaagaacccaaaaaggtggccaagaaatgctcaataatcaacagaaacaggccaggacaccaccagcacgaatcaacccaaccctcccggaaatcaatgaaagaacgagacgatgaggggggggggggggggggggcaggaaccggaatgcggagaggaaggggcaggatataaccttctgcagcttgcgctcgatctccagggagagcgcctcgaggtggtcggcggctcgggcccgcatctttcgccgtcgccgtcgccggcggggggcgctcgccgtggacgctgggtcgagtagcgtcgcttcgcttctccaacgattcgtctcgtcgttgttctctttgctcctctcccctcttctgactcgtggtagggcggtccaatcagagccgtacacgtggcgggccggcgacgctggcgagtaaccgcgagttcagcggtggtggcaggataggcatcaccgtgattttgatattgcaaatggatgagaagagatgattctgattctggtcgcatttgatcggcttttccaacgaaataattttgccaaatatttttttttggactgttttgtgtaggccgtgtttagtttctctttattcccaactttttatcatatcatatcacattaaaaatttacatatacttgtaaatttttaactttttttccaaactctcaactttctttaaactttcaactttttttagaaactaaacaaacctgtaaagtttgtcaaatttttgtgttccaaacatgtgtctgattatcaggttgtactccacaatagtctgtctgtctgcgtgtttcagacatgcactgtaagcattttttttcttaatattaacagtgaattgattgtgtgattctttgctttcaatagaagcagggctgcaaagccttttctctaaaaaaaaatttgattgtgtgaaatgattgccgatttcttcttatcccacgctattgcgtgccgtctgctgtgctccaccattttcgccgcgtagctgacgtgtaccaacctttatcttggctcgaggacagcacgacagctgcatgcagcgacacgtggaaaaagcctactccacgggatcttctgcaccagctcggatcggtcactcttcactcaattcaaatcatacaatttttttgcagaatttttcatataaacatgttcactttttcacatgaatcttgtgagaattttcggtggtttaaaaggaggcctaataggcgccgtgacacgtcatgcatgcgtcatcacatcccggcaggtctcccgtctttcctcgggtcgctgacggcggtgagcatcccgtggaagacattctcgtcgccggcggcggcgaccggcgtcagcaagtcctgcacgatgaactggcagacggcgccggagtccgtgctcgtcagccggtggcccctccgccgcaggaactccctcgcctcgccgctgagctcgaacacctcgccgtcgaccaccgtcacgttctcgtacaccacctcatttggcaccagctacatatacataccaccatagtgtaattaattaattgctccttccgtttttatcatattataagttatttttattttttttaattatattattttgaagtttaacaaaatttatataaaaaatagcagtacttttaattaaaaaaatatattactccatccgtttcagattataaaacttttttactttgatcaaaattaaattattttaaggttgactaagtttatagacaaataaagtaatatttataatatcaaattagtttcattaaattaataattaaatatattttcataataaatttgtcttgagttgaaaatgttattattttttctataacttagttaaatttgatacaatttgactttaagtagagttaaaatatcttgtaacctgaaacggagggagtattaaaatatatttaatgaacctaatttgatattgtagatgcattaaatttttttgtaaaattggttaaacctaaataaatttaattaaaaaatctaagcagcttatactctgtttagggagtactggttaatcaaagagattaggtctaatcgattaactgatgcttgccttgtggtagaccctgggattcaggacggcggcgagcgggtgcatgccgacgatgaagtggttcacgaacacctggaccaccgtcgctatgatgaacggcccgccgctgccgccgacgacgccggcgagctgtccgtcctgcacaaagccacaaacagtaatggtggtcgtcagcaccggcgacggtgagctcgatcagcgtgacagcgtcgtcagccaaattgttagtaactacatgccttgagaatgatcgtcggcgtcatggaggagagcggccgtttgcccggagcgatgaagttcgccggcgccggcgggaggttgtccggcggcggcgtcccctccgccggcacggagaagtcgtccatctggttgttcaccacgatgcccgtcgacggcgacagcaggtgcgccccgaagaggtggttctccgtggtcgtcatcgccaccgcgttccggtcgccgtcgacgacgcacaggtggctcgtcccgtggtcatccagctggctccatctgatgatcaagatgtaatatcatcaatccaaatgtttcctggtatgatctctgcaagaacaagaacgtgtacattttctgagatcagttgtactttgggaagtagtagctgggagggaacgtggtgttgtcgacgatcctctgccggagtttgtcggcgaacgccggcgagagcatctccgagacgttgccggtgatgttgacgtagtcagggtcgccgagatccatccggatggccagcatgtgcttgaacgcctcgatgaaccggtgcaagccaagaaatcctttcaagaactcgagtgatttgtatccgctcaagatgttcaaaatctggaattaatcatattcaagtttggtttggatggatcgaggaatgaacagatgatcagaatttaactgggacgaatttggatactgaccagagccaccccgacgccgccgctggacggcggcggcatgccgaggaaggtgtagcccatggcgtcggagcgcatggcgtcgctcacctcgaccttgtacgccctcaggtcgtccaccttcgcgatgccgccggcgcgccgcacgtcggcgacgaacctctcgccgacggcgccgccgtagaacgcctcgacgccgccgctggcgatggcctcgagcgtgtcggcgagcgccgggttgcggcacacctcgccggcggcgaggatcctcccctccggcgccagcacggcgcggaggcccgggtccgcgagcacgtcgcgctccgtcttcttgagcgcgatctcgaggtacggcaccaccgtgaagccgtcgcgcgccagcttgatcgccggcgcgaagaggtccttccacggcagcctgccgtagcgggaccacgcggcgtggaggccggcgagctcgccggggatgcccatggcgagcgcgcccttgtacttggaggtcgggttgcccgcgtacatgtcctgtcagacacaaaaaccaccatttcagcttgtcatgtttgggaattcaaatgtaacaaattcatatatattttgaattttgattcgagcatcctttttcggatgcctctcacttcgatcgaattaagaacataatctacctttatttggaccagcaaactcagctagcagcaagtttacacaattgagaaacgtccagaggttttccggctagctctacaaggtggtaggctaaataacctagattcgaagcctcaccccttttaattatttgatattagatcattccctaatattcgcgtcttttttcttagcaagtttacacaagcaaattcagtgtaaccataagaactgcccaaataatggcaaattcagatgctctcagattttgcttcataatgctatcgatagaattagcacttgcaacgcgcgcatggtgcattatcaaaaaatgttttgcttcataaacacttgcaaatgtgctatcgacaaaatgcgttgttattgtggaactgatctgttcagttcttttaatgcaaattctcacttgaaagaaatttcctaatggacaatttcagctctggttcacacaaatcccccaaggtgttgctatctctgtttcaaattactgttccaggtttgttctaagttaaacatgtttatccttaaccattaatttttaagaatccgtgaaagttaacaaataacaatatatgaattctatattataaaaatattcttatggtgaatccaaaaatataaatttttgatgtttagctacacaactttatataaatttatagtcaatgattaaagtgtttaacttagaacaaatttaaaatgacaaataatttgaaacgggaagagtatatagttaatgttatgcaagttgttgtaccgaattacaccaattttacaagatcatacatcatgagcacaactattttctttaagtaatttcagatattttttcccaaatctattggtttcctatccttttagctatggttttcaaaagaagaaaaaacatcatacatggtttcctcgtaaaactacagctttgtattagtaacatgatcattgctatatatcaaaggtgctatgtccctccaaggctccaaaagtccaaataatgacagggaccatagaaagtactaaacaatggagttgatgaaccatattataacaaactatacacaaatggcgaccttatactgttatatataccgaaaacatttcccggagatatgctagttctaatgggcgatcgatcaccctacctacctagtagcgatcaggtagccccctccacctggtttccttttttggcaccgcattattttcctattttaataaatttatgcatctaaagtttatacatctcaagtttacacatctaaagtttagagaccaaaagtttataagtcaaaagtttatatatccgattcaaatttgaatttgaattcaaatattttttatatatatagtatttctatacatataaagtttatatacctaaagtttatagaactaaagtttataagtcaaaaatttatatatctgattcaaatttgaatttaaattcaaatatttttcatatatagtatttctatacatttaaagtttatacacctaaagtttatagacctaaagtttatatacccgattcaaatttgaatttgaattcaaatattttctatatatatagtatttatatacatataaagtttatacacctaaagtttatagatccaaagtttataagtcaaaagtttacatgcccaattcaaatttgaatttaaattcaatttatatatatatatatatatatatatatatatatatatatatatatagagagagagagagagagagtatttctatacataaattgttctaacttttgttttttaaaaaaaattgtgtggtgtactttggtagaaagagaagaaagggaggaggaagggggggagaggagggaggagtacatagtataggagagaggcaggggggtgatcgctgggcggatggaggagcgatcacccgcctaataggaattaccaacgcgtgaaacatgtgagaagaagaaaattataaatctagatcgaatctggacaaatttcatcttttttattcagtgtgaacaactgaacccatattttattatcttaaagaaactgaactcattttcccaaactggcaactgcagtatggtaatcgcgaagtgcagaaaaactataaagaccaccttgaagcaaccaatgaattagcccatgctgattgcacgtgtgaaatagagagtcttacagaaatggacattttctgaagcgatctacaattatttcaataatataatcaatgtccatttctgaatagttctgaagactgaagcagagttgtagcttgaataattctgaattacaaaatcacagcttgattaaaaaaagagtaaagtgtattagcgattcttaaacttgtagggttgtgttatataggttcctaaactctcaaaatgcatattcaggtcctagaatttatcaaagtgtatcatataggtcccaaatcggcacatcccctctaagatcctacgtgatgctgatgtggcatgccacatggacgtgacgtgtcattttcattttcttttcttcttttctttttctttttctttttcttcgttttcttctcattcttctttttttcctttcttctgctcgggtcacagagaaaggagaagaaagggaaaaaaagagaagaaaaaaaagaaaagttttaaatgtgacccatttgtcagtcaaaatgatgtcacgtcattccgtgtgacatatcacgtcaacgccatgtaagatcctgaaggggttgtggcgatttgaggcctaaatgacaccctgtaataagttctgtaatttggatatgcattttaagagtttagggacttagatgacacacaactacaaatttaacatacactttactctaaaaaaaaaaaggactacctactaagcgacctacaatgtgttgtttttgtttaatgtggttttaggatcatggaccacggggtagtcgacaatgcacatcgcacgcttgtacagtggcatgcctctccatgaatggaatggaatttgcaatgagccaaaaaaaaaaatcaaagtcaaatgccaatcatgtttctagatatggtgacttacatgctgttgctaaactaaatgaagcggggttcaatttaggttgtgttattttgtgcaagtcaccaacttcttatttatcgtttttaaaaaaatatataaaaaaattgctttacaaaatcatactaatcatttttaagctctttatagctaatacataataaattataggctaaaatgtttcatcgttttgcgtgtcatacctccaaacacagccttaatagctgtcaaatgccatcacaaaataaacaagttacggagacaacctttctaaatgaaaaaaacaatagctctattcagaaaaagaaataatgcagtggctactgaggcgaagaagaaagaaaagaaggaagaagatgaaaacatgagagaacgattctaactttgtaaaattttagtgatattcagctgatattatgaatagtaatattttttaaaaaaaattggtaaacttgtaataacatgatccaattaacccctttttgaaagttgcaatgtagacatttcgaattcttttttcaaaatttactgatagggatacttcgaattgctgatgtgaaatttttcttgctgttcttttacagccccgtcttttcacttatgcttatcaaccaaaatttaaaatttcaaccttaaatttagagttgattttggagttttctcatcaaagtttattttacagcatttgcttttagatcactaagaacacgtatataaaagttttattcataaattatttttcgtttgtaaatataccgtttcacttattccggatggggccgttagttggtgagcagaatcacgtgcctatcatttgcgtaggcaggtgtggcccaccagacagtgacatgcgccagaccaccgaatcgctttaaatccctaatattataagagcaggtatagatatattttaattttaatgaaataaaaggtgaaaaaaaagagcagcgggttatagatctgtagccagctgcagtacagactccaagagatagtgggtgtatgataggtgagaccgtatattaatagtatataaagaaactattgtataaattggctattagactataatataatatatacatatacatatatatatatatatacatacatacatatatatatatatatatatatatatatatatatatatatatatattggagctagtagtgagctgtactattcaacttgctctaacggaggtctcgttgccggccacgtggcgcgtggccacacacgtcatccgctcaaaatttccgggaaaaagttttttttttttgtttttactgcgtgctctagttggtgacgagtagtaacgggtaacgcactcaccggcgtggccgcggccggcgcggtctcgcgggcgtcgaaggcgacggcgtcgccggaggcggcgtccctggcgacgatgaacgcgccgccgccgacgccgctcgacatcgggtgcaccacgccgaggcagagcgtcgccgccacggccgcgtccaccgcgtgcccgccggcgcgcagcgccgcggcgcccacctccgagcaccgcccgtcgtccgtcgccaccgcgcccaccccggcctccacctcgtgcgggctcagtctcacacccccgccgccgccggacaccaccctgctccgatcatcgccgcccgagctcaggtgcagcacgacgcacgccgccagggcgagcagcgccgcggcggcgatggcgagcgcggtgcacggacggcggcgccgactgtccggagaagaaaccgcgccgccgccgaggagagggttctctaggccgcctcgcgcggccatggccgccggatcgccggagattgtagtggcgatcggcaggtaggtcgtcaggaaggggagggattcttggatggcgagagcttgtcacactgtgcgtttgttggcttgtcaatgagacgcttgatttttataatgatcgtgtgtctaactgggcaatgattctacagatcctattgtacttgatattttcactattttcttaattatactcccttcgtacaaaaagaaaatatataacagttatagagcgggacacatcggtagggctgtcaaaaaagctcgagactcgcgagctgctcgagctcggcttgtcctaggctcgattcgagctcagctcgagctcctgacgagccgagccctagcctctctataagctcgcgagctttgtcgagccgagcttgagcttccaacgagcttagtaatatatgatttttgttattatttaataaattaggagatcaaatatgttatttgtatggcttatattgacatcatatatttattttattcttttttcctcttatattaatatgatgaactaaaaattaattatatttttaaagattatctttcaaatatatgttgttttacttaaaaatcaagctcggcagtcgagctcgagccgagcctatcagaaagcttgaacattttataggctcggctcgagcttgtatcgagctcgagcctaggcagacaagctcgctcgagctcggctcgttgacaaccctacacatcggtattaaaaaagtgagtggatattgaggaaaagttatgattcgtgaggagaaaaaaatataggtagagataaaatggagaatactccattttgggacaagttgagaagtgatagaaatagctttagagctaatcaaatgacttgtgacttgtgatttggttaagatgggagaataggtggaaaatagttttattttaggataagtttaagtgatagaaatagttttattttagaacagagagatctaatcaaatgaaaattcagaatttgaatgtttgacgcaattgtactgattcaatggcgtgattctaactcatcaaaagcaataacccatcagatttttttttaaaataatatttcgatttagtgctacttgttgttgggatatcactttccaaattaagccgcaggaattacctttttcttgtaagtaaagaagaaacagagtacacagcagattgacaggtctacagatgtgtatactattgtcagatttatgagatcacaaaatttaaattctgacagttgatcttcttaagagtgacaaaatatcagataattttttttgcaagaaagaaatagagaaaataatctgcacctgcaaagaatattatggtgtggacagtgtggcaagcagtggactgcgtagccgcagcggcagcttgatcacagaatcagctgggaaaacaaccattggcagaatcaggagctctgatctttcagagttgtgacaaactgattttttttaaaaaaaaattgatcacgtcattataaattttgcaattttacaatttggcattactatttgcctatatacatgttgaaattgaaaaatatgacactaacattgaaaactgaaatatcccttggctgtatttttcaatttttgggaccaaaatacccaatcttctccgttcatcctctcatgtacctccagtcatcttctccaccaaaccacccatggctgccccgtgctcgagcgccacagccggccgttccactgctgtacaaattttgaagaatttccatataaacttgttcagctttcacatgaatcgtgtaagaatttcggctgtctaaacgggggcctaatcgatgccgtggcgcgccatgcatgcgccatcacattccggcaggtctgccgcctttcctcgggtcgctgacggcggtgagcatcccgtggaagacgttcccgccgccgtgctgccgacggtcggcggccgagccgaccggcgccagcaagtcctgcacgatgaactggcagacggcgccggagcccgtgctcctcagccggtggcccctccgccgcaggaactccctcgcctcgccgctgagctcgatcacctcgccgccgaccaccgtctcgttctcgtacaccaccacgttcggcaccagctgcattatatataccaccgaccagacagtaattatgagattgatttttgtgcatgtccgttcgaaaagttataaaaaaatttaaaagaatttgtcaagatagatcaatatacaatatatcttttcacaaatatgtgaattaaaattcgacatatacaattcgaaaaaaataaaaataattaccataatgtgttctatttatagtcaaatttgttatttttttttaattgtataagttaaatttgaatttgtattatttgtgaggtgacatattatataacgatctatttctactaatttttttaaatttttttgataactttttaaagcgacatgtaaaagtgagagatatcctaattgagtttcccagtaattaattaattgctgtttattaatcgacgagattaaggtaattaattgatgcatgcgtgcttgccttgtggtagactctgggatgctggacggcggcgagcgggtgcatgccgacgatgaaatggttcacgaacacctgggccgccgtcgcgatgatgttcgtcccgccactgccgccgactactccggcgagctgtccgttctgcacagatagcactgcagtggtcagcatcggcgagctcgtcagcgtcagcgaaatggttagtagttactactatatgcttgcctttagtatgatcgtcggcgtcatggaggagagaggccgttttcccggagcgatgaagttcgccggcgccggcgggaggtggtccggcgtccgctccgccggcacggagaagtcgtccatctcgttgttcagcacgatgcccgtcgacggcgacagcacgtgcgccccgaagtaagagttcaccgtcgtcgtcatcgccaccgcgttccggtcgccgtcgacgacgcagaggtggctcgtcccgtggtcattcagctggctccatctgatcacacaaaaaccaaaatctcatcactaaaactgctctagctaacttctgaaagaaacgttcatttctgagatgagaattactttgggaagtagtaactgggagggaacgtagtgttgtcgacgatccgctgccggattttgtcggcgaacgccggcgagagcatctgggagacgttgccggcgacgttgacgtagtcagggtcgccgagagccatcctgatggccagcatgtgcttcagcgcctcgatgaaccggtgcacgccaagaaaccctttcaagaactcgagcgatttgtatccatccaagatgttcaaaacctgcgattaatcatgtcaagtttgatatggatcgatcgagggatgaacaaataatcgaaattgactgggaatttgatactgaccagagccattccgactgtgccgctggaaggcggcggcatgccgaggaaagtgtatcccatggcgtcggcgcgcatggcgtcgctcacctcgaccttgtacgccctcaggtcgtccaccgtcgcgatgcccccggcgcgccgcacgtcggcgacgaacctctcgccgatggcgccgccgtagaacgcctcgacgccgccgctggcgacggcctcaagcgtgtccgcgagcgccgggttgcggcacacctcgccggcggcgaggatcctcccctgcggcgcgaacacggcgcggaggcccgggtcggcgagcacgtcccgctccgcctccttgagcgcgccggcgacgggcggcaccaccgtgaagccgtcccgcgctagcttgatcgccggcgcgaagaggtccttccacggcagcctgccgtagcgggaccacgcggcgtggaggccggcgagctcgccggggacgcccatggcgagcgcgcccttgtacttggaggtcgggttgcccgcgtacatgtcctgtcagacacaaaaaccaccatttcagcatgtcattttgggaaatcaaatgtaacaatttcctatttttgaattttggctcgaacatcctttttgagtgcctctcagtttgatcgaattaagaacataatttatcttaaattttgagttttaatgctgaaatttggagtccatggtcatgcgaattttcaccaacttcagatggagatttacaaatagaattgaataaaatgtatttctccttttactactatattggagtgttagacttttgtctaatcatagttagcttctatgagctcaatgttgagtgaacaatatttgtaataattggttgtagcatcttttgaagtaacgaccagatgttattttcattatctaaaaaaatatgtatgagcataattaaaatttaattttccactttttaattatgctcttcacaaaaaacatcatacttgaaaatagaaaggtctaaggttgcatttgtatgtgtaacttgcttgagcttttcacctgtacgtaaaactgagaagaggaattagagtataattaattaagtattaattattaaaaaaagtagagagttgattttttttattttttaagaaactttgatgtataaagttttcaaaaaacacattgtttagcctgtttagcagttcaggaaatgcaccaacgaaaaataagaaagttgttgtatagagttgctcaaaagaacgcaacataaataatgaagatgaaccataccatactaaactatttgtatgaaattgtggcgatggaatctacactgttacaccataaacatttccctacatgccaaccaactcgtgaagcatgtgaggagatgaaaatgacaaatctagatcgagtctgaacaaattctgtcttttttattcaacccgaacaactgaacctgtattttattattatctaaaaaatctgaacctttcttcccaactggcaaccgcaatggggtaactggtaggagtatcgcaaagtgcagaaaaaaaaaagaccaatgttgaagcaaccaaatcaattagaccatgctgattgcccatgtgaaacacagtgtcttacagaaaatgaccatttttttgggatcagatcacggatcatgctgtagttgataatgcaatgcacattgcacacttgcacagaggcatgcctctcagtgaaatgaatttgcaatgagctaaaaaaaactcaaagtcaaatgctgattatgtcttctagctatggtgacgttttacacgagacatgccgttcgctaaacaaaatgaaacaatgtggtgtaatacggaaatattagggagggtcagcttagataccgagtgaaccatagttaatcaggagtaaaaaagataagtacagtggtttttgtgcaaactgcaatataaagccattcggaaaagaacaggattgctgattggacttggagaggaacgtcaggtgcctatcatttgcgtaagcaagcgtggcccaccagacagtgacctgtacccaaccagcgcatcgcactaggccgtgggccccacatgtcatgcactcaggattgcagtaaaaaaagttttgctttttctttttttttttaatttttactgcggcgctctagttggtgacgaggagtaacgtactcaccggcgtggccgcggccggcgcggtctcgcgggcgtcgaaggcgacggcgtcgccggaggcggcgtccctggtgacgatgaacgcgccgccgccgacgccgctcgacatcgggtgcaccacgccgaggcagagcgccgccgccacggccgcgtccgccgcgtgcccgccggcgcgcagcgccgcggcgcccacctccgagcacctcccgtcgtccgccgccaccgcgcccaccccggcctccacctcgtgcgggctcagccccacgcccccgccgccgccgccggacaccaccctgctccgatcaccgccttgctccgctccccccgagctcaggagcagcagcacgacgcacgccacggcgagcagcgccacggcgatggcgagcgcggtccacgggcggcggcgccgactgccctgagaagaaaccgggccgccgccgaggagggggttctccaggccgccgcgcgcggccatggctgggtagctgccgccggatagccggagatcctggtggggattccaaggtaggacagagaggggagggatttcttggatagcgacttggcgagagcttgtcgcactgtggtgttgggtggcttgtgtgcttgagacacttggatatttatatttagtgactgtctgtccagctggccaatgattctatagagcttgttctaacttggattgtttctagtactatatttttaacgactcaaagctggagtagtaattacttatcagatggaaattcagaagttgaatgcttgacgcaactgtactgattggatggcaagagtaattctaacacattagagtgaatctggacataccttacgttcagattggtttattttagaacggagggactatggataaaaaaaaatttgaactctgaccattaatctgcttgagtgtcaaaacatcaagttctcaaatgtgtactactagtattatttttgttgcaaggaagaaacagagaaaagaatatgcagatgcaaagaatattgtggcgtggtgtgtgtgagatggtgcagcaaccattggcagaatcaggaaaacagattctttcagagttgtgacggactgatatttattacgtttatttatgcttagaaaacccagcatctgaatatctgataagcaccttggatctccgtctggctatcactattttagcctttaatttcatttccctattttttaataaatgaaacttttattgatctcaaacagttctccgcaaaaaaatattaaaggctaaaatatactacccattacaaaatatagcaacttttagctataaatatacctcatcccacaatataataatttttagctacgaattagacatgccatttgagcggagcgaccaaccaacttggcgaggcgagtgagacgaccagagtcggtgtaatcgcgtctcagcaatttgtcgctgtcaagtgtcaactactccggtccaggggcatgacttgttggtaatccatgcgtctcagcttctctttgctgcaccttctgtcattttctaattaaacggttgatatgtgttattccttaatttatgggttagttattactaacatagtacggagtactccgtaagtagtactagtatttatggtttttgcgaattgcaagcagatttctggatttttcacattttggtccttttaaaaaacttatttcgcaaatagacccctaaaaaaacttattctaaaaatggtcctttttaggcgccagaatagctggctcccccccccccggccgaaattttttatttttgttttatttgtttgatatttttttcacgcttagggacacacaaaaaccaaccatagaaaaattgaactcaaatggacgtaatatgtgacctgtagaatttttccactcctctcctctctctccaaaccagtgcaaaggagagatgtgcaacttttttatttttatttttattttttgatatttttttcacacttaggaactcacaggaatcaaccatgtaaaaaataaactcaaacggacgaaatatgtggcatgtggaattttccaaagttctaccgaaaaacttctcctcgaaaacacaatcttacaagcggaatttggaggttttaatatcgccgaacccggcaaagcggggagaatcggatgtaatattttctgtagatgtccgtgcatatattatttgcctgattccgagttcgtatgagaaagttacgcctattttaatagatgacatattttgtccgtttcgatagagttttggaaaattctacaagtcacatattttgtccgtttgagtttattttttatacggttggttcctatgttctcctaagtgtgaaaaaaatatcaaaaaaatgaaataaaaataaaaaaaattgcatctttatgtactgtttaacttatatatgtcatttcatgtggttatattttgaattagattaagtaatttcatatagtggtagagtgtattatgtttaacatgctgatcaaagggttttactaaaggaattatggtctaattttagtgaaggtgcaaagtagactaagtggtatgctagctattttcagacttagttaagtggtagttcgagtttaaattttttttgtggttggttgtatcgtgatcctaagtgtgaaaaaacatccgaaaaaataaaataaaaatgacaccgttgcaactccatacagagaaacaggaatggaggcggcggcgccagcatggctggcgccctcctcctgccacgtcggttcgcgtgcaccacggtggcaggaggacggcgccagcctctctggcgccgtcccgttggatgacggcgccagccactctggcgcccaaaaaaggaccatttctgggataagttttttcaggggtctatttgcgaaataagttttttaaaaggaccaaaatgtgaaaaatccagagcagatttccagtgaacgacaccatggtttttgtaacttttttttccttctgcatatatacgtaggttacacgaaggatttgcgacacagaactcaaattctgcgtgaaaattgcgtgccaaacttctagtttttgtttgttcctttctgtatcagactatgttcgttttgggcttgttaccaagctgggtaatgattaatgaaagttgcctgttgtcaaaattaaaaaaaatgcgtgccaaagcaacggtgtggaattgatcaatcgtgcacacaaagtttgcctcaaatgtgaaaagtgcaaacaaagtatggcacagacatctcaggcacaataattgtagccagcagattcgacaagctgcagttgagctaatgatatattgtctccaaccaaaccaaacacctcttcatcgaattattaggatttggccttattagtataattgctcagaatcacagaaattggctcaaagatttaaagtagacgtaagttcagcaatgtatttttttttcctcaccttttctaggcgactggattgttctaacttctgcaatatactccgcaaagaatgttattaggttacaagagggaaataaatgcatgtagagcatgaattatgcaattcctgcgtgagtttggtacccacattgcagagtagcacaagaataatttgtgtactactcttatgttgtagcacatactcaagccatgcctatcctctcaaacctattgtagtgtactgaactattttcatcttgctgtgtgccagcaaaacacctgtaccactggaatgtttcgtgtctgtcctgcacctgaagattagccttcccaactgatcatcaaaattgtgtccgagatcaactacacaaccgtactggccaactgaattaacctgtatttgtaaatgtacatgacattaacaccaattgatcaaggacatatgataagatagagtataaacctttcttttttgccacttaaaaaacatgaactccagaattcaaataagctagtgagcttctttataaaaaggtgtttgtgtgttcatagtacttaccagtaatgacaaaaatgaaatccaatcaggttctgtcacacctactgaaccatgcgcttcctctttgatcttttgcccttctttccggagtaatttggaagtttcttgttgctactggaattgtatctttcctcaggtcctccctgctgtccgttttacatcagtaattgaaatttgttatgattcacacggactattttaaggggaatagtgattttctaagatgactagcttgaactgtctactacacagtgctccagcaggacaaatgaatggtaaaaaaagattgagtacctcttcagtagtctcatcatccgactcttcatcctctgatgttgaggctgaaagatctgaatctcctgcagcaagcgctttgttgccttttctcttgctctcctcttctttcagctgtttaaatctattcaagatatttttgtaaaaatcaaaaccagaatataatagggttaaaagccatgtgaggttcaaaagcacctttcaccaggttgggctggttgagcactcgtacgttttgctcgtcctgcagtaattatcccactacccccctgattgacaacaggctttgctcctcccagtttccgtaaccaaacttgctgggctgtgctgaggatattatttgtgaacctgatagcaaacatggagtcaatacacatattggatttgatcaattgcaagaagttaatgagcagtggaggagtcccacaatctctatgaggcatagcactatagcatggaacatgactgaaacactcatacaactaatagcaaatgcacataccaataaatggacaaccctgacggcactgacaaagagaaccaccctatcataaatggaagaaatttcaaaacaagcagtgtgttcttctgcgatggatcatcagtctgcagaaaaaaaggatcaaattgccagccactcatagcttgtatagtggcaatatgacagatgatatagtaatttagagcaccgctcgtctgctcacctggggtggcttcatgatttccatagagacaaactgagaagcaacaagtagcacaggcaacacaagataacatatcgtgtcatgccagcctaatggaggatggccatcctgcacaattcatttaagttgtaagtatgatttaccatctcaatattatgcaagtacatgagtaatatgctgttttactatcatgtctctacaggactataaattggtatgccacgccatttatttcaaccagagttctaaataataggcaacaaaatgcgaggtgcaaatagctaagcttcttgttgcttgattgcttaaatgactatgggcagaaacgtgacactaatctaacttgacgggtatgtcaaagtcaaataaggggggaaaatgaggttaaattcgctcaagtgcactataaacctgattttcctagatcagcaatgaaattgttgatatatgttaacgtgtgatcaattttattaccacaaaaggcaagagccaagaaatgccagcaccactttgccgagcagcaattgttgtagggcctcccaaagatggaatccagaaaaatccttctgtcagtaatcccttcagagaaatataagccacttagaacaaaatcctcttaatgaagcaaatattaggaagcaggatttgagttttacctcgtttgctacatttgaaagggcttggtagaggccaatccagacaggtattgttgccaaagttggaaaacatcctggaagagaaaccataatatcaaaacactatatcacaaaagcaatctcacttaaaactttaaaaagccaacaattggttttgcaagcacatgatggcaatagatgcattatgtcgagaaatagaaaatatgatcaactaataaataacaaactcatacaaaaaagatgcaatggaacaattcaactatcaaagttaataggctaaagaatggagaagtaagcgacctgccagagggttgactccagcttgcttgtataaccgagcagtctcaagctgtatcctttcctaataagagttatgtaggagtgatagatcagaaatgcccaaagatatgtgcttgaaaatataaaacacaacagtgaaataagaacattttttgggaagatagttctaccttctatcgttaaaatatgcaaaacatatatccagaaacaaacctcagtgttcctactttaatatccatggcgtgcgtaaaagataaacaaaacaaacctgatttcctgcatatctctgttgaattgctttgatctgtggctgtaaattctgcatagccagagttgattcgacctaaaaaaagagaggaaaaacagcacaactctcaacccaccatatccatgttactcattaattaaaaaatagaccagattttatcatttacctgttgtttcgttaaaggtaatgttgcagccttcacaataacagtgagaagaatgatggcgaatccataagagtacggcacatgaacagctgacaggccatccttcagcacctgtatggtgatactcacatagtatcagcattccggagccgatgaatgctatgcaataaaatcctaacagttcttgaattgtaacatttcatatcaaaacctgtggataggaaaatgctaaacaatgcacgcctggtcataactagatataagttacttaaaaataaccatgccgggttgccgtctgctcaatgtttagtaagtttcagagcatggaggcgtcataattaagtgcatgcacatctactcctgcactctccacgaacttacatgactccaaatctccaattccccaaccaattcaccagaccaacttttgcaactcagggatatatccattaaccaatcttagcaatcctgaacctgaactcctaaagtgacttggattcctataggtttgggagaagacggcggcgcttaccttaagcacgacctccaaggcctcggagatgaacccgaaccaccccccgttcttctgcgccaccgacgccgccgcttcaccgccaccaccaccgccaccccctcctcctcccgccgccgcgtccgccgcgacgacagcggcgtcggcgagcgtgtagagcgccgcctcggcgcgctccagcgcggcgtggaggtcgagccccgcgatcgagtcgagcccgtggaggctcgccctcaccctgcacgccgacgcgcggcggcccccgtgcctccgcagcgaaggcagcgtcagcataggcagcctcgcggcggcggcgcggggctgcagcgaggggagcagcgacgaggagaggagcgccttggccatcgcggggggtgcgggaggg

SEQ ID NO: 8682 - DNA, 47383 bp, Oryza sativa
  unsure (1)..(47383): unsure at all n locations
atatatatatatatatatatatatagtaaatttgtttggtgctccatggtgcccgggcaccattgttgaaattgagtatatacccaattcaaatgagtatgaaactttttcaattacttaggtattaacattaactactttactaactagtttaaagcaagtttgaactgaatttgaacttgtttttgttagattttgattctaggtatatagcatccatacatataattagttaggtatgtaatcatggattgtgaaataaagttaaatttgagttgttttgttgataagtataggtatgaatcaaattattataactaggtatatactcacaatttaaaaattttgaaaaatttgagtgattttgtgcattagataccatggtgtccgggcaccatggtgccccatatgagtgtactatatatatatatatatatatatatatgtcattccataggaacttcaaaggaaaggaaatgattcaacccttataaaggatttcataggaatttttcatataagattgaaatcctccaaatttactatgtttttttttttacaagtcaaaggggtctagtagttagaataccttatagctagaaaaaaacagaagaggatattaagttacatgcaccagatagttcacatgaaagtttaaactgaagcataagctgaggagaaaagatagacaatttacttgtatttcaatagaggacgatacattgagatggatagcttaacatattacatatctgacaataaaaaatggccttccagaactgttgttgatacaaaccagaagataacaaatcaaatttcaaatactgagatggctgaatatggcggcccttgttctacaagttgggtcatctcagatgttgaggtaaaagatatcagtgattccattagacaaaatggggtattgcatcagcttcacagagcaaactacaagcctatacatctgctaaaaaaatatggttacatcattttgttttggcgtcacaggattgtgtacatactatcttctaccaccatctttcttcgaaaatatgcgcaagtttgcagtctgccggcgccattcatttatagggacctaaattcagtgggcacagcaaacatttgtgagtgaaggaaaaagttaaacatgtaatgtcatagctataaaatgaaaggcttactgctggaaaccgccatagtcaccgggtttctgaatatcctttgtcaccgaactatttgctgcaagccgaacctgtaaatggattgaggaaaaaaaaattgaatggttaaagggcctttagagttggtcaaggcttaaaagaatagattgagcaatgtagttaaatttgtaatacagataaacacaaaactgaatagagactgaagtagtattaaatcatgttagcaggaagctatgaaaaaagaacagagatgggaaaacagcacctttgaagcaatggagacgtgatcccgaattgccaccctaccacccaaggttacatagtcccccaatctgttgatacatgccaatgacacaagttactaaatctcaaaaagcaggcaaaataaacatttagtcaatgagatgaaggaatgcatacgttgcagaaccagcaattcctgcttgtccacaaatcatgcaacactttccaattactacattgtgaccaatctgcaagaggaactgtcaatttggacaacaagggcggcggaagtccaatcacattaagcagaatatccaatacctgaacaagattgtcaattttggtttcatctccaattactgtatctctccaactgcacttagtaaataatgatgaaaatttccgctcgcgggttaggttcaaccaaacatatattcacaaagaaagagctgatattacaaaatgtttggtatatttaaatcaaccatggagtggccaaaggaacatttgccatttcaaggctgacaaattacctccctctgtcaatacatgtattgcacctatctccacatgatttccaatttttacatgcaacatctggagaagcataaagcttttcaacatatagccatatgatgtttcaattgaatccaaaacaaaacatctaaatacagtctatgagagtgatagtcatcaaacatttgtatcagaagtacttctcccatgtcactggcattttctcagtttcttttttctgtatctctgataccaggtaagcacattgggtgaacgtgacaaatgaaggactgagcatttccttatccttttaatacaaaatgaaccctctttgcgatcctagaatatttcagctaaccatttcactgcccttccatttggaaactactaactcatcatcttcacagaacgtttactaagaaaagggttgttagagagtactagcctgcagtttcttcttaacctgtccatcatcccccacaaagaaaccaaaacctgaaacagatgcatcaaactaaatagcatcaggatgcaagttttaatgcttgatcggagtacataaatcaatatctactggagcatcaaacaagaatagcataaaaacaaaggaaacccaaaaggttgacatttaaatagatggactggacttcaatccacaacaataaatgtaattgggcaaaagtagtgaaattctgaagacagttcacaagttgagaattttttttcctagtttgacatgtgtgcaggtagcagaaagaatccaagattgcagcaatcttgctagttactagtaccctcactggcagaaagagtccaagattgcaacagtcttacttatccctcactgcatcgttgatatcatgtaatcgtttgagaactgaatacatagatgtatgctcaccatcttgaccaatgcaggcgccattgtggagagtgcagaactcgcccaccgaacaattgctcaaaacaacattgtacctgcacacacatcaacatcaagcacactcagctcactaccagcaaaatcaaatcaccaaatcaaacagaattcccccctttgtattcagatcgaatcgtagattagaaacaccattaccagatcctggttgactgaccgatggacacggagggcccgaccacggctcccgagccgacgacgacatccttgccaagaacggcgccggagtgcacgacggcgccggcctccaccaccgcggtggggtcaacggacgcggccctgtgcaagacgcccccgccgttgtgccacgggacgaactcccccgaagcaaccgccgcatctggaaacatccaagaagaagctaagctaagctaactcaagatcaagacgggaagcatatataggagaatataagttgattgctaccggaggaagcagcggaggcgccgccgaggaaccgcgcgaggcgagcggcgtggcgcggtggtgcggagagccggaacaccgccgccgccgccatgggagccgcggttctgcgcagagcggccgccatgtctaacaacggcggcgattcaaggtttgagcgcggcgttcgccggcggcgcgggtaggtgggtctggggactcggctttcaggcccatgggtgggcaaggagatgggccagcgtgctgggctaagaggagagaaaattgggctggccttcagcctgtagaataaagaagacaaaattggttatatagcatcaatgttcacgtttttttattttatagtatcgaaagataccggttcactttaatagcatctaaagtccacattgttttccgtccgtcttgattgctattgactcagccacgcacacggtatgatgtctctacccctcattgccatgtattctactcgggtactattaaagtgaaccggtatctttcggtgctataaaaccaaaaacgtgaactttagatgctactatataaccaattttcccaatatagaaatgaaggaatgccataagcctataataacttattgagtggaggaattaaaaaaaaagaaaaaaggggaggatgaaaaaggaaagggggagaaaaaactattccctttcttaaaatgtgccttcttcgtgtttgaaatttggtatgaaattattgacgaagaatttgatctaaaatataaaaacttctagtgtgctacttctcataaatcacttgtttatttttacctaatgttatccgcaatgcacccttccaggcttccactccccatcccctcatttagtgacattatatcacttttcttttaaccttaattcctccgaaaagaccccaaaagtctttttatggagtatattggaaggagtgagtaataattatttcgtttattattatgattattagttaaatttgaattatagaacttatttttgaatttgaatttttggttctttcatcgtagtgtattttatagcatttattttttagtcgctaaggacacatatgtataagttttactcataaataattttttatttaataataagctatttggataagcatatgaataagcgaaacaatgtggctggaggagtggaaagagtttagataaatttctaaaattcctttattttcaaatatagaaactgttagaaattgaaactaaaaccgaaagaaaagaaactagaagtgtgacaaacacacaaaaaaaaaccagtgacgaggcccacagattcatgaaaatggagaaagcagcatgaaactttagtccgcactcgccccaccgagcgaaaagttattcaagcccacagattcacaggtctttcatgtggttgaaggaatctcacggaaattaaacttagggcttgcttagttggcaaaacatttacccatacatgttacatcggatatacggatacacatttgaattattacacgtagtctaataacaaaataaattacagatttcgccaggaaactgtgaaacaaatttattaagcctaattaatccatcattagtaaatatttacttagcaccacattgttaaatcatgacgcaattaggcttaaataatttatctcgcaatttctcggcgaactgtgtaattggtttttttctacttttaatacttcatgtatgtgttaaatattcgatgtgacagtatgaaaaattttgtttgggaagtaaacatgcccttaagaaaatctgtagtacgatccaaatgagcccatccacaaaggaatactttaggagttaggacggctgacaaaagtgatcaggcatagaaaaatggacgaatcaactaaaatataaataaccctttgcatttatattattagtgatttaaaaactagtgatgtaaaatagactaaagaaaattccaaaattaattttaaaattacatttcggttggctacggctgataagccaatataacaaaatacagacattaacgttgatactccctcaatcttaaaatagagtaacatagtactagcatacgcacactttaggacaaaatataggaattcatggcaatagtaggttataggctgtatatgttactatattttactcttcccgttgtaaaacatagggattatgatgtgtcttcgttaattttggttaataacttaatatattttaggatggaggggtagaagttgtagaacggtgaaagtggttaagggtaagtactatgagcatccaagcacaatcttttagatgtcacataagctaaaatagtgaggtggaggagagaagagatgagagagataagcagccacctctcatgcaagaggcaaccactgtataaaattcaagacaaaaggagagaggggaagagtagactggacaaacaaacattggggctaatgtattaaaattagtatagatgtgatatattgtacatgttacctctacatttattagttgatgatgtggtcaagattagatacaacatccacctcttttataaaacttgccctaagattgatattttattttgaaggagggagtacacagtgggtctgttctgttattatttttcacggctgcggcacagccgacacgaacagagccgtactcagtgtgcgcagctgcaaccgcagccgcagccatggtagccgacctaccgaacgctcccgttgatggtcttaaggctgtgtttgggaggagccgacacgtaaaacgaagtacgtattattacatgattaactaaatattaattattttttaatttaaaaggattaatatgattttttaaaacaactttcgtgtagaaattttttataaaaacacacagtttagcagtttgaaaaatatgtgtgtgaaaaatgagggaggtgagttagaaaatctgggggaagaacacggcctaggcggtcagcagcgaattttggtgagcagtgttggtcggcagcgtgctctggattatggatgaaactggttcggatagtttccgtctgtccggaccatttttcggattcggatagtttcggtcggaattatccggaaattatcggattcggaaacgaattcggatatttttttctcggaaacgaaaacgaatacaataagggtactatccgtcggaatcagaaaacggtcggaaactatccagaatttttttcggatatccacaaacattgaacaaattttagaaaaaacacgtatatatacataactttttcatacgaaatcggatgaagataaactttatatcaatattgtagagctcgatgagatctacaactttattattgactattttattatttgaggtcatttaagggtctaaatattcattataatataccatattaattttacaaaatcttagatctacaattcaaacgacatctgatggagatgtgttccatatcaaaattgtagagcttaatgggatctaccactttgtagtttataacatttgtatttgaaggcatttaaagtataatacaaacattacaagttttgaagatgtgaagtaaaataaataacatctctaatttatacaatggtaagtaagttatatatctagtaaaaggtcttgggaatagaaaataataatcatatttgcatatggtcttagaggaaatcgattatcacatacggttgtgggaccgtctacaaaattgacgatataaatgttggagatgttgaactaaaataataagtgatatctcttccttgatcaagaaactcaatttgaggggttttttatataccggtaaatattcgctaccgtattcgttccgtctcgtattcgctccgtatctgtattcgataatattcgatttcatttctaattaaaaaaaataataaaactagttttcgtccgttttcgatccgttttcatccctctgatgccgccggcacgagcggaaaggtccctgcacagcacagcactacacctccgctggtagggtagccacacgtccgtcttgccatcttggtgtgccttggtgcttctgacacgtaggccaccgagtgagcattttatattttctacttacctttcggcaacgatttctttttagtttatttattattatcactcctcacatgcacatgtcactcctgttgtttatgttactcctatataacatcatccattgtacagtactagtaccatgtggatttttttatttttttagacttttttattttaaattttattaatagacgtttctaaaaagtatttccaaatcagaatcccgtggccaaataactttgtcaagacagtgttgttagctagcgtgacattcaattttcagaaatactttttaaaaagatctattaataaaattaaaaaaataaaaaaattataccacatgtcaatgtgtgttcttccgataatgcttgctagtacagcaagcagcaaccttagcacggaagaaatgatgaattccacaggatggattatggtttcttcggtactagtagtaattcctgtttgaggatttttcacaaaattatgagtttctccggctctaatttaaagagcagaaaagttcaacaaaagcatatgatataccaacttgactacgcaatcagcaggcagcatctattccttgcaacaaaagaatgtaccagtactgttccatccagatccgggcatctcacattgtcattgtcagctcctccacaattaagcaacctagccttaatcatctgcgcttcccaacgcccaatttgttcggtagtgataaaaataaaaatacaggaaactattaaaacactactaattgagttttaatttttttttaaaaaataaatttatctaaatattttaaaataatttctatatataaagtttttgtacaaaatatatcagctgtttaagaaacatgttaagagacacccaaataaaataaatctgacgtgtgtctctctttcttcttgttgcttcttgcaagttaaaccaaaccaacccaaaccaaagcagcagcagccagcaggaacagcaaattaaatttgtccaattaatgccatgtttagtttcaagatttttctttaaactctaacttttccatccaaactttactacgtataaacttttaactttttactacacacaaacttccaatttttctatcacatcgtttcactttcaaccaaactatcaattttgggtgaactaaacacagctttttttttcctggtttctttctgcttctgtgttcttacccacctttttttttcctttccaatttccatttcgtagtttactttacttgtttgttcctcctcttcttccctgacacgacacgaacccgaccacacgagccttctccgctcgcgccgccgccgtccacgcccatcgctcgccgtcgccccccccgcaattctcgtcgccttcgaggcgcgcgctggtccgccgccacgccggctgtgtgggggtctcgcttgcccagatcgcttcggctcgcctcttcttccccgacatcgcgtctccgcctttcctccccgccgccgcccacaggtgagctcctcgtatgaattctgagccacagcaattattttgcaaatgtgccaaggtagaaagcatcctgtagtacagagcaacaagctttttttttttttgcatgtgtgttcttcccccatgaagagacaagtgaacaattgctgccagaacttttgtttttcgtatgtgtgttcctccttcctgaaggaagagataattgaacaattgtaggagtcttggtaccagaactttttttttttatgtgtgttctcttcccctgaagagttaagggaacaattgtaggaagacctagtactagaaccactgcagtaaaataggggctttactatacagctaatgaaataaatataccttgtaggataccatgctaatgtgtttaaattgtgttatcttctgcctgtgggagtagcaaacaatccacgcattttttttaggatccttccttttaagttgaattcagggcaatgcattgaataaattcgtttgatctgttaatttatgagcagcaaggcacattctagtttcgtgtgaaaaaagatggatttttcttgcgtccacttcatgtttctgtttatcttagtatgtttcatttttgtcttatgcctctgaatatcttttagaaatgatttctgatgttgacgtttgagttcactactcgcttgaatgagtttatacatcagcatttttttttatttatgcagctctgaccacaagtctggaacatttctccagtgaccaagtgctcacactttctgcttcggtttcaattatgaattctcagtgactcagggagccatatttctatgggaagagaaaagctgcgcaagcaacgttctggtcgtctgattgaaaccctcaaaatggagagggtcaggactatcctgactcatagatacccatacccacatgagcactcaagacatctcatgattgctgtatttgccatctggcttttcttcgtttcatcggataacttgcaaactcttataatgaagttggacaagaatttcaaatggtggtcgatgtatgcttgtttaattggtttcttctatttcttctcatcaccttttattcgaaagactatcaaaccgagctattcaaattttagtcgttggtaagcaacctcttgagtctgtgagaaggtaaattaagcaaaacatggtgtatttgttctctaaagccgttccctgctgcaggtatattgcttggatattcttggcagcattataccatctccccagttttcagtcaatggggttggatttacggatgaacctttctcttttcctcaccatttatatctcctctctaattttcttgatcgtatttcatgtcatctttcttggcctgtggtatttgggcctcgtttctcgtatggccgagaaaaaaccagagatgcttactataatccaaaattgtgcagtaagtttctttggatacagtaattatagaagtgttttttttattttcacctaatcttgtttagttaccacttatcagctgttccttatctatgtttttgcattttgtgctgtgttgcaggttataagtatagcttgctgcgtactttacagccactgtggtaacaaaactattacgagagataaatccattgaccgtagaactgctagctgggttgcgttctctctgtggaaaaaacatgatgacaattcactgatttcaaagctattgcgcatgcataagtttaaagagcagatttgctcatcctggtttgctccggttggctctgctagcgattaccctctcctatctaaatgggcaatttatgaagaagttagtattgcttcaccttctgtgtttctcttgatttttttttagtttattcttattttttttatgtttgctccagttagcttctaatggatccgggcattccaatgacatttcacctgtctactctttatgggctacattcattggtctttacatagccaattatgtcgtggagcggtcaaccgggtatgtcaactatcttaacgtatccacctgataactcacttgtgtactatggaaatttagaagacaaatatatggattctttcatcttgaaaaagcaacagttgatattggaaagggaactaacttcaccatttgttcatataacagagctgtatataatatgttaatgttcggttttttaactttcagctacatgaatatttagacatgttcacaatttcacatgcttatgaaatctaggagataactaaaaagggaaaaaccatgttcacactgtgtaatggccgtgttttgggttttctaccacaaaccagatcatttgaaatataatgatctgagttctaattcttttttgtataatggccaaataataaagaaactaattgtttccttggttatttagtttttctcaactcactttcttatctttgtttcattcgagttgcttatagatgggctctaactcatcctttgacaatgtcggagtacgaaaaattgaagaaacaactgaaaccagattttgaggacatggttccttggtactctgggtatgctgatgacactctacctcttgctacctcgcttggtgtacacagtgactaaatattcgtcgatttgcttgctctgcaggacatcaactgatttatttaaaaccgtttttgacctcatggtatctgtgactcttttcgttggtcggtttgacatgcggatgatgcaggtatgtgacctgttgaagttgaaacttgttcctcacttcctctttttattttggttgttagttttcagcttttccttatctcgtgaagtcatgatcccctcttcactatttttttcccactatgtttcctgttaaatggatagcactagaatgatatatatatacttccttttacattgtggtttatgttttcacttcctatcgaggtcatttgtcctgttaacttaaccattgatattttctttttaattcttgaccaggctgctatgaacaaaactccagatgaatctaagagtagtgacctgttttatgatcatcttgatggaaaagacgaactctggtttgatttcattgcagatactggtgatggtggcaactcgacttatgctgtagcacggttacttgctcaaccttctttagccataaaatcggatggctctaggcagacatttccccgtggacagctactccttattggtggagacctagcgtatgtttctatctttggtcatacaatttgcgttgtaaaaaattctcgattaatatggcctaagtcaaggcgagcaaaataattcatcgcagaatgtttttgttctgcaagctgaaattttagctatggatgatatcatatattgtttttgtgtcatctcattagtaccctttccattgttattagttaacttatacagttttggagtttccatattgatattagtgtactattccacaaagatgataattttgttccttttcccacagatatccaaatccgtcttcattttcatatgaacggcgttttttctgccctttcgagtatgccctccagcctcctgcttggtataaacctgaacatatagcattggagaaacctgaacttccccttggagtttctgagctcaggaaatatcgtggaccacagtgttttatgattcctggaaaccatggtaactgtcacacatctgtaattttatgcagtagcatcatggtttacaaagttttcttaccatgtattccttgtcattcgctgatgtgttctatttgttatgctaatgatgttttggtatggaatacccaattatatttccatgacgctactgtgggttgatctattgaaaaacaggactgacaaaatccacattgttttgagcagattggtttgatggactgcacacattcatgaggtatatctgtcataaaagttggctgggtgggtggttcctacctcagaagaggagttattttgccttaaagcttcctaatgggtggtgggtttttggccttgaccaagctcttcatggtgacattgatgtctatcagttcaagttttttgcagagctatgtcaacaaaaggtaagtacattgcgtcatctttaggctattagcaaattatttttgtggtgaatgctatggtctacatttgtgaatttgttgtttcggttcttctagtgaaaacacaatttgattgtagtacaccagtgacattattctacaggttagtaatatgtactagacgttgttatcatgaccagaaaattatgcataatttcacgtgaagtttaccgcgtgtgggttttcttattgactaatactacttgtaactatgcaggttggagaaagtgattctgtaattcttataactcatgagccaaattggcttcttgattggtactggggtgataaaactggaacaaacgttgagtatttaatacgtgaatacctcaagggaagatgcaaactgcggatggctggggatctgcaccattatatgcgccattctttcattgaatctaaagaaccagttcatgtgcaacacttacttgtaaatggttgtggtggggcctttctgcatccaacacatgtctttgagaatttcagagaattttatgggaacaaatatgaaacaaagattgcatatccttcttatgacgattctagcaaggtaaggttgattcctgcttgtgtgccttcagcccttcatttggttcattacatagcagagcttgccctttcatgttcatgagccgattctatttattgccaatttgacttctctccattgtttgcccttccagattgcacttggtaatattttgaagttccgaaggaagaattggcagtttgatgtgattggtggttttgtgtactttgttttggttttctcgatgtttccgcaggtgagagactaaattatttatgaattatttaattcatagtaaatcattttgcttatgcactatgtggttaatgtgaatacttatagcctagaaagaccatccaattttcatatgcacgaatgctatattgtaaagtccatgaaggattgttctccaacagcatattatatgcttgtctgattaaagtagtatcgtatatgtttggcacggaaaaataaccttggtggtatgagttcattgatgattatgccctgctacttacaattgatattggacatgacctatactctccagagtattttaggacttaagaataatgcctgatatcctctatatagttttgttttttgttgcgttgaattggatttaggaaaattattagggctttgctcatagaatcatttcaggcctattcccaagggcgcattaacatatctgagacttcatgaacatttctcataggttcatagttgtactttgtaggtttagttgcctgtagtctgctccatgaactctatggaccaacagttggtgataaataatgttcatctagacaattaatgtgcatgcaccatataatagaagctaaagcaacaagaaccacatttcaactttgggcactagagtatcaaatttatattagagcagtgctagaagtttctcaattactgttcttttgtggcctgacataagtatatattattttcagtgtgattcctttcgtatcttacgtgaagactcttgggctgaccgtgtcaatagtttcttcactgcaatgtggaatgttgtttttgagattctggagcattcctatgtatccctggctggtgttgttactctattgatggtatcttttttctttgtacccacaaaactatcgcgtagaagacgtgccttgcttggttttcttcatgctgtggcccatctaacttcagcagtgatactgatgctgcttatggaattggctattgagatatgcatccgcaacaatctattggcaacatcaggtcggtgtgttatctttctttttttttcatgcatcgttgcttgatatatcatgtaatgtttgtgcaagctttaatcctgtgttctctcttggtttaagatggcagcattccatttttaccacggcttaccacagctgtcagaaacttaatgcggttctataatagtctatattatttaatgtcaatttctttggttataactccatttttttttcataagaacttgtgtctaactttattgttacaatatgggtaatggtagtcatcctaaggttatcagaaatgtttggagaagagactaggacagtgtactaacttgcaaccattgtgtattcttgaattggtttcttatacccttttatgagttggcaatgtggcacgtgtttatttgtacctctattttatgtctcaactatttaatgcctgaaatgttcattttctattcctgtccttatccaggctaccataccctctacgagtggtatcgcaaggtcgaaagtgagcattttcctgatcccacaggacttcgcactcgtctggaacaatggactttaggtctttaccctgcatgcattaagtacctgatgtctgcatttgacatccctgaggttattcttcataaatataccagaatcgctatttctgagttcctgtaccattttcaaccctgtaatgtatatttgctatttcaggttatggcagttacgaggagcacaatctgcagaaaaggaatagagtcccttcctcgaggaggagcgatcatctactatgtttgcgtcttcctgtacttttgggtcttgtcaacaccagttgtatcactggtgtttgggagctacttatacatatgcataaactggtttcatattcatttcgatgaggccttctcctcactgcgcatagccaattacaaggcatttacacggttccatatcaagaagaatggagaccttgaagttttcacctttgctgtcgacaaggtaagaagcctgccgatttaatttatgtttgtcagcttagcaatgcatcgatcaaacatgctcgctctcctacatctttcatgtatctggaaccccaagactaagatatttatttaactcctggaaggcatctgtaaaacatccaaaaaagttctcaagaagcaaatagcatttcctattgatttttctccagaactagactagacctaggttatgtagactcggaattatatgtcgcacactgttcccaaggattagcaaaatcgaaatagtgaaattcttgggtcatttcaatgggttaagttatggattttttcagtgagacctacataaatgtttctctttagaaagaaccaaacaagctgttgtgctttgtgaatcaatcaggtgccaaaagactggatgctggatccagactgggacatggagccaaaggagccattccagatgagctacaccaggaagttccccagcaaatggagggccgcctccggctcggacccaaccaatgcggtgcggatcgtcgaccatttcgtcatccctcggacacccccagattccccaacctcaggatctgctagttgatcaattgtagcctagcttaagatcatagtgttgtaatgtacagtgtagtagctatcttgttctatctccctgtataaattgtacagcaacacaagaagccttctgacatactctagcatagaagaaatagggaaagaaaaagaaaatgagaaaagggtaggatggggcactgcttgtaatgctacagatgtttttgttaaacgaaacattattggttcagtaatgatggttcattgttgtatgatcattgtgcaaattgcctctgatgcctgggcaagtgacttgatgggaattttgtgctgtcagtttgtcaactctactgtttatggtcactcctagttttggtgccatacccgtttatgattgagtacttactactactaaatgactgtgtatcaatgcaggtaataacattgtttcgatcagatgtttatcttgacgataacattaacagatgatgttgcctgccaagttttctcgatatctctaattcaacagtaagtaattcgttcctggcaaatattcactcgatatctttgcttgttggcttattagacatagtcaattttaaattttaaatttcatttttagagttgattttatgatttattttatcctttttttctgctcttatctttaaaactactaataatacaaatataaattttaatcatatactacttccttttttaatagatgacgatgttcaccttttgtcacacgtttgaccgtttgcttattaaaaaaatttacgtaattataatttattttttatgagttgtttttatcactcaaaagtattttatgtatgacttatatcttatacatttatataaaatttttaaataaaacgcattgttaaaaaatgtgttcaaaattaacggcttcatcgcttaaaaaaacgagggagtattacttttagtcgcttgatttattcctctacgactcatcggtcgtagctcaaaaacccaagacaaggaaacaatcaaacaatggtttgcgtacagaatacaaacagaagacatgaggaaaaatcaaaaagcaaagagcggccgacatgtgaacagtagaacaagtcggtgggcgagacggagaccggaggtggagaagacggtggagcagcgagacgcaccgacctcgccggcggcgtgcgtggcggcgcatgccggtgagccagtggcggcgccgtacattgctcctccccccgatgggccatggccgacgcaggccgcgccggcgatcccgactgtagccgtccagcccattaaggcccaataagagtctttccaatggtggtgagtggtgactaacgaaatttggacatattgactctttcgaaaaaacttatttcaagaatagaccgtgtcaaaatttgttgtaaaaatgaaataattttctcagcactgccaaacctagatgtctctgagctataacacctgtgccacaagcattgatgctaaggtcctatccaatgtatgtgatgctgagctttgatagcactaagcaaattgttagtttttagtaaatttttggcacaatctacttttaaaataagctttctaaaagggttaatttgtcaaaattttgggactaaccgtgacaaacatgccactgtatgacctcaaccatttgtactgatgaagtgctattaggtgtacataaagctcgcgattgtgtgaatttgtagtatggtcatcgattataaagtgtttgtgtgagtttgtgtgtgctattgccgtaagtataataaagttgtgtgtgctatctttaaaagtggattagataataataaggtgaagaaaagaactgaagagacaagatgcgatgagtcatcccttacttaaaagacaatatctacataacctctaagaaaaaagtaggaagaaagcgatatagtatgattaaaaaaaataaaaaaaggtttgtatataagaggttatgttatacgtatgctaccttttaaccgataagtagacgatataactaaagtttaaaggtagtaatactacaaactacagtaaagatcaaagaaccgattatcacattgatggtttcaaagttgaaaccttttggtgatttgaaagttgcacctctcatgctcctaatggctgaagtactccgagtccatttaatgtaattatagtactaatatattctctaatcccaaggactctgacattgcaacgtcaacttaacaatttgtatgcatacgtgtagcagctaacagccacaacaggggcgtttgcatgcaaccatgtaggagtactctactagtgtacgccattcatcccctctcttattttaaacatttctttattgaaacaacactgtttaaatttaaacaaacctacaaacagtttcaatcgaagtagacaagctacaccggttggttggttgccggcgtgaacgcgtcaaatttggcaaaattcataccaacaaaatttacagctcagtactatactactactcctaccagtaaaagccaactagaaactgtataaaagggcacaaactgcgccgtccccgtccatccaaacgaaacggtaaaacctgtccgccgtcagccacacaccccactgacaaccgggccccactcgcacccccgccggcgccgtcccctccctcccggtcaccgccatgtgggacccaccccaaccctcgccggccacctccccaccagtcagagagacacgggcgcattgaatccgtggcaaaggcagcgcgaagcccgtgggccggcccggctggcacgtgggccccaccaaaccgctttttttttttttttggtgtggtttagtcgctcgcacacatgccggtttcttgtctcgtcttctctcctcgcctcgcctcgtcgccacctccacccccacgcgccgcagtcaactcctccccccaccccacctacgcatttcggcgaacacctcgcctccatggcggcgccgcggtgagtagacgaagcaggcatctcatctcccatcccatggcgctgcgggcgcggttgaggcggttgctggtggtggtgatcctcgtcgtggtggaggtggtggtggcgcagcagcagcagcaggagaggttggcgtcggggtcggatttggcggggctgttcagcctgcgggcgtcgctggggatacgggcgagggagtggccggcgagggtggacccgtcggtggcgggtgggccggggtcacctgccgcggggggcgcgtcgtcggggtcaccgtcgccgggttccgccgcacgcgggtgggcgcacgggcgccgaggttcgccgtcgacggggtgaggaacctcacggcgctggaggtgttcaatgcctccgggttcccgctcccgggggagatgccggcgtggttcgggcgcggcctcccgccgccgctcgccgtgctcgacctccgctccgccgcggtcaatggcacgctcccgcccgatctcggcgtgtcagggaacctcacgagcttgctcctctcgggaaacagcctctccggcgccgtgccggggtcgctgctgtctgtcgccgggcttcggtttcttgacctctccggcaacaatttcaccggcgggctgccgaatgtcacccccgtcgccggtggtggagccgcctcgctgttcaacgtttctgggaattcgctgtatggtgtggtcagcgatgccattggggccctcaaggggaggttccaggtggtggacctgtcaagcaactacttcgatggggtttggaatgtgtctgatggaaatgtagatgttaggatgaattgcttctccggtgcgccaggtcagcgcaaccgtgttgattgtgaagagttctataggagggcaggggtgaggcttggtgatgctctagctcccgcaccttcgccggagacatcaccggggacgacgacgaagaataataacagtaggatatccaagggtgtactgattggagttattgctgccgcggcaacgctgatggttgtgttttttggtgcattggtattctgcttggcaaggcagaaggcgggaagaagaggcgcacgcgggagaggggtggatacaaatgaggaaagcacacgtggcgtgcgcaggagggatagtagtgtaaacccggtgacatcaccaccagtagcagtgtccccaagtgccaattctggacataaggatccggttgttgtttccggtgaatttacctttgagcagttggtccatgccacaggcgggtttggagatgacaacctcctcaagcatgggcactctggggatatttaccatggtgtctttgagagtggatcccaggttgttgtcaagaaggtcaacgcacagagcgtcaacaagcatgcaggtgaattggacttctataaaatgtattcccatgagaggattgttccgttgctcggacatttggcaaaggatgaagaggaatttatggcttacaagtatatgcctaagggggacttgaccaatgcattgcacaagaaacctgtggacacagaagatggcttgccatcattggattggataacaagactgaagattgcaacaggtgtggctgaggccatgtgcttccttcacgatgagtgccgcccgccattagtccacaggtaattccgtattctatatgatccacaggcatctaagaaattcatttgctacaccatgtaatatcctattggttagtgcaccctaatattggccgttctgtcctaatttaatttggttcatagttgagagaattattgatggctcacatgccttattttttattaagttgtagccgtactaatggtgtaagttatgtcaaaggcgggaacgatataagaccagtgaagtagaagaagtgtctaattgaaattgaattgtttgatttgtgatttctgtggctcctcagtgtggttgctgtgcctttcttggacttatttactcagcggtttacttcatatttcattgaggcacttttttactcaagagcgaatcttgcatatgaaaattcttttggtgataaattattcataggcctggacaaaaatatcatgcttggagacttgaatatgatttatctgtgcatgttgtgtcgttgcctagaagcattgacccactgtaattaaaagtatacattttgatatgacttgtcattttcggtaaccttattggtactataaaatgtttgttagtttgtttctctttccacattcgatatatttgtttgtgtctctttcttcattcagttatgcgttctaacgatttgaaaccacatatggtttctttttactagtgatcaactataacaagttcccaagtctctatcaaagctttagatgcgcattcaatattctacttgtatagtgttctgtgtatgtcatcaacaattccaggaaaatttaggtttggtgcttttgacataactggtagtggtcataatttttttcccacttgcctgtcttaatttcttcgtttttgctgtcttatgttacttttttatctaggaaattttttatcagtaggtcagctcaacttttctgattcaataagccttacctccaagttgatacatgttttgcatacctcaatcttctctgacattatgttcacattgttatttattatgttgtgatttcttcaattgtaatcacagagatatccaagcaactagcgttcttcttgatgataaatttgaagtgcgacttgggagtatgagtgatgtatgtgcccagcaaagtgggggaagccagagtgtcttctctcggttgttgagatcatcaaggtatgattatgacctgtcatgggcgggaatgagaaaaactacacttattgatggctgaatgtggtggttttacaattttttgaattctcgtaatcactggtgacagaatttgatggttttgcccctctttttttttctgaatttgtattttaaatttggaaacaacataaacataaaattgaaggtaagagaaacagcaacagtagtattgatagatcatggatgatcctatgtagagaatgcagttccctactttccttactattgcatttttttaaaaaataaaaataaaaagggtaaataacagaagagaccaacctggttcgaaccagtgacctcagtcaaaatactctaccattgagctatggaaatggaactgttgatccttattaacgtaattttccttttgggttcacttgggtttacactagtactgatgtaattgctgtttgttttctcattcctcgctgtttacaactggcaaaaaaattcttccctccggttaaaattttttcaaaaaatcctttggcaaataaggcaaaaaatttacaggggctcaagggagggganaccctccctggcacgcctatctgaaagtttctatcttgttggatggtacaccaagaatatgtgcctgctcaaaaaaaaaaaaagtaataatatgtgcaccaaggggttggtgattatagataacctaaaatgttattttattttctatgctgattgcatgctagttggtatttggtagttcaatgttccgagcacacacacctacttccttctaatcctgttgtcttttagttgagcaaacttccatctttatctgccttaaacgagtcacatctttctgaaaacttttgtttactgctaactaaagctcctaactgacaatgatatttggttctttcttgtggcaggtcgcttgataagaacatatcaggtacataaatcttatacatggctatttattaccactctaattctgtggttcatgtacatgcgcacaaggaagtttcatggttaacattcccttctgcattttttacatgacaggcccaccagcaacttgttcttatgatgtttactgctttggaaaggtgatgcttgaactagtaacaggcaactttggtgtaagtggatcaaacgatgctgcctccgaagagtggatgacaaacacactaaaccgcatcgacatgaacgacaaggagagcatttctaggatcatcgatcctttgcttattgtcgacgaggatcatctcgaagaggtgtgggccatggcaatcgtcgcgaagacatgcctgaattcaaagccatcaaggcggccttctgctcggtacgttctgagagccctggagaacccgctaaagattctgcgaatggcgtcccgctccaattcagcaagactcaggagctcatcatcccggagctcctggcagtctgctttccttcaaggaaaccggtaccagagccttgaaaccgcgtcgtcgtcagggcaaatgcttgacaggaaacattcaactagatcacatggaagcggaggagagacttccttctccttcaagagggcttccagggagattgctccggagccagaagggttcgaggagaatgttgtcgtgtagaactgaaattacaccgattctttcgaagaatttgtgattcattcatacctgtgtataatctgatcttctgatgagcatgattcggggtctcgaagtgagaattgtgcatatagagaagttttcggggtttttatttctcttttttttttccttcatatgttggagaattgttttggtttactgaacgcatggtacttgatgttctcattgtgcacataacatttacccttttttttcccttatcatatcaagcagcaagctcttttaccgtagatgttgctactttttctataaacttagttaaattttaagacatttcacttagagcaattccaaaatgtctcataatatgaagtggaggaagtagtaactacgatttgtcgcaatcttagtagaacaaaatcaatacgaaaaaatctggcatatattatgccaagtgcagtaatccgcatttttcttctggtttgtgtgatgtgatgcagggactattttgaaacactcctacaagaaacggggaccaagttgtaaattgtaggatgtaaatagttggacctctaccaacgaagcgatacaaaatactaaaatagggacttaaatgcaaaacatcctaatcctctacgggtgtacaagcagccgtcagatccacaatcaacggcccagattgatccccttaactaccgaaatgccagagtgcgacatttctaaaagagtccctcgaaaaatatattttacgatccaatcccctctactcgaagcaatcaagcaaggagaggatagaggagagctcaagctccacctcccgctccaatggcggcagccactctcccaccctcccaccaccgcctccacctccacctccacctccacacccccaaaccctccccacctcgccgcctccgcctcgccgccgccgccgccgcgtcgcgcctccagaacccgacaaccacccactacccgaacctcccgccgcccgcgccgccgccctccacctccctcgtcgccgccgaggaggcctccctcgcgccgcgccgcacctaccgcttccccggctccgtcccctcctcccccacgctcccggacactgcggacggcggtctcgccgcggcggccgcggtggcggacgacgccgtcctgcggcgcgcgctcgaggtgcggcgcgcggtggccggggaggtgcttgtggcggcgctccgaggcgggaaggtgggcgggctgacctacatcaggaacctcacctcccggatggcgccgttcgtggaccgcgtcgtcgtcgaggccgccgccatgcggcgcgaccgccccgagctcgcgcaccagtcgttcaacgcgcgggcgcgcgtgtacatcgaggagtccggcctcgtcgccctagtcaagtgaggatgcagctttgatgtttttcgtttatatactttgtaatatatcgcctcagttcatttctgtttcggaatgcacaaagaaatttgaattcgaagtaacaccaactatcagaaattcagaagaattgcggatcatacaaatgcaattttggtatattgtgtatgggaaaggaaagaattagagggaagtgatgattccgtgttcgaagtaggcataagcatgacgtagcgtaattcattagagcttaggagttaggagtagtttagtttgttactatgcacataatactgattgatcatggcacccaccatcttggctatgaattgtgagctccctcatgcctcatttcaagtcttcaaagctcatctttatgtctaattagcaacctgggctacaaatacttaatttggaggcatgatcgtggttggtgttgaaaatggccaggctagaactgtaccgaaacaatctgagttgaaccttggcttggcttgaatttatttgatttcttgtcagaactgtatttatttatgcactgtaaaattattagtacctgtttaaaaatatgatttgaactggtatgatttatgactctgttaattcccaaataggctcacatccctggcatcttgtcaaactcctaagcaattgcacaaattcgtaatatattacataatgtttatagtgttttataaatacaatttaaatcctgatcctcaggtggttcaagcacaactccatgacttatccccaaatcgccaaagtagtttgctcatcctctggcaatctggagaaagtgagaaggatgataaagtggttaaggtccattcatgtgaaaggagaatatctaggacgcgtgcttgcaaaaggtgatacttttttgagccgcagttttgaagaactggaagagattatttactacatggaaagctgcggtgttagaaaagattggattggtcatgtggttggtaggtgtccacagttactgaatctgtccatggatgaactggagactcgtgtgagattttatacagatatgggcatgaatgataatgattttggcaccatggtttatgattatccaaaagctcttggatttttcagcctagaagagatgaacagtaaggtgttttatgtgcactaaaacttgttttgtgcttttttggctccttgttcattcagaatttttttagcgattattttagcaatatcatttcattctcttaatatgaacaaagagtgttcattgatatctgtggacaagtaaggatcaaattaatatttcagacagttaaaaatcgatttctgattaaaagtgaactattaaatcggacaaaactgaggtcacgatctggttatttccccttttagatatgaatgaatgtaactgatgatgagctggttaaagttacttttcttgtaattctgaaagatgtttagataaagttaccgagtattctcaacgttctctttctgctatgagcttcattttctagttgtagtcaaatagcatttgtttatgtattctctctttgtcagatagaaacttcattgaagataatggcattatggatcacaggtacaatatctgaaagaatttggactgagcactgatgaacttggaaagttgatggctttcaagccacagctcatggcctgcagcattgaagaaaggtggaagcctcttgtgaagtacctgtatcatctaaacatttcacgggatggcatgaagcgtatgttggtggttcagcctacgatcttctgtcttgatttggaaacagtaattgcaccaaaggtactcttttgattgctttgcatgcattgtatttccaaattttcacaacaattggatacattttatttattacttcacagcaacatattaggaacttgttagtgtgttcactaaatatagtcttgatcgttaaagagtaacagcatattgttttaagcaaatgcacaaagtggatttatagctcttaatatgctgagatctgaacaatgtgattcttcttacctctatcctatcatttgttttaggtacaatttctacaggatattggtgtgaggagtgatgccgttggaggtgtgctggtgaagtttccgcctgtactaacttatagcctatacaagaaaatacgcccagtggtacaagctctcaattttccaattcttaattagtattgacctgccttgttgattcttttgtttttaaggtcagtaggatcagtttggagcagctaagcatggcatagaaggcagtttgtcaaatctcatgaaaccaccatctgaaatgctaaaacttgctttaaacctaagttgccacagtaactgaacatggacagaaatttcaattgttttcaatattggtttggtttgccatgatgaatgaacacaccggcaactgttgaataaccagttaaagcataaaggcgagcgcggcattgcgtaatgcaccttgcagcaaatatgtgtaaggccaggagtgatgaagttgaaaaatgttaaatggccagttgctctatttgtatgaccagcagtggtgatgttgatgagaacacccaaaatagtaaaagcagttcatccacatatagtgcttctatgtttttcttcttccttttttaatacataattgcataccttgatgatctactccatttggcttatgctgattccacatgtaggtaatattcctgatgacgaaagccgcagtaaaacaggaggacatcggcaaggtcattgccctggatccacagctcctgggctgtagcattgtgcgcaagctggaagtcagcgtcaagtacttgagatcgctgggcatctaccacttcgtgcttggtcagatggtcaccgatttcccaacgcttctcaggtacaacgtggatgttctaaggccaaaataccagtacctgcggcgcgtcatggtgcgaccgctgattgatctcgtcgagttcccccggtgagtctgtctagggttcatgttttgattgcacatcgaaagatgagatcattgtgaaacaactgcgaaatgcttatcaactctacactgcatttttgtcaggtttttcagctactctttggaggacaggatagtgccaaggcaccaaacattggtggagaacaggatcaacatgaagctgagatacatgctaactggatctgacgaagatttttcacaaagggtacgagaagctgttgagaggagagccagatttgaagctggaaatgttgaggcatcagattcgcaggcgactaccgacggagcagaagccacagcaccagcatctcaagacggctgggaggcagatacatagatagagcaggcagggcaaaattgtaatctcacattgtgatgtaaagaaaaatagaaagaaaaaacgctttgcttccatgccattgataagcacagcacaggggaccgtgagtccatgaccacattgtacttgcatgaggcgaagatcattggcaagcagtacaaaatttcatttatacaagttgcccagaagggaccagttaggcactagcattagcatgagtttgtcctttatttttctagcaaattacacaaaataccgagggaaaaaggaggatggaattcaggtcgcactttcagctaggaatgcccagcccctgaattattaacaccacacagaattacggcgctgcgtgaatcccgaactaataaacacgcgccttgggtgggaacgactcaacttcactgtccaatgtgttcatgtggactggcctgtatgccaagcgaaccttctcattctcccagtacctgtataacaagaaacatcgagaattcaggatcaaattacatataaaaaaattataccatcagagagaaaacatgttgatttcacattctacagtgttttaacacctaatgtgcatgcatgtcatgttacagccaatgataagtaaggttgacattcttttaagtgctacaataatttgtctcaatatttaacttaggtgtcgtggtgacaacgtctaaagctgcaacccacatcaaaactactatactgcttgatgaacagagtatgcttaccccagcgagtgcttcatccattgctcatcatctcttttctgtaagcagtaaggaagaatcaattgtcactacaacatagaagcatgtgggtgcgaggcaccaaaaagaagggaaacaagagaagtacaaaccgtgaaatcttcacgagcatgagctcctctgctttccttccgagcctctgctgagtgcatggttatgcatgcatttatcaagagattttccaactcaatggtctctatcaaatctgaattcctgtgaaacaaatagtgaattatagatagccagtgtaagatagtaacaagcaagcaaaataagtcggtgcaatccttgcaagaaatggcataccatatgagactccggtcactgatcttcacatcatgataactttcccatgccttggtaatcaatttgcaacctaataaagcaaggtcgaggtcagtgggaaatatttatgaatcatgtctcttgttatcttaactatttatgccatgcttgattactagctaattatgaagcttcaatcactaattcttggtattatggtacctttactatactttgctaatcagctaacaacctaataaaggtctgtgagaacacattgatacaacagtcaagaatcatgactttctactggggtctatctttactgttaaatcctgccttccttgcttcctattgttaatgactaggatgatctatggtgacaacagacatttctatatcaccagcgtcattgccttaagctacaaaggatatgtgcaaaactgcattaccttcctcgagtgtttcttgcgtacggaagacagcagcattattttgcataacacgttgcatgtttagacggatcttggaagttggcaatgatccatttgcatttctcagcttgtctaaccaggctatggtcttttctccagcacttttttgaagaggtttctgcttctcacctataatgttgcatcacagacattaggtgcatcaggatgagcaaatcagccaacaagttatgtagcacaggagggaaacctacctggcttagcggtttcagctaccctgtttgcacaagctctgccaaaaacaactatgtcaagaagtgaatttgcacccagacgatttgcaccatgaacagatgcacatgctgcttctcccgcagccatcaaaccaggaacaacagaatcaggattgtcacccttcatagtcactacctgatatgcagaatagaaaacttctattaaaaatcagcaagaaaaaagtgatctacagtaatgtttattggttactcaacacaaacctctccatggtaatttgttgggatcccacccatattatagtgcacagtaggcaagacaggaatgggctccttggtgacatcaacaccagcaaaaatagcagcagtttcagaaataccaggaagcctctccttaagaacttctggaggcagatggttaagatgcagatagatgtggtccttcaatggccctgaagtaaccagaacaaaagataagtttcatcccaacagccaacacagttctgtacctcaggtgttaaatgaatggacttgggcataccaacaccacggccttctctgatttccattgtcatagatcttgaaacaacatctcgagaagcaagatcttttgcagtaggagcatatcgttccatgaaacgctcgccttcactgttcctaaggataccaccttcaccacgggaacctgatgatcaaatgagaatgaagacacgaagattgtcagtaaaattacatatgtgcaacatcaacagtataaatgtcctgcccataaactaggataaacaagagaagtccttagaagctaagcacatgaagaaaagaggagtatagaaccttcagtgataaggcatccagcaccataaatgcctgtaggatggaactgcacaaactcaaggtcctgcaaacatatatcatgcaaatgtaatcaggatagaagcatggaacagtaactaacaattcagcactaaataattggactaacctgaagtggtaaaccagcacgtgcaaccatagcgttgccatctccagtgcatgtgtgagctgaggttgctgagaagtaggctctgccataaccctgtttccacaagacaacacaaaaatgaatcgccatagtcaagaaagctagcacatttgtcatccaaaattcaaatctgtgagatatcttactcctgtggccagaattgtatttgtagcacggaaacggtgaagagtgccatcctccatgttcaaagcaataaccccctgacaggtgcctgaatattattacaaagtaatcaatagagcttctatggcatggagtaatcgactgcttgaataaaattcacaagtcctaatacaagaagcaggagggtaaatacaaggatatgaatgagatatttgcaactactgaagaggaagctacagtgccaagtgtacttgtgttatgcttgaaatagccacacacacacacacgcacacaaggaacaaaataattagagtaaactgcacttagcaccggataaaacatttgtttcgctttgcaccagatttagcacatactttcctttacactaaggttgtattgaaataagtttcacttagcactaggatacataatcttacctatcaagattgaataagttttataagatatcctcatattttacaatattttgttcaattataagacataaccaagtgcaaagtgaaatcgaattgagataccctggtataaagtgaaagtatgtgttaaacccagtgtaaagtgaaacaagttacgctctacccggtgcaaagtgcaatttactcaaataattatcaaaagaaaccaatttagcaatgatggattacaactaggagtttatgacacagatagtaattagaaaagtcttctatcatacacttgagtcttgcatagactacgtagacacagggttgacggatatgattatctaaaaaactagccgtcttaccttcactgtccatgataaggtctagcgcaaaatattctacaaagaactgagtattatgcttcattgcttgaccatacagagtgtgtaacatagcatgtcctgttctgtcagcagcacatgcacatcgataggcctgcccacctgaagaaagcacacacagttatagggactggaataatatatgtcaagattgtcttttcaaaataaatttagaaagctacgacctttcccaaaatctaagctctggcctccaaaggcccgttggtatatctttccatcttcagttcttgaaaatggcaacccatagttttcaagttctataactgcttttggtgcttctctgcacatatactgaatagaatcctggtcacctggaaatggataagaacaaaatgttagaaagagagtgaaactgtagaacagtagggtagttgatataagatgccattccatgttagtaactctttattataacctctaggtgttttgcagcctaaaagaagtaaaaaagggaaccaggaattaaggcagcttaccaagccaatcactacccttgacagtgtcatacatatgccatctccagtcatcttccgtcatgtttccaagagcagcatttatgccaccctacatacactcttgtaaattagtacgtgaatgaagctcataaacataccagaacaataaaagaagtaagagaaggctctaatgatgaacatcaatggagcaaaatacatcaaccaacaaaattgaaaagtttagatgttaacctaggcatttagacataccaaaaacaactgttgctgaatgactcatatcaacaaaaagtataaaaaataaagaggcacaaaaaagattcaaacatgcaaaacacacaaaataactaggtaggacagtaatataggcattaatcaattaaaaatttatatgtatagcttcgatatcggtaacagtaatatcgcaagtcaaggaatacatcagatctgcataacaatccactgtgaaatgcatatctgacttaaaggccagagaaacagaacaactgctcttcaaaattatcttaaatacatagaaagtttagaacagacaaccaagaatggcaggactaaaagtccaggacactgtatttattcctttaaaatgattgttgattataaaacacaccgtcttagtgacacgtccattcactgagtgctaatatcaagagcagatgcaataaaataactggccttttctgttgacaaagcatttttttctgttgaccattggtgtgcagtgaattccctgatgaaagggagctatgctcaaactggccctagtactttagctactacctaaccatatttatctcatttgtactgatttggttagcgtactgcgcagtacacaaaaagcataccataggacaaatgaacctaaacagatggaaattacttagcacataaatcacaaatggacataaagcatcacatcaaactaattctaaaactaaccatccaacataaatcatcgtaaacacaatgaaagcacatcacaaccagcatctcagttcccacaatacccaaccaatgtttgcatgatgcacaacaaatctattgtcactaaatgcaagcctaagtaaaggtgttgcagcaagtttttcacagtacctgcgccgcgacggtgtgcgaccgcgtggggaagagcttggtgatgcaagccgtgttgaacccgtgctcggagagcccgatcgccgcacggagccccgcgccgccggctcccaccacgaccgcgtcatacgagtgatccaccaccgtgtacgacgactgcacatcaacaaataaaaaaccaataccatcaatcgccgcccatttctcgaaccaaaccctctcatcgcatcacaaatcaaactcccacaccaccaccaccacaagcagccaaaaaaaatataaataaataaataaatcccatcccaaaatagagctcatcgaatcccacccaaaacaatccgaacacacagtcgcgcggatcaactgaggtcgggggatcgaggggactaccgaggcggtggagaagagcctagcggcggcggagacgggggcggaggaggaggagcccttgcccttggagaggctcctgaggccacgcgagacgcagccgcgccacatctcgggtggatctcggtgcaccgcacgccggcgatggagatcggcggcacgagagaaggcggaggcggaggcggtggaggagggagagggcggcgcggaagacgacgaggtgggagggtggtcgaggggaaggtcgtttattctcgagaggggagggttttgatgggacgattatgccctcggtattgacgggttatttacgataatgccattttctccttttctttttcacttttttttcatttaggaattttttaaaatgtcgtgttagtacgtactccatccgtcccaaaatatagcaatttgtgcttggatgagacgtatcctactacgtactctctcttgttcttgttcagattcgtagtcctaagatacgtcccatcccactaaaaattgctatattttgggatgtagggagtattttttttacaaatgatttttttgtttggtatataaagttttctttttaggtaccataaaggaaatggcttctcccaaattatctataaataaaactcagaatttctttggagtggtggtctaggttagaaacgtatggaaagaaattggaaattattttcacacaagttcagtccttttaaatccaacgacgtataaacactttctcttctttcgctacaacacaacattaataattttgggttggatggggttatcttataataagaaaagaaataaagtaatattacgtctcttttgaatcatgggaatttactcctgattaccaagaaaatgaaaaccattccagcgtttcagagagcctttactagtaaaatatacacttaatgaattgagatcaagatatatagctctgcggttttttgcgtggaagtttatgatctaggtgaagcaaaaccaaccaaggagaaacaaaatttgagaaaatttggccataaattaagttcccagctagatcagccaagggtaaaaacgtaatgcaaaaccaaagtaagatgaattgttggattacttgcagaagaagaggagagcactagttgttgagaagttgagatggctccagcttcagtggagggcggcatgtacacgagtgtggctgcgcaaagcgaaacgcggcgcgtccatctcccaaccaaacaaagcacagtgtgactcgcatgactcccatcgccatcgcttgatcggctacttgctagtacttcacccacgtatacgtactcctcgtatgaattgttcttcttcgttatcctttttcactttgggttgcgttaagtgattcgatgttaatgaaaccacaagggtacacgtaacacggctgtataaaaattggtctgaaagatagcacagttgatcaatcgtttcgtcatgagccgatgccaaattttaaattttaaaagttactatcctatatagaagctcttgctaaatacaattttggcaaattttattatggtacactaaacaatgtaaatttggttttatagacaatgcaagaagtcacatttgcctatgtgaattttagtggacaacgcacctattatttatcatttttggctatttcaaggagatttttttgaagcaagtataataatacccctaggactaaacccatcactcaaccaataatttttatgttagaataagttcaatgatattatgatattttttaggccaatatatatgtatacaattttaaaactaagcatagatgattaaaattttataacagaacactaccatgaatttaatgcctaataaattaacagtattaaagatgactcatcagggtgttaattcatcgcgggtaccaatacggcctccaaaaggttagataataaacaactttataactaatgatcgcatcgcttcgcttattcgggaaataagccaaacatcatatttgcaaacaaaaaataatttgtgaatacacttttatattttgtgttcttagcgatctaaaatcaaatgttgcaaaataaactttgatgaaaaaaacccccaaatcaactctatttttaaggttaaaaattcaaattttgtctgataagtataaacttaagcgaaaagacgaggttgtaaggttaacctataaacaacccatatgtttgtacaatagtagtatttcttagttgatgagatatagtgtggtaccatatcattgtgtacgccacccgtagtattacaatagtatcgttcacacaactcctatgtataatattttgaaatagcccaatttaaacatcaaatgatccatcatttgtaactcgtgtaatggtaagcgtgggtaagaaatagatacgctagtatctgtagtatctagaatatacccatattagtgcatttggactaattaagggttcatttggtacaactcttactatgaggacggagctaattaaggagcggttgggttgaaatgccacttcattgctagttcttttttctgaggtgttattggttggcccttatacttataagccaaaatttaaattttagaagttgatttgaatttgattttttttgtcttttcatcactgtttatgtttattttataatatttgtttttgacttgctaagaacaagttttatactcataaatattttttctatttgttactacctccgtcccataaaaattgaatttctagctttaaacctttgtcccataaaaattgtatttctactaatgtgggacccagtaaactgtaatcttctttccttccatctcatctctaacccattgtcgtgacattccttttaatcaagtttatatatggaatgtgtgcatgtactgtgttcattaaatagggttattgtagtcattagtctatcctattaatatgtccttaattctctagaaatttaatttttatgggacggaggcagtaataagtaattcgaataagccaatcaatgtcttccactagcctggagtacgcggcaatgtcttaccgtttcctaatatgaaccctatactttatggtaattaaagtaggtcattcactcacccaataagtagggcccgcatgtcattgggaagagacgtggctagcgctcaactcatggctaccggcgccggtgagcggtgcggcgtcggcgcgtcgctacggcggttgttggctcaacagaaccttggcatgtcatcaaccgaggtcaagagcacttgccccaacttggatgaggcaaagacaactgaggtggcgcggtctcgatccaacgatagttatagtcgctaatgatgtaatatataaacattactgtaacttgattgacactgtgacataatgggcctattctgtagtaggtcaaagtgaagtgtttttggctgtacagcacagccctatatatggccatatggcccgaggctcgatggcccgctcaaggcccgataaatttggcccagggcccgtccaaggcctagtaattttggcccggccaggcccgtgctggcccggcccaacagccgtgacgtgcctgagcttctacctcgacacgctaggctggcactaggggtgaaaaaaagctcgggctcgcctcgagcttggttggctcggctcgtaagccaaacgagccaagcccaagcctccttttcagctcgttgctgaaatgagccgagctggctcgcgagccgtttgttttggctagcaagcctaggccatcatgtgtttatatcgattatttcactttttttggcgttattatttgtcaacttgaaatttatcattaagatttttttttaaaaaatgaatatataaacttatttaaattttacatgttgatgatttgtttttgttttttttaataattataaaatatatatgaagaggattttcaataggaaggcttgcaagccaactcgagctggctcgagccacgaaatgagccgagccgagctcaagttttagcttgttgccttaactgagccgagccaagccaagcctagtttgttgcgatccactgcaagccgagccgagctaggcttcgcttggctcgtttccacccctagctggcctggcccggcccaaagtttagtgatgcgaaacagacttattctcaaccatggccctttttagattccaactttttttttcaaactttcaacttttccgtcacatcgaactttcttacacacacaaacttccaacttttccgtcacattgttccaatttctttaaactttcaattttggtgtgaaactaaacacagcccatatgtaaggcacgtcacaaaaatatagggagacaaatagacttattatatggtacgacccaaagagtagagatgtaaaatagacttattttagctctctctctctctctctatatatatatatatatatatatatatatatatatatatatatatatatatatatatatgccatagcccaaagaggagggggaaaataaacttattttaaaaaaggcatgatgggccgcacgtgccttcgggctggcacggcacggcccgactactggtaggccgtgcctgggcctgaggtgcagtacgtgggccggcacaacacgtcctgaagtgccgatcgtgccgtgccggcttgattgacttgggccgtgcctcgcccgtgcctaggtcgggccgtgccagacaggccttatagccatctatatacacatccctaaccgaacggtaggggcaccgcagcgaatggtcatctaactaataagaatggtaagtggctaacccgtgaagctcacttataagtcggaacaatgtaagaatccactttattttgatctataggtgagctcgcggattaattagccacttacatctctatgggtgtgttcggcaccccttttcccaacccctctctcgttttccgcacgcacgcttttcaaactgttaaatagtgtgttttttttaaaaaaagtttatatacgaaagttgcttaaaaattaaattaatttatttttcttaaaaatagctaatacttaattaatcacacgctaatgaaccgctccgatttccgcgcgtaccggttgggaagctgtactagcgaacataccctatatatgaaatatcgttgtaatcttgtcccgttgtagctgttgtggtagtgacaagtgtagctacattcatgtttcagcagctagttctaccaaacaagtctattgttttttaggctccactccaatagttatgattgatattttccccaacgtttggacggtctacacaatggtcgcggaaatgatttaagcattttgtttggactgttttctttcctgcacgaatcaatgggcttgttcactttgatgtcatttctaaccataccattttttagcaagttactaaaattgtgcatatgtttggtttcttaccaaattttggtaaaaacgccaaaattttggctacattgccaaaatttggcaacaaagtgaacacatccaaaatggctatattgcctaaatttagcaacattgacaaccttacaaaaattttgacaataacaaagtgaacaagctcaatatgatacgtcctgggtcgatttcccgctcgaacgcgtgctatgcgattatatttcttccatccactgatccatacaggcacaatccttaatgtgaatctaatactccattaaggtttgtgcctgtacgtgtatattagaaatccatcggcagttctttgttgtaacatacggttctctacataatactatgcgtgcatatgatgcagtacgtacgtacagtaccaccggccggcaaatatggaatggagtagaaacattcgtggatcagtacacgcgagatatgtttcacgaaaaaaaaagagagggaatgtttcaaaacaaaacatactgtcctatacaaaaccaacccaaattcattatactaagggcctgtatacttcgcgaaaaaaaaaatttggattgcacatcggatgtttgaccggatgtcggaagggtttttccgatatgaatgaaaaaactaatttcatctcgcctggaaaccgcgagacgaattttttgagcataattaattcgtcattagcacatgtgggttattgtagcacttatagctaatcatggactaattagactcaaaagattcgtctcgcgatttcccccataactatgcaattagttttttcatttatctatatttaatgctctatgcatgtgtccaaatattcaatgtgatgtttttagaaaaaaatttgggaactaaacggggcctttaaagctatataaaaaacgtttaatcctgtattagattgaatttttttttaaccgagagtatgttcctggtgtatcaacgaaagcaccgctgtacgttctcaaaaaaagaaaacacgcatcactcctcgctggatcatcaggtcgtttttgttcacatggcatggcgcagcgcgtgactagctgcagcagcagtgcaaaagcagcagcattagccttgggtcgttgcgtaccgtgaagcacagtgatcccgtgcagagacactgcagcacgcatgcactcctactcctatagtataactgacgagctgtcacatgcaatcatggtcaatttcagatttcaactgggatggatgttcaggtctggttacatctcacttcaaaattttttaacatgttaaatagaatatttgagcacctacataaaatattaaatataaaatattaaatatagactaaaaaataactaattgtacagattgcgactaatttacgagacgaaatttttaaatctaattgctccataatttagtaatgtggtgctacagtaaacatttgctaatgacggatttgctatactggaaggggaagcccgtgcaccgccgcctatttcccgtcggtgcatcgttgccgtcggctgcttccccctccgccgtgcgtcgtttgtgttagattaatgagctaggcccaattaaatcataataaattccattgtcccacattaagagctatgggtaataaaccaccttgaaaatctaagtgaagaggtctcaacttaaatacagagctagtggagagtctctgttgaacggttaagatggtgtacgggacaagcaagtgcctctggaactccgtccgcgcttgagaacctgcacgggtaggcgggcgatcaagtttcatatatatatatatatatatatatatatatatatatatatatatatatatatatatactctgtagtaccaaaggaagaacttcccgactcttgcacttgattcatatatatactcaagtttcatatatatactccgcattgcacttgtttcatatatatactcaagtttcatatatatactctgcagtaccaaggaagaacttcccgactcttgcacttcgagttcctcctcctttgttcctagtgtacgggacgagcaagtgcctctggaacctgcacggataaacggacgatcaagtttttgggtagctttttcaagcgcggctgctcctattcttcgacgacaacgttgcatcttcctctgcttctgcttcaccatggcttatactggagagaacggaggagacaacatcaacggaggcaatacaaatgcctcaacatcttctgcatcgttctctgggtataacattctaactttatttgattttcttcttggtatttacacgttcataatgttattcataggattgaaatcctacgtgaatatcaattgatgtttatgcttattttagcttaagcatgctcatgtttatgtttagccttatcactagatcgcttcttattgtgtatgtcatgtttattgtcttaatattttggattaaaatatgccaaaatatgaccaaatttccaatgttttgctgcttcgcctcctcgctctcgcgagatggaggtcgggggagacggcgtgaagtggtacaagagagagggatgggggtagggtggtgccatttgcgggtaatttcatcaaaaatatgtgggtaatcctttaacgcggttggagttggagttgaggagcgataaaaatgccaccgtctgccggtacattttcccggagcgattctatgcgctccgctccagttttgatcaaatctgaaccgtttggttgcactccagctctagataagatgaatctgagagctggagccctgccaaacgagctcttacactaaatcaaccaccctatctaaattctatcacaataccctcgcaaaataatgagattctattataataaatttttggtaatatttgcacatattgcaatgtcaatgtaatcatgcatgtttacacaaatttgtctgaagactgaagtatcattttcaattccaccctagctaaatttaaattgttcgccctactacaagtatggccttgtttaattcccaagatttttttccctaaaaatatcacatcgaatctttcgacatatgcatagagcattaaatataaataaaataaaaaaataattacacagtttgcatggaaatcgcaagacgaatcttttgagcctaattagtttatgattagctataagtgctacagtaacccacatgtgctaatgacggattaattaggcttaataaattcgtctcgcatttcacgtacctattttgtttcattcatgccgtggctggcttaagtaggtgcgtgtaacagaggcccttaatttgttgtttcaacctaaaatttggggtgaaaaagtttcagcaattatttcatcagagtttcttctttcccctacttatttactcaatggcatggctgatgttaagttggtgcaaaagaagcaaactgattttcccttcttttgttgttctaacccaaaatttgcttgaaaatcacctaatcctttcagttctagctgaattattctctgcgtgcatagtattgtctcttagttgtccgcttgtacatactagtagtatggaacaactatctatggctaggcaaatgcaagatgtaacacttgagggtatgtgcaacctgactaaatgagcgactagttatgatattaattgctagcccttcctctgctgtttggtcttacttgaagcaacagctgctttgtggtttgcacttggcaattcctagcaatcaatctgattatgtttcttccttcatgtgcgaaccatagggcacgacatctcccaagactacaactcctactaccaagagctgggaagagaacaaccctgagcttcttgctgaattggttaaacacaagcaaactgcgttcccctggattagttgtttgaacctatttttttttttttttaaaaaaatccatcaacgtctcttctttcacgtacctatctgcttcatgccgtggctgatttagctaggtgtaatggaggcaaactgatttccccccttaattttttgtttgaacctaaaatttgcgtcaaatctttttcatcaaagtttcttcttcctcctaaaatttgcgtcaacagaaacaaactgatttttcccttagtttgttgttttcacctaaatttttcttcgaaattacttatccttctattctaatggattttgtttgaaaccctgcctctctatgcgtagtattgtctctagcttagttgttcgcttgctaagccgtatatactacactagtagcatgtaacaactatctctagttttaagagagagaaggcaaagcgagaggagatgaggagacatacaggtatagaagagaaccagccgtaagtcggcatggggagcgccgccatcgcgctccctccaccttgatgttgtttctcttctcttctattccttccccgtgtcggcttgctcattttcgagatcccggatcataggtttaatccaccgtcctcgcgcaattatgccagctcgctccccgggctcaggatctgtttgttcttgatttcgcgattcaacctgccctccccggaccgtgattagagcccaatttggggggaaaaatttcagtttttcccatcaaagtttcttcttttctgtattcatttgcttcaggcctggctgatgtgcaacacaagaaaactggttttccctgaactgcaagttgtttcaacctaatatttatgcttcgagattacatcttttagttgtaccgtcaccctgcctctgcatgcataatagtattgtctcttaattgttggcttgctaagagtagcagtatctatggctaggaaagtgtaagaggtaacagttcataggatatgtgcaactgactagttatgatattcctccgctgcttggttttacatgaagcgacagctatttagtagtttgcaccttgcaatgcctagtaatctgattatgtttcttccttcatgtggaattgtaggataagctgcgtggcacggcatctcccgggactacagctcctactggcgctacatttgaagagaggaaccctgagctgtatgctgaattggtaaaacgtctttcagatcaaaagagaaattccaggaggatgaggctggctggtgcttctgcctattgtgttgtgttcgtcaccctgttgtaccttggcgatcgtgagaagcgtttgtttgagaagtctttcggtgttggcaaatagctttatcatctatatattattcaccagggttatgtattttctggtgctaagtctaatggtttcttagatcgccgtctttacgttctgagactattgactttgttatctatgactctcctgtagcatgcgtgtgacatgcatttgtgtacgattaattaattatctatgtattactaccttaagtaccttctatatatctgatatgtgcaagtagatgctatggcgatctcctatagcagctttggctttaattgctctatcgaaaatacatatccatccatcttcatccatccgttaaatacctcgaacaaaaccatttttttccgaggtacattgatacactaagacaacgacgttacagtgtataacagctgaacatcgcgtatagacgacagtagttgagtttgtaggaagaaacatgaatttggaaaccgggataatatacttagcgtgcaggcgacgtggctacagttaaaaccgcaccggcaccgcacgtactacgtactatactaggccggagccagtttagctgcggcgcggggcggggctgaagggaaccgttcgattcatccacgtgtcgtccatccggcgcggtgacaaactgacaccagcacttacgcacccactcactccttcttcctcctctctactactctctttccccctctcctctattgaaggtgaaagaaaccaaaaagaagagagagagagagagtgtgtgtgagtttgaaaaacccaacccaaaaccctagccttcgggaaagcctcatcgccggcaaccaatccgatggcgcttcttctgagggtggtgaagaaagggagggggatggccgtcgtcgcccagagcggcggccgcggcctttccatggtggccacgagcgccggagccgcgggaggaggagaccttgtcccgaagctgctccgcctcggatgcccacagcatgtgttgagattataggcatataatgatttaatttattccataaataaatcatggcattgcagatgtatactagcattaacgcatcattagatctacacatgtaaactaagcagtaaaacatgaacagatcaaatatgcgcaacatattgaacacgtaccgaggtggtagaaagacctgctgctcggcaggaacttttcgcgattgcaggcgtttacgaaggcgcgcagcatgcgagcgaagaggaagacgagccatcgcggacgaacagggagcagtcgcgctaagcgcttcccaaaaaccttattgccgccttctcccggtgcaggacgtcgaaggcagaggttccggagacctgctctcctgatcgccggtgcacgccggcgagcgggatggagtaatctacgagcgacggcgcagcacagagtaggaggcaaacactagattgatttttcgtgtgttgcgtgaagacggcaggtcggtttatatagagaagggtcgcttgatcagggcgcccgcacgatctccactgcgcgtaaccgaaccggataagtcgcgcgtaacttatccggactccacgccgttttcacgcaccggatttttcggaacatttccaaaacaaaaacgaatccgaatttgcagcaaaacaaaactgcaaaaggaggctgcatctgcgcaaggtgaggaactaatttttggcagaccattcgacgcgtgcgtcgtgcacgcgcgccgcctgccctgccaggcgaggcgagcgagcgcgcgcgtgttccccctcttctctccaccacacatgcttcaagtgactaggagggcattctcccttttaaggaggtctccctctcctagaataagtaaggtggtactaaactccacatgcatgccatcctatgaggtgggcttttgtgattttctaaagaattaatcttcgagtgggctaaggcccatccattaattccaacagcctagagcagcggcggcaccactcgtcgccggagccggcgtcaccacaaccactgccaccgccatggctggggccgcgaaaggcgcaacctttccgccgcgttccggggccatggccaagcaggatctggtgggggtggagaaggagctccgcttcggatcaccagccatggccacgcccacacccaccaaaggcgccaaaggagctgcctttccgtgccctggaccaggagccttggtcactctggacctggttccaaagaagctctcgtttgatccactgcccggcgctgctgcagtcggtggcggcgaggctcccaagaaggtggtcacctcgtcgccgtcgtcaccctcgaagaacgctcgtctttacactggtggagaaatgctctttactcctggtttagaaccctttgtagtcccggttttccaaccgggactacaaatccgggactaaagatcgctatctttagtcccggttcaaataaccgggactaaagatcgatctttagtcccggttggtaacaccaaccgggagtaaagagggggaatctttagtcccggttggtgttaccaaccaggactaaagaggggaagcgacagttcctcgagatttattattattattattttgttgttgatttgctaatggctagtgttaatctatgtattttctcccgaatccaatgagatgcacatccccaaatcaacatcacaaatcaaatacatcacaaatactacacacagatcaactacatcacaaat

SEQ ID NO: 8683 - DNA, 22624 bp, Oryza sativa
ggggccaaaataagtgaaactatatatttacaaacgaaaaataatttatgaataaaatttttatatacgttttcttaactatctaaaaacaaatactgaaaaataaactttgataagaaaacgttaaaatcagctctaaatttaaggctgaaaattcaaattctagctgataagtataaacttaagcgaaaagatgagactcttagaatatccttgtggcaggaacaagattgtgtgaagattggagggagcattatgaggttgttaaaacgttagatatgaaaaggctttcatatcgatgtgtagtaagagaggagtgagtgttcgctgggaatcggcgcgcaccaccgcagaccctgcccactgcactaggcgcgattctcacgtgtatactttacatgttttaaacaattttttcctacaaaatttatttgatctacaattcagttacaccatcatatttggtacaagtaaatcttatatataggctgttacaccatccataattcgattacaggatgtcacatgattatatattttttaaaaaaaatatatccgtacttaaaaaatatataccatatactccctccgtcccataatgtaaggaattttgagtatttgcttccactatttgaccacttgtcttattcaaaaaattttggaattattatttatttttttgtgacttactttattatccaaagtactttaagcacaacttttcattttttatatttgcataaattttttgaataagatgagtggtcaaacactagaagcaaaaacttaaaatcccttatattatgggacggagggagtatgaaatatcaagttaaaacgaatgaaacattataaaaatacttcctgaaacatccagagaagctttgttcggaagttggttactgccggctggcagcagcagcttgaacaatatttttgctgctgattcagttgttgcaggcttgtagtacagcgttgtggctgcacaggaattgttgccgaacacaggccactatatacaattttcacaaataaaactagtgaaacatcgtaaaatacttattgaaacatccaaataataccatcagaaatatttaaaaagattcattgcaacgtaaaacttaaatgtgcaacggaattgaattttggttgaaacattgtttccaatacgcaaaacatcaattttcactaattgaaacatatgtattttatatgaaatcttgatgtagagttttaattataacgaatagaacaatataatcgaatcacatatttgataaataatttagaagaaaaatcattttgaagattgctaggtaaacaattaatgcatattacatgaaatatgcatactcctttatggagagacagtgaatgagcactttccgtggagaggaaagaataaagaacaactcgcgtacaatgtttttccctttgcattcccccaattattttggttgttcaggagcggacactgtgtaggttataggaattcacccaaacttttttctcttgaaaagaaatactatatgtaaatactagaagatataatgatactgcataagtaaatactttgctgggcctaatacctcgttcttaggcctaatactctgctgggcctcctcccgactcaccggcccaataactgcccaggacgcttcctccctaatcgtcatctcctcccggtccccgtcccccgatccccaatcattcctcccctgacgccgcgccgcaactcgccgccactccccgtcgccgccgccgccgcttgtcgaagctggtttgggggattcggggatttgacggattagaggtgactgaactctcgctctcctgctgaaatcataccgtatttttgtgatgatttatggggaggaacctaggttttgatgagagaggcgaacactgatttgattcatccaacgcgttatattcacatcctaacatccagcctttgcgcctacgcatcaggaatcgcagtcgcagatggaggccatggacgacatggcggctctgacggaggacatcctcctccagatcttctcccgcgtgggcagcatcaaggacctcttcaagttcgccgtgacatgccggcggtggctgcgccgcttcaccgacccggccttcctccgcgggctgtgcctggacagcggcgagggccaccgcgcgcgcctcctcggcttcttcttccagcagacgagattctatcgctgcgaaaagatgatcaagatgcgggtgacgcagcagagctcggtctgtccgcccaccttcctgccggcgccgtggtcgccgctcggcctcacggatcgcaccctcacctccttcctcgccgccgacgacgacaccttcaactacgccgagcccctcgcagcgcgctgcggcattgtcctgatgcggcttgtcccccgcaccgcgctgatgatagcgtgcagccacctcctcggcgtctgcaacccgatcaccggggaatgccacgttctcccgcctctgaatctctccggcctccatcgctacttgaccagctacgccatcatcacgtccaccgacagcgacctagatgggaagcagccgccatcatcatcatcgtcagggcgctccacgttctcgcagctgtacctcgtcgtccaacacaagaaagactgtaacgagtacttctactcctactctgctgctacgtgcagctggagcgctcccaccatgtgcgtggacggccgccgcttctccctggtgggtgagagatccgccgtcgttcacaagggcgcggcgcactggctgtttattgatcgtgtatctagcgcaacccaagatgacatactgtacaaactcaccgcggcggtggacacctcagaaatctccttgacaaggctcccctttgtgctggaggctcaccgctcctctgcgtcagtggagacggcaaactttcggtcgcttgcgtgtttcccatccacatgagagtttggactcagcaagatgacacccctgcaacgtggctccgcactgtgatcaggataccattggcggtgccttacccagactattcccatatatgtcagccccgcgagaagtggtttaacttcaacaggggatcaatgctcgtgctgtacaggagcaacggcgtcttcatcctcgacctcgagaagaaggtgatggaaaaggtcatggactgcttactgcccctattcagtgataaactgaacaggacggctgtggcgtatgagatggacttggttgagttctttgtgctccagctcagtggtctatgtagagggtctacaggataattacagatgttatgcagtgggaaaatatatgttctagaataagcaagtttaagttaaacaacagcatattacatggatcatatgcaaactgtgcaaactggcgagtgatatatcttgttctgtagcacggcattgtcattttgatatggtttgacctttactggtttccactgtaacatcccttcactggaaaaacaaattctcttgatcttacagttcacaactacgcaggtggcatttgcggcacagttcacaattttctttgtttgcctgttacgcttgctagcaccttaatttgtcaacttattgctagtgttaatacttatacatctgatggtgtaaatcaaaatagtttctttcatctgagaatccctgattgatctgtttgtaagctgtgttcttgttttgtatggtctgagtaccagctgctttaggtagagtaactgactgtcagttcctgagaatgccgtaatgctagttgtattccatagaactgtgattccttgcagtttacattgtctttattttatattcgatttcttattattattcggctagtaaatgcgagtttcctctggaatctgaatgtaccactttgagctcttaggagttgaagtgagttggagctagattgttagatcctgacgtttttttcttgttactgtgaagaacctgtttgtgctttctctaaaattggacttatatgcacgatatccttgattattttgtctactgtcaaaatctgatcacccatttatcagaaatcatgcattagtcacatttgtgataattgatcgtaggcaagaagtctatattgatgtttgacatccttgagtagtggttgctgatttgtcagctattgtctagacatggaaaagctactgctgaaaggccttcgagttctgaaggttatatactcctacatcttacatagaatttggatagaatgcgtctgttttgtttgtagttagtggcttagtgcacactgttgaatttgatagtatttgcaatacagtgttatatgctgctaaactaaggctgtgttcgtttgtgtgagatagggtgagaaaacacctcgttttccgcgcgcacgcttcctaaactactaaacgatgcgttttttgcaaaaattttctataggaaagttgctttaaaaaatcatataaatccatttttgaaatttaaaatagtttatactcaattaatcatgcgctaatggctcatctcgttttgcgtatcttcccaatcttctcaatctcctatctctcaaactcaccctaagtgaaaatggatttccttgtgaagattgtagaaacttcactaattgccaggattggtctaatttgttccaaggtttatggcattttttgtatttctttactcctttaaacgtttctggtggcgccgccaccaccaaatgacatttgggctccacataactagttgcagaaaaaaatgtgagagtttgcgtgctcagtgatgtcctgaagagtatgtgtaacacaaagatgcataacagaagactagttatgatcacgccgttgccaaaggttatcatcaagttccttgtatgttgtccactatgacttattttggtgtatccctactttttaatctctagatataaaactatggccaatatattgatagaacacagctgtaactaaatgttgcgtttctgactgcaggatacatatggaaattgagtttgttggtgatcacagttacaggtctggtaagatagttattgagtttaacgattgaacaaggtgtctggaaataccaccaggtgcttcaatctttgagcaagatttttctgcgctctccattgttttgtgttgtgtttgtttgcagtctgaaccatgaaagaggaaggagaaagaatgtgagaggaaatgttcttggatttttctctagcagagagatttatcttgtacgacaataaatgtttgctgaattcttagtgtcatctcaaaattcgatttgtctaaacaggaaaaactgacctattaatcaaaatatatagagtttaccctgtttttaattattattttcttcttatttacatgctgtttatggttacagactccatggcaaaaagcccaaaacctgaacccaaagaaagaacagcccaccaccacagcgctccaaaaacggggcccactgcacatttttctttgcaacgtcagcgatccgcacggaaacgcatcgcagccgtctaaccgaaaaggcaccggacgtcacacattcatccacgtcatcgatccgcgggacaagcctctccaccaatcagcgcccacttttacccactataaactcaccgcacccgtgtcctccttccacaccgcaatctcgcaacacatcagcacacaccgctccaaagcaaaacccacggacccgcttcccctccccgagaagaagagagaagcatccatggcgcccaaggcggagaagaagccggccgcgaagaagcccgcggaggaggagcccgcggcagagaaggccgagaaggcccccgcggggaagaagcccaaggcggagaagcgtctccccgccggcaagggcgagaagggcagcggcgaggggaagaaggcggggcggaagaaggggaagaagagcgtcgagacctacaagatctacatcttcaaggtgctcaagcaggttcaccccgacatcggcatctcctccaaggccatgtccatcatgaactccttcatcaacgacatcttcgagaagctcgccggggagtccgccaagctcgcccgctacaacaagaagcccaccatcacctcccgggagattcagacctccgtccgcctcgtcctccccggcgagctcgccaagcacgccgtctccgagggcacgaaggccgtcaccaagtttacttccgcttaggctgcatgccttcctctagtttgttagtagtagtagtagcagtagattgatctgtttatgtggtagtttaagtggaaatgatgattgcaaatgaagaattgtgcggggcttcttttggggaactcactgatctggaatagtaatgctttttatgtcatgtgaacatatctctggttgccaattgattttttgttttgtagaattgattacatcgttgatgtttgcatcgtcttgaaaatactctgcttgtgactggaatatgattttcggaacatctgtctgtactccctctcccaaaatttgaactggaaatttagctaggactccatttttggtactgctcaagtacccattggctcaatgtattttgtaggtttgatggaagggaagcttgatggccattttggttcatgatgttgcatttggaacataaaaactgtgtactattttgagctgataactttgaaatctgaaagtaagttttgcttcagcttcatttggtactgtttcaaatcgaaatatagaagttgaaatagtaactgaaacgccatatgtcttcgcttactgtttcaggagaatgctgttctctttactccttcctgttctgaatgtccgaatgggtgctttttctttgttactgattcgcttgtatgctagtaactgggaaacatgaggtatgcatctcatctctactgccacatcttctatcatgcttgctgttgtggtgcctgcagccctgcagtacataccatgcctgaaaaatgtgaccaaactcttgtgggttctacttgtaaattgtaatgttatcctttctattctctgtccagcatggttgtttgaggtgtactcaggttctactggaagattctcttgtagcagcatttttggcacgctcatataaaagcttcggtagctactgtggaatgtgatagaaataatgggtctgatgtttttgggaactctccttcatttctatttggttaactgtttgagcatttaagcgtttatctttttcgatagcataaattgttatggatttgatattctgtgtttaatctgtataattgcaatatttgttgctgtgtcgtatatgttgaatctgagtcagggagttagaaattctgcaactatggatgtgtaggaattggcaatgaaatcttactcacattgtgtaagaagccaaaactctcgtacttctacatcgtgcaatcaacattattgcattctgtatgcatctcttacactgacatgcatctaagcttaatataatgctataacaccttgtgtacctctgattatttcccaatgcaatcatcaactctacatgtggacctcacgtcctcacccaacatttagctcaagtactttactgttcatttcttaaccacctgagacagaagatattcatctctgattgcatgcatctttgacacagcatctgctaacaacattcgatctttggcttgttgctttgagcaggatatgccaagtctaaggacagaaaccaagcagtcttgaacaatacttcgtgttatgcttgcatctgttatatctttattttttgcttcttcatgtagccagattgttcgatcagctatatctaggactcggccaggaaatgctgctgatgcaaatttgtgcagatccaccgaatccttgaacatgtcatcagtagggctccttccggtaaatatctcaagcaataatatgcctaagctgtaaatatcacctagtctggagactgcagaaccttctccgtactctgcaatattttcaatttcagttaatatttaagtatacctctaaatgacataaatttccaattcggaatggcccaagttgatcccccacccattagggtggagggagactaggaagtgggaataaaggcagaatgcaatatttggaactacctggtggaatataaccaatggaacctctgattccaactatgctgtctgaatgttgcagtgctttaactatactttcagggaggattcttgatatgccgaaatctccaaccttagcgctcatgtcttctgcaagaagaatattacttggtttcaggtcgcaatggatgatcggtggctgacaatggttgtgaagataatccagtgcatccaagatatcaactgcaatgccgagtctctgcgaaaggctcagtgtgttgctagaagtgggattgcctgacacgggatgaagccaaccatctaagcttccattgggcatgtactcaaaaactaatgccttgaactcgtgaccctgtggattgatacttgagcaacaggtgatgatctttataagacaacgatgtcgtactcttctcaaagcctcacattcaacctcaaaactcttggcagatcctgattgtcgaaggttgaacacttttacagccacaattgcaccttcatcttctaaagtacatctatagacggaaccataacttcctttgccaagcaaattagcttctgaaaattcattacttcctctggctaatgcataatatgaaactctatgatagtgttcatcagtacctgggattgttgctcgactattttgtctccgtttaagcttcctgcagaactgaattagaacagtagctgaaactaacagcaagattgatcctgttattggcagggcgattttaagagacttatgccaccgtttgttgtttttgcttgcatcaataatgggacatggagccaagtgaagctgaggtattccaccacacaagttgtcgttccctgcaaccgatgcgtacgtaaggttcttgaaaactccctcatctggtacttctccttgcaaattattgaatgacacatctaatttccacaacattgtcaaattttgcagagttgctgggatgggtcctgaaaaattgttctgtgctagaaatagttgttgcagattgccaatcctaccaatggtatcggggatcctaccagataacttattcatggttaggttcaggatgttgagccctttcaggttggtcaaagattgaggtatgccgccttcaaatgagtttttatctagcagtagcgattccagcacctgacaatttcctatactgtcaggtatttgaccagacaactggtttcccgacagtatcaactggtttaggttagccaaggtagcaacttctattggaaggggtccagagagagaattgtatgacaagtccaagtaccaagagagtgaaggaagctccaagatttcctttgggattgacccattaagacggttggtcgataagtccagaacaaataacgtttttagcttcccaaggcttgcagggattggcccttccaaattggtgtagtatgcgtagagcctattcaaatttgtaagatttccaattgatgatggtatgaggcctgacaagctggtgttgtacagggcaacttcaaccaaatttgatagcttcccgatgctcgctggaatcactccagataaggaagtgaaccccagatccagcgtgtccaagccaatcaaattgccaatgtcctcaggtatgctcccagagatgctattattatctaagtagagcttatggagtgtggtcgacaagttgacaacagagtttggaagttgcccgctgaaagagttgtctgagataacaagctgttgcagctgactgcagttggttagtgaagtgataaattcccaacccttcctgttatttgcctcaagtcggttgccatacaagtataatcgccgaagagatttcaaccttcccacagtaggaggcacaaatccactgaatctattaccataaaggagcacaattgtgagtgatgaaagattgaagagagaagaaggtattactccactgaattggttatccgccaatccaaagtattgtatgccagggaacttgtcaccgatgttggcaggaatgcttccttgtagcatgttgtcatttgctgcaagcaccgtcagtgttgacaggttccacagagaggacggaaatatgccggagagactgttctgctgaaaactaaattcacgtagagctgcagctttgccgaggtccagcgggatcaggccctccaggttgttgttgtccatgtacagatactgaagcaatgacaggttcgctagcgatgccggaattggcccagtgaagctgttgttttgcagctgcagcttctggagttgtgtcaatgtgttgcccagctccaccgggatgcggccgccaagctggttaaaggcgaggcccagattcttcatgctgatgcaggaactcagattggcagggagctcaccggaaaacgagttgcctccaatgtccaggatctctagacgccggaggcggccaaggctcgggggaatttctccatacagctcgtttgagctcaagtttaggctctgcaagaagctgaggttcccgatgaccggagggagcccgccggcgagattgccggagggcagcgtcagcgccgccacccgcgccggcgtccgacggtcgcacgtgacgccctcccagctgcagaaactggtgctgctgttccaggaggcgagcgcacttgagctgctccccctgaacgctgccttgaaggcaagcaacgtggcctcatcgctgctgctgctgctgccaccaccagcgacggctgcaacgatcggcgtcaggatgaggacgagggataattcaagcctcaggctcatcatgatcgtcatgggacgtattgtgtttcttgattggtttgtgagagtggtagtgctatatcttagtaccaatggctgtccgtattatatggagagtatagatggtctttgaagcaaatttggagatgatgacagtttgttgattgcattcttttaattccttttttccatttctggaacacttcgtttgactttataatatagtactccctttgtttgtttgttctaaataccttccgttcaggatatgtatctggacaaccatatctagatgcatatcttacatccattatttatggacggaatagtacttgtcctgatacatcattcatactactaatattgctttggtcacttgtttttttttccctaaaaaattacaaatatttttaaaaaaatcatcattaccagtttaccacgagctgcttttgctcatcttagcattaacatttagttaataaaactactactgtcaaagctaaaacagtgctaaatcaagctaaaacagtgctaaatcaacaagaccgttctaaatcaacaaaggtcttggaccgaagtggcgaaagcaatggcgaaggagaccatgctttggaagtcggcttattaagggatccccgctgtttcgtctttacgaggtcgtggtagccaaatttagcacgagatattcctctagtttttcataatgtcctttatcggtccctgcttgttttccttttatccttataaataacttttatttctcttaatgaaaaaaatacgccccttgcgtattaaaaaaaatccacaatgaaaagtatttcgtgaacgagggaatatatacatttcgaacggtcaacgcggccaggtgcatgttgttagtattttcgttgagtcggagagaattgactttcagaacacggcgatttaggcggctaggcgatcgacggaaggcttgcatgatcaacgcactgttacataagcctacttgcagatggagatgggtttaggctagctgcctgcttgaagacgacgacgtcgttgtcgtctcactgggatgttgacgtgggcagattaccgaatacgtagcctaacaagtcgtggagtggctttcagagcaaagaaataggcccaattagcccataaacaaagacagcccgccaagaagcctgacaactaaattgggctggactgggctgtaggcgtacgccgaaggaaagctcaaactctaaaaattcgcccaccgacgcgcgccggaaaccgccttaactcctcccgttcccgctcacatttttcggcatcccaccaacccgtcgaccccggcatccaacgtcgtacatccctccacgtcatcgatccgcgccgcgtgctttccaccaatcaggttgcacatcccctcctctacaaaatcatctccccccgtctcctcctttccccacgccgcaatctcgcaaatcccaccgcttccctttcctctcctctccccgagaagaagagggcggcatccatggcgcccaaggcggagaagaagccggcggcgaagaagcccgcggaggaggagcccgcggcggagaaggccgagaaggccccggcggggaagaagcccaaggcggagaagcgcctccccgccggcaagggcgagaagggcagcggcgaggggaagaaggcggggcggaagaaggcgaagaagagcgtcgagacctacaagatctacatcttcaaggtgctcaagcaggtccaccccgacatcggcatctcctccaaggccatgtccatcatgaactccttcatcaatgatatcttcgagaagctcgccggagagtccgccaagctcgcgcgctacaacaagaagcccaccatcacctcccgggagatccagaccgccgtccgcctcgtcctccccggcgagctcgccaagcacgccgtctccgagggcaccaaggccgttaccaagttcacttcctcctaggctgtacgcctgcatctagtcctagtagtaatagtagtttttatatgtttatgtggtatattgtttaagtgatatccaagattggaaatggatgttaaattgttggtttggtagtcattggctgtaagaagaatggctttgggttgcttttgggaaacacttgcttcacggatcgggcataagtaaccatgcttttataacatgcgaatgtgtgctttctcttgtgccatcattgataagaatttaccttgtgccagtgttggtgatgccttcgtttaatgttgtggaattacatggttgctagtattttgtctcgtaaatttcttttcatgtcattggaatttgatttctgcagcatgtacattggtgttaggtactgctcttttgcgtgtgcctcttttgcgtgtgcctcatgtattgtttagagattttagaagcacacactttgggacaataccaaattgtttttagcctgacaagaaatttagtttcgtgctgtctgcatttgaaacaaaaagtttgtacacattgtttggtgcactagtacatgatataatctgtcctccattgctgttttattctgagattagaacttcgacaagtaagtttttcttcagcttttgtcaggtactgattttcaaagaaatatagcgacaaggaaatggtaactgaaacatcacattacaattattgatttttaagattatgttgtgcccgcatgttttctcattccgttctgaatttctgagtgctgctagcttatgagctaactgttaggtatgcatcttataccaaagttttcagtcaggctattgctctattcaagatatgcattgccttaaggcatatgtgttaagattagaccaaactcttgttgattctacttattgtaataatgtgtcttgtcctttgattcactctccagttaggtgattctccctccagcgaagttggaggtgaataagttacatccaaggttctacgtggaatattgtcctgaatttcggttgggcttgttccataatacattcgctgtcaaataactctaatttttatgacagcataaggattaatatggatgtatcataatttttactcatggaataatttcagttgctattatgaatttgcagtggttggaataacatgcccatattttgagagcaaatcccttggttctatctggttattggtttgagcacttgttcttttcttttcagacaacatgaattattattgatttggtattcagtgttagatctatttagatgcaacctatgttgatgctatgtttatgtgggtgggaatcgtggaactttgttttcttatggttgcaagggtatccctatcaggtaggactgtaggagtagttggttatattttttttattatggatcatggatgcgtagaagtttctgttggaagttgctaccatggtttcgtgtgtaagaagccatatggtcagctcttcagtattatttgatcagcatgattacattgacattctgtatacgtctttgcaatgacatgcatctgagctttatttgataaatataaatcatgcagccttgtattccaacgattatttctagtacaattaattgacactacatacatgtcttatccaacatttagttcaatgccaaccatccaagacctgagatattcatctctgatggcatgaatctctgatacagcatctgctaagagcactcggtctctgggttgttgctttgagcaggatatgccaagcctaagaacagccactaaacactgttgaataattcttctttttgtgcttgcatttgtcacatctgtctcatttgcttcttcatgcagccagattgtctgatcagctgtctaaggctctatcaagaaaagaagctgcaataaacttgtgcaaatccattgaatccctgaaaatgtcatcatagggcttcttccggtgaacatctcgagcaacaatattcctaaactgtaagtatcacccgctctggttactgcagaaccctccccatattctacaagatatgcagtcaaaattagtttctaactgtaccattagcatgtaagatatacaaagtgcacaatccgaccccacccatgagggaggaggtgggaggacttgtgggaataaatacaaaaataaaacttttaactacctggtgcaatatagccaatggagcctctgattccaattgagctttttgaattttgaagagttttagttgtgctgtttgggaggatttttgatatacctaaatctccaacttttgcactcttgtcttctgcaagaagaatattacttggtttcaggtcacaatggacgattggtggctgacagtggttgtgaagataatccagtgcatccaagatatcaacagcaatgctgagtctctgcggaaggctgagtgtattgctagtgagattgcttgacttgggatgatttcagccatccaagctaccattgggcatgaactcaaacaccagtgccttgaactcttgaccctgttggtcaatactcgaacaacaagtgatgatctttatgagacaacgatggcgtactcttctcaaagcctcacattcagcctcaaagctccttgaagatcctgacatttgaaggttgaacattttcacagccgtggttacacttgcaccctcatcttctaaagcacatctattaacagaaccataatcttcctttgccaagcaggttagcctctgagaattcattacttcctcttgataatgcatggtacgaagctctgatattgttcatcaataattagggatgtcgctcggctattttgtcttcatttgagcttccggtggagtaaacaatagaagcacaacaactgaaactaataccaagactgctcccgttgttgttagagccagtgtaagagacttaggccaccgattctttttctttcttacatcaaggattgggcatggagccaagtgaagctgaggcattccgctgcacaacttgtcatccccagcaattgatgcataagtcaagttcctgaaaacaccccattgagcatgtttccgatgttagaaggaatggtgccattgaacatgtttatatccaccgtgagcatgatcagtgatgacagattatacagcgacaccgggagtttgccggagaggtagtttctgttgaagagaagataccttaaacctgcgatgctgccgatgcctggcgggatcatcccctccaggtggttgccgttgatggcaatgcctgaagcggcgacaggttggctagcgacgcaggaattgaccctatgaaggtgttgttcgccagcgcgagcgtgggagccgtgtcagcgtgttgccaagctcaccgggaatgcggtcgccgagctggttgtattggaggtacacggttgtcaatctgacgcaggtggtgaggttggtggggaactcgccggagaaggcgttgtggtccatgtcgagcacccggagtcgccggagccggctgacgctctgggggatctcgctgtggagatcgttggagctcaggttgagccgccggaggaaggtgaggtttccgatggctggtgagagcgtgccggcgagatcgctggacggcaggtccagcgccaccacggacgtcggcctccgccggtgactgcacgtgacgccctcccagctgcagaagctgttggcgctgctgttccatgaccatgaagcggcgctgccaacctgccggagctagccaccagcgcagccgccgctgcgtgtgatagagatcctaacctgcagaggtcatcaggctacggaggaccagagcggggggctggagatccaccccactgtgtgcaccgccatctcctcctattcttcattggtgatttctgcaggaccagcaccacaaccatcgtgtaatcaaatagcgcatccacccaaaccaaataaatcaaggtacaagcctgctctgattccagtgcatttgattaacactaacgtttctgtttgcaatgctgaaccaagcaacatctatgttagttgatcctatgtctgtgtgggagcctgagaactttggtgcctcatagctgcatcggtatctatatcagatagatggaaattttgctagtaaatatggttcatggttgcataggaatgtgttgaaatctgctagtaccatatatggtttcatgtgtttttctgaagtaaaaactacagcagttcaatattatttaacaaaccgattacattctctgtgtacatatcgagaaatttgatcaaattcctcgtatgtattttacaacggctaactgggtccttgttatggctttcaatagaagccgggtcttttgaccttctctaaaaaaaaaaatctgggaccttgtttacctccgattattccaggcaaaatgattgacactacatatgtatattatctagcatttagctctagtgctctattgctcgttgcccaaccacccgggacttgaaatattcatctctgatcgcatggatctttgacacggcatctgctaacaccattcgctctctgggttgttgctttgagcaggatatgccgagcccaaagagagacaccaaactctgttgaataattcctcttgtcatgcttgcatctgtagcatctgtataatttgtttcatgcagccagattgtttgatcagctatttccagggctctgtcaggaaaagcagcggtagcaaattcgtgcagattaagcgaatccttgaacatgtcatcagtagggcttgttcccgtaaacatctcaagcaatattatgcctaagctgtaaatgtcacctagtttggaggcagcagaaccttcaccgtactctgcaatatttgcaacacacacagttaaactttaagtgtaccttcaagacaaaaaaaaatacgaatacccctaattctacttctatctattagaagaggagggaaatgaaggaaataaggacagaattacaattttttttagctacctggagcaatatagccaatagaacctctgattccaattgagctttttgaatttagatgaattttagttatgcttttggggaggatttttgatatgccaaaatctccaaccttagcattcatgtcttctgcaaggagaatattgcttggcttcatatcacaatggatgattgatggctgacagtggttatggagataatccattgcttcaaagatatcaataacaatgttgagtctctgtgaaaagctgagtgtgttgctaggactgcatttgctcgatttgggatgaatccaaccatccaagctaccattaggcatgaactccaaaaccagtgccttgaactcctgaccctgtggatcaatactcgagcaacaagtgatgatctttatgaggcagcggtggcgtactcttctcaaagcctcacattcagcctcaaagctctttgaagatcctaattgttgaaggtcgaacacttttacggccactagtgcatcctcattgtctaaagtacatctataaacagaaccatatcttcctttgccgagcaggttggcttctgaaaaatcattacttcctcttgacaatgcataatatgaaaccctttgatactgttcctcaataaccagtgatgttgcttgtctgttttgtcttcgtttgagcttcctgttgtgtaacagaataagaacaataactgaaaccaacaccaacattgcacctgttgttggcagggctattgcaagagactttagatgctggttcttgttcttgcttacatcaagaatgggacatggaggcaagtgaagctggggtattccaccgcacaagttatcattccccacaaccgatgaaaaggtcaggtttctgaaaacacctttaactggtacttccccttgcaaattgttgaacgacacatctaattgcttcaatagtgtaaaattttgtagggctgctggtattggtcctgaaaaattgttatgtgctagacacaggtattgcagattgccaatgttactaatggcattggggatcctaccagataacttgttcacggttaggtttagtacgttgagccctttcagattggtcaaagattgaggcatgtctcctccgaatgagttattatctagcaagaggaattccaacacttcacaatttcctatactgtttggtatttggccagaaagctggtttcctgacagaattaactggtttaggttagctaaagtaccaacttctgatggaaggtgtccagagagggagttgtatgacaggtccaagatccaagctagagaaggcagctctagaatttccctgggaattgaaccgtttaggcgattgaatgacaaatccagattaaacagattttttagcctcccaatggttgctggaattggcccttccaaattggtgtggaatgcaagcagcctattcagtttggtaagatttccaatggttgacggtatgaggcctgacagaccagtgttgtatagggcaaggtcaaccaagtttgttagcttcccaatactttctggaattactccagatatgggattgaaccccaggtcgagtaatctcaagccaatcaaattgctaatgtcgtgagggatggtcccagagaagctgttattctctaaatcgagcatctgtaacgtcattgacagattcacaatcgatcttggcagctgcccaccaaagaagttgtgagagagcatcaattcttgcagctggctgcagtttgctagagaagttacaaattccgaaccctttccgttatctgcctcaagctggtttgttccgatgtatagatacttaagagaatgcaacatccccaaggtgggaggcacaaatccagtgaagttgttatctgcgaggtacaaatctgtgagccttgaaagattggacagagaagatggtatggccccatgaaaacgattctcatgcaatccaaagaagcgcatggcaggaaacttgtcaccaatgttggcaggaatgctcccttgtagcatgttgagccctactccgatcaccctcagtgccgacagattccatagagagtgggggaattcgccggtgagcatgtttgcttccaagctaagctcatgcagaactgggaagttgccgaggcatggtgggatcaggccctccaggtggttgtagtccaagtataggtcctggagcaatgataggttggctagcgagggcgggatcggtccgatgatgctattgttggtcagtagaagcatctgaagctgtgtcaacgtgtttcctagctccaccgggataatcccgcccagctggttatagtcgaggtccaggattttcagactgatgcaggaggtgaggttgacagggaacgcaccagagaaggagttgtagctcaggttgagccattgcaggcgtcggaggcgaccaatgctggtggggatctcgccgtagaggccgttggagctcaggtttagccttcgcgggaaggtgaggttcccgatggctggggagagcgtgccggcgagattgctggatggcaggctcagcgacgccacccgcgtcggcctccggcgactgcaggtgacgccctcccagttgcagaagctggcgccgctgctgttccatgaggcgagcgcgcttgaattactcccggtgagccccgccttgaaagcaagcagcgatgcctcatcgctgcttgacgcagcagcgatcgtcaggaggacggggaggaggggcagtccaagccgcctcatgagacgtatcgccatgtggatttttatttggtaagcgtctttggagcaaagtttagtttcaggctggagatatatcgctgctttctgattccatttttccccccggcccccttgttgtaagagttcacttgacctcattgacttcaagtcaccgggcaggaccagtgtaattgtagtactaggagcagtgtgttccacttccacctacttccttcttgtgataaaaaaaccaatctaatatgggatgttccgattcgttgcaatagaatgtgttatatccagttttatatatatatatatatatatatatatatagtaaatttgttaggggcaccatggtgcccgggctccatagccatccaccgtccaaatgctttaagatccgtgcaacacactagaggatgctatcacacattaacgggtctaacccgataagagttgcatgcatatactttccttagaacatgcatgcaggtatttccatttttactgtgcatgtatttacaaatttgcgccctctaatcatgcatacacattatgattagcactttccattttctatatcacatttccatatatacaacgtttgcatgcagatacttaccttttgaatcacgattcgtttttgaaaaatgacgccattccactaattgcgattattgccatctattttcaagattacattccattttcaagatgcacatataaccggctactgtattcctttttttgatttttcttttccacactgtttcacggtccaagagctagctatccacatcgtcttcaccgagttacctcgccgggattgctcgccatgccgtgaagagggccgacgtccgtggttttcgtcaccgacgacgttcgtccacaagcctcttgctggaaaccagaactcctcaaccatttttgtcaagccattacagcgcctgatgtccaagtgccttttcgctgccgtcgctggttgttcgtgagcttcggaacagacattattcaccagcgagctgcattacctgaaaggtatggatctcagtgtttatcactcacacatcttacattcacatgcagtccctgttatgtatagatgatttgccattcctcttctttttatctactaaactgagcacatgatgaatcacctggaacctaaatttatagattttttgttgaaatgcagttgaatttagattgttttaggtatataacatgcccgttcgaatatctttaattgcatccagtgaataaaatttaggtaggtagtgaaacagcagcaatgtctcttttacgtggacatctcaattataatctttgtaaatatagatttaattaattttaaattgaagtatatgacccgaagagaatcatattgcttgttttaataatggtagtttttaatagcatgccgcggcttccaaagtgtgcgagcgtgagaagaaatgtgaagcgtcgttccattcatgatgatgatgactttgtcactccacctacaaggaagaaggctgttcgtgttaaattcgtggcaccggtttcgcgttgtgtaccatcttccatcacacctatcatacagagatttagtgctgaaaagaaagagctggtagctgagatgggttttgaggggctgctgcatatgcccctcataacaaaccatcgtgacttcagctactggcttttgtcacgggtatccccaacacgttcggctatcgaactagaaagtggtgaggttttgccactgtctcctgaggatgttaagaaggtgcttgggattccttgcgtaggggaggagctgcaagcacccaatgttgagtttgtttctcatgtcaagaggttaattgctgaaagaatgaaagttgctagttttaaggacgttaacaaggaggtattggaggatgtattagataaacaccatagagggcaaatgtcaaaggctgagaaagaaagtttcaaaacagcattcctaatgcttgttatgatgaaatttcttgcgccacaatcaaatatggacaataaatgtccaagatatttttctgcactacttgaccccaatgaaatagcaaagttcaattggtctgggtatgtgttgaacgagatattggacgcagcggcaactgttcaaaagaagcacgctgatg

SEQ ID NO: 8684 - DNA, 37202 bp, Oryza sativa
  unsure (1)..(37202): unsure at all n locations
aaaggaagtagcaattatagatcgatcggcgatcgcacatagaaagagacttgagtgttggataatagtttggctatagtgtattgcagaatgtcaagaatcgatcgtttgtttgtgaaaatgtcaagaatctttcagtctttcacggggctgcacatatatagacaccagcatgctgccacacgtaaaaagcgactcgtgtctttgtatcttgtgctttacgactccgtgatgtacgtcgtcgtacgtatctagcaaaggtcaaatgttcacaaattactaatttgaaacatttcaaacaatttttgagaggttatgaaagcgctaacaaaaccactcaagacagatacgtggtgatagagcagtgggtggctgggtgcatatatacatatatattctactattatctataaaaaatatacatattctactatctcctttcggaaatattttgcctacatcaaacaaagaaaaataaaagagtacttatcaagatacaagtcctagtattcacaattaattacacacatatatgctctccatatagtattacatcaaggtgatatgatttttctaagaacatttctagtctatacataactaagatgtacgcagtcgaacatataaaatcatactaaaaaatgtgtataccaaatgagagtttctcgagcataacaagacaatcactaatatttcatcttctaatctcaagtcctcaatattctagtggagactggagagtacataaattcagtgactagtgagagtgagccaaaactcctttttgactcttggggcccctgcacgaatttttcaagctgtgcaaaacaatggagaaggaatcaatatcaatcaatcaaattataatccgcacggaacgatcactaaataaagaacattaatcaagccgctcaggcatgattgatggcctaaatttaaagacaaggggaaatgcagattaaaggcgaggaatgaatcatttcggcctgattatatattatgctgctgcatgcaactactagaacattgctgttcctagcttacattattacacaggtacaggatgtgacaagctttatttcgatttacagaatatccgcatacgtatacagtacacgtagcaaacaccgcacatttcttgttctttggaaattggctcgtgggttccactgtatgttgggctatttggttagtagaaataatatgatttttttattaaaacactatcaaaacctcttatttgcaggtactttttagggcaacatattgactccagggttaggctcaactacaaaggcacgatgatgatatcaagctaataaagtatgcatgtcgtaaacttgagtcgacgattacgcacctttacaccaacttcagatagagattctcagatagaatttagtaattgtgggttcttttatcttgtgttggtgtttactagtttgtgtttactttatgttatgttagtgtgtgctgagattgttcatgtgtggactttgtaataattgaatgtaactcgttgagcaaaggtcggaatgttattccattatcttaaaaaaaagaccgagtttttcaccttgccctagttctatataattccaagcatttttttccctaaatttgtaaagaatttgtatggagttaagatcctagacctagagcttgagtcctagctagtccgcttagaccagtggtatatttttgatcttactatatcttttgttagaatcttactataattactaacattaagattgaaagaaaaatagattcacgtatacatatagcatcccacttacgacaccatagcggtggcaactttgcaggcagtgccggattctcaacccctggccgaaacaaaaaaagttgcaagtaaagatcgtgctgagatgcattataccccaccaagtaatgtacacgtggacggccaggaaggcaagattcagatctcaccgcgggatgagattgagtggctcagaatggctctcgatcagtctctcagttacaccaagtggcagcatgcactcatcactgatcgcatcatcagctgcaggaaattaaatcgagcagctaatgtatagtggccggggcagtgggccagtgggacccacctgtcggcctcacgtgttcaagagcgaaaataaagtaaaatatgaccatttgatagccaccatgcatatatatatatatatatatttatatttaagagaaaaaaagggagaaaaggaggttctagcttaggttcttccacgttcaaaaattcattcccatgggtctggacggttgccatggaatgtcctgcctttcttcacctaacgaaccaacatatcgtcactgttttttccgaaatgattaatcatgatgctccccactaccaagcatgcatgtatcaagctcctattgacacgagtaaagctcaagcatagccttcaaattaattaaattgacctctaattaattaatttttgttcaaaccacacttacgtagttatagtgatggagccagcaacaaccgtaaagcctagtcaatgaagagctcctggtgattattggtttgtcggttgttctatacaatagttatttgggtagctcagcatgatgtatactgacgacactaatttattcgttaatggctagaacaaaacaattgtatgaaattgtgagtatatatatgcatttatataaagtgttcttcaagtacgaaaagttcgattggaatcttgttatggaggtcaggatacatggaatcacaatcaccttgatctgcaagtggagggtcactactccatgtctccacatcgaagggaccaatttggctatctaagtagggtatgctgccttgacaaagagtgcatgtgtgtgcctttcttcacagttcacagttaccatacattgtggtcttgtggatgagtttggaaccagatcaatgctagctcatacagctttctttaatttttatcttgcatctccatcaatgtttggaatgaagcttcctcctatctagcttaaagctgtcgcactacattgacacatgtcacatgcatggacactttagtagatatgttagaatgaaggcatgagctagcttgtgtgaatgtcaacttcaattctgtttgttactctcggtccattctaaattgtatttatttttagcatgcattaaatattacaatattagaatttaatattttaacataagcatttcttcacctatgttcttgtctcaaccgatcactattatgtctcattttatttctcacatactttaatttctcatgtcccatctcagatccaatcataactatttatcatctcgatcttaatttcttctaaaacttttataaatacttatattttaaaacgaggggattactatttgacgcagggctgcgaacaaattaaatcaaacaagcatggacaactagggcttgagcctcatgcctgactccatgatctccattaattgtaatcttgaacgataccgtgcaatttttgagaatatttaaacttccattagttaaaccctacgcgtgtagattttctagctctgccactatctctgaataatactactgttcatgtgttgaaaacatgaaatggatgggaataaagccgaaaatcctggcacaggaaagtctaaaaagctagctcgatcgatgcaaccagcagatgtgcctgcagccatccatggtggatctatcaatcatgtctattggccggctggcctggatggaattttctcggcgcgtgccggcctagcttcttcgtctaatggattaaagctaccatttggaagatgagataagaatttaactcccaaagattttgagagcaactttgttttgaggacagtgttgactcaaagtcaacgacacaataggatcagcgtatgtacagtaacggtctgtttggtttgaggaatcaaataaccatctaggatatgggtcacctattatgagatcatatctcaaatttagttgaacgttacatttgtcatattttttttacttggtactatatgcttttgatgagtgaagtcgatcgatgggcaaaccaattcccattacatgtatatatatagaccaaactacacatttaattagaatcaagtcatcagttgaccatctcagtacttaaaccaaacgccctaaaccacccaaagagtatatattttgcgtggttgctattgctgatcgatatatatttataatatattttgactgaattacagtttgggttattttttattgctaaagtttcacgttagactatccttgaacaaatcatttctactttgaattgggtaattaaatttacaattcactcatataacatagatggttagggacttatggtgtgcgtctagatatgaagagattgtctacattagactacattgaaaaattactgagatgaaataaaatatataatgtatctatgtgggttttagtccaaaagcctcaagccacctagatccgctcctgccgatggtaacattctctaacagtatgacaagcattaatcaaaataagtgtgtatttttaagttttttaagcaaacattaacaatctctatagatctctctattaattcaaagaaatagcttgcctctattatccttaactaggaagatagcccacgcattcacgcgggcatgtgtcgtatgctaagtttgagatatttataagagcgaaatattaaacggagcacatctaccacgatttcttcataaataataaacgtcggcattaattgattttataattttctaacctattagttttatattgtatcatatttaaataatatctcaaagcaattatttataatcttatttatcatttgaaattaagtagacttattttttagaaaacatgtcaactaaagtaaaaataaggtgtttttgaaattgcatatctattatcatagttcattaaaggattaattaggtggaacatgaagctccactaaatgtttgggtttatatagtttaatatgattgatgtagtttgagaggcgatcatatatgaacatttcatgtagggtgggtgagaggctccatgcagcctaatatgaatacgataacgacgaaatataattgcgcattaatattttaaaaatatcatgtaccatgaatatattcttatttttttattatgtaagatagatttaacgattataactaatagtttactggtttaaaaggcataggagtattgcagaaatgtagtttaaaaattatggttgttttaacatccaacgttattgcgaagtgagcgcacctcaactggttaggtttcttgtggtggaacttgcccacctggattcatgtcctagatttgacatgggtatcagtatttacgactaattattctttcagtaggtgacgtacccatcgacagcaagacgtcgtggtaacttcttcaatctcaaaatgtgccggctcattcttttagaggtactaaaggggtagggtgcgtgcagtttctgaaagatttccaatattattggttgtttctgttttagttttatagctaagagagagggaagggacgctaaaatcaatttgattttttcttaaaaatgtatggattagtgaacaatagctagtccgtagtccgtagaatatatataatccgaagtaatgaagttttttaataatatagttaacttggttctttaattttaaattttatagtaaataatctaatttatctctacttaggctacattcgatctcattggttgagcttatgtagggcacacaaaacgatataggtcattaacacatgattaattaagtattaaatattacaaacatgaaaatagtttttttattaaaaaaatgtatagaatgtatttgcacaacatgcacagtttagtagttgagagagcatgctcaagataaataagggagccaatctgataagcacattacaactcaaccttaaatttgttacttatgtacttaaaagcgtagattgagccattaacgactaaaattctgaccgtgtttagcgagaaaaacatgcgacatatttttagaaaatacattttttatttgtgttttcaacaatgtcctgagtaatattttaattactcattatttcatcttgaactatcaatacaggcttattgatgaaaataaattctatctatactcaacaataatagtgtgaaatgatacatttatttgttattttatattatattatagatctacttttggctgtgtatgtttgtgaaataatatatttttcttatactaccaccttcaccaaatatatgacgttggtcatcaatatataaaaaaaataaaaatacaaaggaggcataacagaaaatccagattaaagagcgttgtttctttcggtagtttcactaaatatttaacgttggccgtcataaaaaaatacagcggaagtgaaaatctaagtttaaaaaaagcgatatatttttttaaatttccagtagtacgtacgtatacagtatttttttgccgtatatagtttcttcttttctcagtgatggttgttaatttgtagagtaagtacgtatgccttctcaaccttttctggtcaattttttatggaaagtgttactcggtaaattaggagggatagattactatttataatagatctaatccaatggtgtaaactaatgggtccaccaacttaaatgaaaatcgagggctagatttttttctttcttctcagaatttttaagttttttctattttattatagcgtcatgtagcagcttgagagcgtttttagagcacaatgtggcagcatgagagcgtttgtaggaagtttaatggacttttagtatataatagatagaagatagatagatagatagatgtacatagacaatgtactccctccattttatattataagttattttaactttttttcttaagcaaaattatttaaatccgatcaagtctatagaaaaatatattaatattttcaatacaaaacaaacatattatcaaaatatatttaattttaaatttaataaaattaatttggtgttgcagatgttgctatttttttataaacctgatcaaatctaaagaattttgattaagaaaaaagtcaaataacttataatataatacagagggagtatgtctactgcgtagcctaccacacatgccctagttgcacaaaatatgatttttgcctatatatgacgatctatgtgccatcatatattctattactcaatcaatcaaagtagtgagcccatcaaagtatataaagtttatatattgggaatattattttcctattatgatacaagacaatgtggctctcacgtgtaaccgctatagtttctgcctctccgacaccctaaaagcttttacactatttatacctcgtaactaatgctcttggttccgccactgatagtgcatgcagtagtgattctactcagcttgaatgagaacatacatggcatctcgatatatctcatcaaccatatatatgtggtagcaatgcaaattggatcgaataaaccgatccatacctaactcgatctgttatttttgacgtgtgggccctgtcatcgtacacattccctgcacgtacacttcttcggccgtgtgcatcccgatcaatgtcgacgacgatcggaatcctgacgtcacatatatagcacctctgttttttaattgataacgttattgactttttgtcacatgttcgatcattcgtattattaaaaaaacattattctaatttatcttgttatgacttgtgagtagttttatcacttaaagtactttaagcgtgatttatatcttatacgtttgcataatttttttaatacgacgaatggttagacatatgtttaaaagttaacggtgtacatcatcatttaaaaaccgaagtatgtacctagaaaccttatcgttgacagtgaattagtgcgcgtatatcacatgagatcgattgccagaccgatcaatgcaaaggtaactaataccttttgacaccagaatattaatgtgatggatctggatcaatttcagggccagaaatcgcctgaaggagctagggagacagcagaatatatgatgaatcctgcagtgactggcctgcagagaacgtaactgaagaagtggatgcactggtccatgcatcgagatcgatcgatcagtgtcgacacaggcagctgctgcaatgcatgggccagatagatagcacttcgggtttgtcaatttggctcatcagacattcgatcgaacaggtcaaatttgcatccatatatggtaccctgtaggtatactggcccttggcaccgtctagaagccagggcatacatgcgtatcgcgatccatgtgtacatgtgtatcgcgatcattgtatatacttcattcgtcccaaaactgaaaactgttgattcctaagtttaaaatttgtcgtaatattaaataagttgatttatactcttttattctctttgtcctataaaaacttgatttctagtttcaaatttgcactagggcatattcgggggagttcagattcaagttacatagatgcagaattatctgggattcacacaagctgtttctcagaatctaaggccctatttgaagaagtactttctggccgccgtagcttcttacataatctccacttcctccaaatagtccagattctgagaatttgtagctatagaatcttaaaataaactaaaatccaactaaggcctagttttgttctcaactttttcttcaaacttccaacttttccatcacatcagaactttcctacacacataaactttcaacttttccgtcacatcgtttcaatttcaatcaatcttctaattttgacgtaaactaaacacactatgcttattataattttaagctctcccagacatgccaaactctcctacataggcaaaaaaaaaactttacttttaggagagttacattaattagtaatagtacaaatatttgattttgggataaagaaagaacgacgagtaattaacaggtggaaaaattaatttcggacttaggggagtatgcatactgctactgattaatctgatcccggccggtggcttactaaactatcggatcacatgcatcgcatcagccatcaggtgataacattcgtctccgcagcttaaaatgcacagaggtcgaggcgccgccctgcactcaccgaccgtcagatcgaccatcttagtacgcatgaatggaaagattacatgttaataaggttgatataaacaattcaccagttagctnnnnnnnnnnnnnnnnnnnnnnnnnncgtttagtaagcgggaggtcttgagttcgactctcaacgaaagcatttttttttctcttctatttttgttcattttgtccctcacagcacttgtcttcacgtgtcagatttcaccaactatcaaaatgtgcatggttgagtgtattccaaactcatcttcttttttttttttttggtttcattttgtccctcacaacagttagtcttttcacatcagatttcaccaattattcaaactctgcatggttgagtgtaatctcaaactcatttgtttccatgtcactgatgacacataatcgcacaacaaaattatgcatccgatgtgattaaaaaaaaattgagcccatccaccgtgcaaataaagatctaaccacttcaaattggacttgtccatgctgtgtccaaatggcaacaattactgcatgccactgaatttcccagagcatgaaatggttgcaatcagtaaaacgttagtggaattagatacccatgtcgcatcgaatcttaaagcagtctgaatgttggacaagtcctcaatctggcctgcagaacagatgcatgctcatgaatcatctcacatcaggatgacaggatcagttgcaatttgccagttcagctccaacaaaccgaggttggtgatccgggaaaaagtttaatgaaaagttgttaatgtccaatgctgcattttgaaggcagacagatgggaacatgtgtgagttggctctgtaattatttcaggtgttgtttgtagtaaactagtattgttcttgctttgctgctagctaatctctttttgaccatggtgcatattgatccatctggttttgaccatgtgcttatatatttcacctcagatcagctcaattagtggtgttgccttttgaatatagattgactaaccttgtagtcaaatattagtggaattggatcttgtcaatctgaaatgtgtggagatgaaagcgcgaaatcggtgtctgttcatacaatacaggctgcacatactttggtcagggctaaatgatcggttttagaatataaaggaagaacagcaactgttcttttcgcgatcggtttttttttttttttttgaaactgagttgactactgaggaagaacaatgaaacttgataattcctacttcctagttttccaaagaggtgggaaacctgttgaagatgacaaaaggtggtcacctaagaggtgatcatttttttcatggtttatctggtttcttgattagttactatacaatatcgtgtacatattctttccggtttcaagctcttcactttgatacattttgcaggtttaatttgttgctttttatcctttgacaattctgtatgagcttatgttctttgctattgcatttgcatgacttggattatgtctatgttaatgggcccaaattatgccatggaagtagcacaagtaccatgattctgaaggcccatcactgcaagtcactgggcctctgctatgaacatgctattcctgaatcttgtgaaccttcaacagttttgggtctcaaatgcacctctacagagatcaaatttttattttaaacacacaagagatcaaagtatgaaagtaacaattttaacagtgtaccgtttggagcatcttgaaacttaccaaaaaaaagtaaggtgttaattgatcaattccaagttgtcagaaacacacctgaacttgcatgtgcttcccatggtgccaggcttgtatgagctactgaaccgaattcaatcaagtttgggtggtccatcttagcatggattcaatgtattccagagcacactaattaacaccattggctctgcaagaattctctgatcatgaattctaacatgttgacttgcatttagttttcttcctgtgccattcccatttctgaaggttgagtacagacatgtttgctctgaattcactgcattcaagaagaatccaaagcttgagtctttggacaagtcattgagatttgttggttaagtcagtgcagggaagtacaaattaaaccattttcagcaaccaaacatcatttcattagagagaaacagtattgttcagatcatctactgtaactgagatgatgcttactatacatgtgtcactaaacattttcagagtcctactttgactatgcacgcagtaaacttcagtgcagaaacagctgaggtgagttgattactgcctccaaaaagcaccacagggtggtctgcagacaatagtacctgcagaaattcagatcttttctctatgtcttctagtttaacctgcatttctagtcatttctatccagttaaatgatgaaaccatgtaataattagggttggtcgatcgtgtgtatctgatgaatcgattgattccactaagatctgtctcttgttctctgaaacaatggcacgtcagtcttcactcttcagtctttcacccacaaattttatagatttttgtaaggcaaaaaagctttttttaaaaaataacccggctttaagactatagttggattgctattattgcagattaatgttggcccttctagatgaaaattctttgcccacaaattaaaattagattttactgaaaagtgaaagtaaaaaaaaaaacaatttctttgatttgtgttattagactgaagttacaggtatgcaaatgtcattgctgaaaacactggtaagatcagaacatacagttatacttatactacacaacatttgtgtgagccacctactagatgctagaagtaaaatagtttacctctcctctctctttttttttcttctgagcatgcagcaagtcatgcatgcaagaactgcacctaggagcttgtgagaaaaagcattcttcagtttctttcagaaaaacatgattcagagccgtaactgtaagcctgtaacaacgggttctatcctctcatcatccttctgagagcagaagagaagagaaagaagaaaacaacagtgtgacagtatgacaatatgggatcaagctgctacatgtaattaatctgtagtactatatatggtcccccattattcataaaaaaaatttctaatgtgcagcatccactgcacaaaaataaaaaaaaacacaaacttcagttctggaccaccaaaaagcctcctttttttccccacaaaacactgtggatggattacagaagcagtcagtccaaaacacattcaagaacaaacaaatcatttaaactgatctgaagtagtagttctgaatctaacaaatgtattgctggagcttggacagcacaaaagcatcagaaactagtagtagtgtcaagtttctaatgttgactgatcagaattaagtagattggtcagtgtgaccaacttatactcagcttgctctgaactttctgatgatagctgttgccaaacggcagtgcataagcaatcgaagatctgtgggtgcgtgtgcggtgagccatgatcttatcttgaaatcgatcttggcctggctggctgaatcaagaattgctccaaaagacatgaaaactgctaataatgtaattcgagtacttgcagtgatcatcgatgcatgcatgctcatctgtaaagtgtacatatggcagttggtgcaatggcttttcagtggtttaattcatggactcccttcaaggaggcagcctcctttgctctcaatcaatgtgaaaagaggatagtggaggataatactcttatgttttaactactccctccgtctcaaaatataataatttctaaaagttttagcagaaattaagagattaaggtgaaattaaatcatagattgttgtgattggttgatgcgaagaagtatgcagagaaattaaataggagatggtagtaattggtcgagatgagggagtaggtgaagaagttactatattttgtgataaattttgaatgatagaagtcgctatattttaagcggtgtagaaaggtagtgtgagatactgcaaattattagggtattagagaatatcacaaattaaagctaaatactattggaccttcatgtgcctctttaagaaccataaaattgctctttttaactatggtagaagtaaatagtgaccaagataggcttttttggagatcacaacattaggtttaggcttgttggttagatttcttgtcacctttgcagtaggagtgccatgttctcttcataggacgacaagaacatcaagttggaaaggactatgataattgtgaaattgcagatgctcaggaacccacttaagaagaggaccctcaagttggtgtgcatatatgtgtctgaatgattgagtgatggataagattagagcagttgtacggggctaaacacacatggtgttgcttccttgcgattgtgaccggggagatctgatgctgatgacatcatgaaaattttcccaatttgcatcccaaaattttccaaacgaatggttgccaaaaagaaaaaaaagaaaaactgaattcatcttgttctttagcactgatgttttactgaagaatttaccacaaactcaatattttttctgctaagaaataactagaatgtagatagttcaaggatgtgtttatggaccttatggtcagggaggcaaatgtcaaatgtgcaattagttagtagggtttaggtagagttgcagttggagcctcccaggcttctctgaagaaaacagcagagttgctggtccagcatgaaaagtcaatgacatgtggggcccactttggagtgagagaaggctggcatcagccaccatgctatcatggatcttacctcatgcacatctttccagctcacacattttgacctctttacagagatagtagtattgggcatctgaaagtactcctaagttttatcaagtcaagatgctgagtgtgctactctgatgaatcctctctcgctttcacttcactttaaagttttgctcccatactgctgacctgatcctgacctgcaactctgcaaccacaggttggtagttagttgttgttattgttaactgaacaaaatacacctgtttgatgttgtaaagtttcactctgaatcttgcccaaatccttttgcaaagccttcattatgctgatcattgctattggagatttggagtgatttgaattagtatagccagcctgcagtagtaaactgcattcgaaatatgatgaaccattaaaagatgagtaacatgcagtaatgtattcggtaaaagaagaaagaatggtgaatgagtatagtagcataatcttcagtaaattaagctaagcaagcaaagcttaaggacgaaagcattaatatcacccagggtacatttcaacagtcgaggagaagcatcttatacagtggagaaagggatgatatgcattaactggccaaatctgaatgagtggttcttgttcaccagatgtgaaagtacatttgttctttgccttcagacttgaggtttttgagtacaactcttgaatgcaacacctgctcacttcagcagtttacactctcaagtacagataacagaacaccttgataatcatgattccacagttaaaaggttatgctgtcacattggatggagatagcatttgacattttggggctcagattgaaagaaaaaaaaaagaagctaaaatggattcagataactaagctcttaacttcctacaaagtttcttgattgtagcaggaaactggaggttaagaagcttatatttacaacacaaatacctaagataccaaagatacatgccacacaagaaattcagtggcctacaatttccacaccctaaatgcgaaggcctacataccacacaccctaagcattccagattagaaacccaaacttcaccaaatcaaactgaactgtaacaatttagttcagcatttcttcatatgctgatgagatcaggtggcggtgaagatggtgagtttagctgctgctgctgctgctctttggcttcattggcctctgcagattcagctggcactacaagatcaaacacagcaccttcaccactaggaggctcctctccttgcttcgatgtcggcttgggaagctcactgaggatctgcaccacctccctcattgtcggtcgctgcacgctctgctcctcgacgcaaagcaatgcgacgtagaagacgtgcatgacctcgtggaccggcacagttgagagcctagggtccaagatcttgatcacatgttccttgttcgagtccgtcatcgtcttgacccactgaacgatgtcgacgccatccccaaactcccctaccggcttctttccggtgatcagctcaaggagcacaacaccgaagctgtagacatcgctcttctcatcgaccttgagcgtatatgcatactctgtaaatccacaatcacaacacagtgcatgattagccaacttgaagacatcaattctcttctagaatagcaagacaattcttaacaagttaaaacaagactacaacagaaacacaatagtggtatatcaaaatcaagcgaatttaaaccatatacgaaggcagcacaaatgaaccaaagatcaatcttttacctggagcaatataaccataagagccagcaattgcagacatgcactctgatgtgccagagtcctgcaagaacttggcaagcccgaagtcagcaacatgcgcttcgaaatcggagtcaaggagaatgttgttcgacttgacatcgcggtgcaatatcggcggtgagcaatcatggtgcaggtagcagagccccttggcagcctcaacagcaaccttgtaccttgtgtcccaatgcaggtggccacccttcttgccatggagtagctccccaaggctgccattgggcatatactcgtaaacgagtaggttcgtctcattgttcgagcagaagccgagcaacctcacaatgtagcggtgccggatcctcccgagcgtctgaatctctgcggagaacccgtgatcatgggaggaaccacggctcatggcgggaagccgcttcaccgcgacatgttcaccatccggcattgtccccttgtacacagtcccagctccacctttgccaatgatgttctcctccttgagactatcaagcacatcgtcgcaggtgaattcgaggcgctggaatgcggtgagcttccaagcacgcgcctcactcgccttcttcagtgatcgggccttcaagatcgccatggcagcaaatgcaattgaaagggcaagcaatcctagcacaatcagcagcttgaagctattggagagtccaccatggctgcggccgccatggtcagtgccgggagcaccgggatggcatggcccgaggtacggcccgcacaatcccgggttgccgacgaaggatgtggcattgaagtagctgaattgccctgtggccggcacgagcccggacaggttgttgtacgagaaatccacggcggtgaggctttgcattgcggcaatggtggccggaatctcgccgtcgagctggttccttgacaggttcagatagttcagtatccgcatcccagagatggccggcggtatctcaccggagaggttgttcctactgaggtcaaggtaggtgagcagccggcatttcccaatctccggcggcacgccgccgtcgaacgaattgccactgaggtcagccttggacagctgctgcagccggccaatctccggcgggatttcgccggtgaacgcgttctgatcaaggagcaatttctgaacaccggagaagctcccgatgaacgccggcaatgctccggtgagctggttgttggagaggctaatctggccaagattcggcgcgccggtgccggacaccgccgggaagccgccggagatgagattatcctggagctccacctgagtcaggttcgggagctcgaagagaccctcggggatggagccattgaggtagttgtcgccgaggcggacgcgggtgagcgacgtgcacttgccgagggaggcggggatggcgccgaagagcgagttgccgagcgcgatgagcgtctccagcttgccgccggcgcagaggtccggcggcagcgtgccggtgaggcggttcgacgagaggtcgagcagctggaacctcccgttgcggcccagccggcgagggatcccgccggtgaagttgttctcccatagctgcagcacctcgaggctgggcaggtcgccgacgaactccgggatgtcgcctcgcagcttgttccggaacaggttgagcagggtgaggttcttgaggtcggcgaacgtcgccgggatctcgccggcgagcgcgttgttggacaggtcgagcgagctgaggctcgcgagcttgccgagctcgcgcgggatgccgccggcgaggccgttcacctgcaggaacagcgtgtccaggttcgcgaggttgcccaactccggtgggatctcgccggagaggccgcagttggcggcgtcgaggcggacgaggtcggtcatgttgccgagctcgggtggtatcccaccggagtagctgttgaagtagccgatgtagagctccctgaggctcgtcaggttgcctagctccggtggtatcttcccggagagctcgttgccggagacggcgaggtactggagcctcccccaccggccgtactcgggcgggatcccgccggagaaaaagttgccgccgaggtggaggtggcggagctgcgccatggacaccacctcgagcgggagcgcgccggtgaggttgttgttgtagaggtcgagcacccggagcgcgcggagccgcgacagctgcggcgggaaggtgccattgaggccgttgttggagaggttgaggtgggtgaggaacggcgcgaggcgggacagcgccgccggaatgggccccgacagcgcgttcgcggcgaggtcgaggcgcgccaggtgctgcagccccgacagcgcggcgccgggcaagccgccggtgaggttgcgcccggacacgtcgagccccaccaccgcaccccgcgcgttgcacgccacgcccgaccacgcgcacgggctcgaggtggtgttcgtcgtccacgacgcgagcgcgcccgtcgggtcgtcgagcgccgccttcaccgcgaggagcgcgtcggcttcgccaccggccgccgccgtcgccgccgccgccacggcggcgaggaggacgacggcgaggtggtggtagtggaggcgcattgcgcggcgcggcgtggcgtggcgcggcgagtggagacaagagagtgtgaggagagtgaggaggcaaaggtgagagctttttggcaatggagtcgtctcctctcctctcctgctggctgctactgctataaaaaaaacacatgtgattattttattttatttttatttttatttttgctaggaaaaagaaacatgtgatgttttgttggattttatgcttgaatttttactctctttatttatggacgttttttcctcttttcttgcataaagtttgtgttcttgttttttctttttggtttttggctggggatggatggtgtgttgctgttgtgaatttgtactggtgtctggtgtctttgagtgtgaaattgggtgttgttaactttttaggatgggacagacaagtgtagatttgtagttcaagtgttatttatcaaaagttgcttttctgaggtgacactttttttttcctttttgttgcttggctaaatatttggctgccaagtttcaaaaaggctaggtagcatttgtcaatagtaaccttgatttaaggtggtgtttggattcagggacttaactttagtctctatatttagacactaatttagagtattaaatataaactacttacaaaactaattacataaatgaaagctaattcgcgagacaaactttttaaacctaattaatctataattagagaatgtttactgtagcatcatataggctaatcatggattaattaggctcaatagattcgtctcgcgaattagtccaagattatggatgtgttttattaatagtctacgtttaatatttataattagtttccaaacatccgatgtgatagggacttaaaaagttttagtcccatctaaacagggtcttagcttgattgtgatcaatctaaggtatattattttttataggaaccttgcaacaattattgcaggattatgttggagctagtactatatttgtgtttaaggtctttgtttttaaattgaggttgttatgactttgtggccattttagacatgccgttttggcctacaatttcccctgacaaatgtaaattatcatttttctgaagggctggaaaaacaaactcatataccatgatctcatccctgaaatataccatgaacaaaacacatcactttctaaactaacaagacatcattccataatcatccttagaagtttagaacatgcacttaaaagagacaactgcatatttagtggtacatgcaagagccattttcaggggcagatatccaattaaaccctgtcaaattcatacaacgtccgggtcaggtaagacctcacatccaataccagttatcatcggcaaattcaacataactaatttttggagtggtatatgacacgcccaaaaattcactagtaatttccgaacttatttgtgcataaaatcctcgtccaggaatcagccgaggtacacaaactgacaatttaatatacagattcatcaaattaactaaaacgataaatacttacttaagaggcacttagtcctcaccatgaagaaaactgcagcggaaaataaaatctagcgaagctccagctccactcccacaagcagctcaactggggtataagccaaacgccttctccttctggatcctttttctttaactgaggttgattgattattgcaaggtgagcatatgacatactcagcaagccacacagcaaatatgcaaatgcacaaggataccaaaggatggcataatatagtctcatttgcgaaagcaacatttagcaaagagttaagagtagtaaaacaatagagtaattaatcagaaattttaatcaacactgaacagcacacccatgctgcacaggcccaaccatcctgaacaaccatacccggctgtacagatctaatctccaaaccaggagctaagcaaattattaccaggtataacatctataattattgtgagaagtgtgagactaatcacgaaaaacattgctcaacccgcccataaccgcgggcacggctattcgaatagttttactctggccagaggtgtaccactgtacccacaagacacagccccacaacatgtcaccatgtgcctcagtaccaccacggtacctcggaaaggagctgtgacattacccctcgcataacacaatccaccgcagcgcaccattcctgaatcataatcaccccctcaaaaaccagaggcatggactccccagccacttctcagtctggtgccccacaatgaaccatgctatacaaaaggtaaagccgttgcccacactggcttgtggttggcacggttaatgtttcacaatagtagctcgcgaaccggtccttaatcgtcatgagcacgactttcaaaaccatgtgctcacaacccacctttaccatattttagttggcaagtaattatttaaccaatcacgattgaccatcgtgaactatcattaatccatcattaaataatagtgaataataagttatcccaatagtgtgctaatgtttctaagcatggctaagcaatcatatctaatatctagctgaaccaatatatatagctcaactagttaagttataataacccaagatatcaaggaataaagtaatcaatacaaacaggccataacaaaggaatagattcacaccacccggtgacattcgaaaataaatgcacagttgaaataaatagagaatttaaatataggatcaacatgctcaaaggattgtgtttaggatctgtgtgacttgccttgcaataatcggtcttcaattaatcttcttgaatacttccggcgcactcgcgaaccttcacaacgacggaaacgacaagctaacacgcaaaacgaagaaaaagactaataaaaaccaaataaacaatacataaaaagtaaacaaacaggtagatcataattttagatgaattatgagacttgaacggcctcattctgacttcaaatgaatttattatgaattttacaagattaaatctaattaaagcccatttaaaaagaattaaataaatttaattcaatttatggacaattttaatatgtagatctttattttatacaacttttgcaacttgaaccacattaaactgagttacaatgaattagttatgaattttcaaagattaaatcggattaaaacctttatatggattttaattgaattatgacgcaataatgaattatttttgaaaaggaaaaggaggattattgcgtcagcgactagggtttgcggtggaccgggtgcacggcagcggttcacgggaatggacggccgagatcgatcctatccaaaacggacagccgagatcaaacggtccacgaccggctcacggggaacggcaacgagacgtcagcgatgacgtcagcactggcggcggctcggcaacgcaagctcaccggcgaacgacggctcgacgacgcgaacggaaggcaccaacgggtagagggcgacgcggcgaactcaccggtgaccaaaaccacggcggaagagcaacggacggcggcggcgacgaggaagaagcggcggcggtcttcgggtcgacggtgacgacggtgctccgacggtcttcaacgacggcgaaggggcggacgaggacggcgacgacttggcgatcccgacggtggccttcccgagtgatgacgacgaccgaaacgacggcggcgcacggctgaagcggcggcgacgacggcgacgctaggctgcacgaggctagggcgctacagacgacagcgagcaaaggcgagggtggcggcgggtagcggcggacttggggatccttttataggtgcaaggaggcggcggcgaaggcccacggcgaccggcgacgagaaggaaacttcgggttcgggagagagagaggaatccgattcgatctcgaatccacgaacttccaaagcgagatagacgatgattccaaaagagaaaaggtagaggagatcccgaggatcatttcccctctatcattcggccggagaaggaaaggatcgaccgaatttggaaagcgacgacggcggcggcgctagggtttcgggcggcggccgacgcgaggaggacgacggatccgacaggtgggacccacctgtcagcgacggcgagggcgcgcgcgcggctgcggactgggccggctgggccgggggagagagagagaggttttgggccgactttcggcccaaagccaaaagagacttttaaaaacctttttcaatttaaattattcatgaaatgcaattccatttattaaaaatacttccttagctcaaataaatcccagaaaaatctaggaattatagaattaagcaaagtatttaacaaaattttatctagcccaattttatattgagatttaacaaattaaaattagattttctcttctaggcttttaaaataaattctaataattccaattaaacaaaaatttatatatttgggatttttagggtgtgacagtatatcatttatgtttgttcatcaggttcaggtttagccattgtttccaagccgaatccaatgtgatccattaattctgatcatgttggtagctgctagctatgatgcaaatttggcattttgacagctctgtcggctaacttcatacagattcatgtatacatcttgttcattaaagtttttatttctctaccaacatctttgactcggcagaaatgcaacattgcattgtacgtataccagctaggtagattccttgtattcctccgaagaacagtgctgtatagtagtgcatcattgtacattaaaactccataagggcgatgtttggatgcagcataggaaaaatataagactagggagagagggagagagagagagggagggagggagggagggggacatgtttgagatagctgaaattgatggataatttatttttttaataactatttgagggtactcataaataagtgacttaactactacaaagttggaaaagttactttagaaaagtatttcaagaaaatttcatataatttttgtacacgaaatacattgtttaggagcttaggaagtgagcaaatgaaaatccaaaatccatgtaaacgaagaagattaattttctccaaaaatttctttgaattaattaaaccattttggagcatatatatgacacatttgtgtgttctaagacctctaaatagaatctctcaacctatttcctttatttcaaagagccatatataatcttcaagttttggcttttccttggaacactggaatttcacagcaattttaagagaactttgtgttcctacaatcactctaaaataacaaattagataatcactcgttctatctagtacctaacatgcaatgcatgatacaagtgagacgaagttcccacttgatatcgaacaaattctcacaagttagtcacaaaaagaacacgaacgtgtgcttggaagcatgaaggtcatcattgtaagtaactttgtttagtttaatgttcttactcgtaacaaagcatacactttctgttttataggttccttacttgagagcatgcacgcttctttttttttcttttcttacagaaaaagagcatgcatgcaagcttgatgactcacaaatgtatcatctttttctgctgaagcttcgacgattgttagctattggacactagcagctgcgctctgcctcattgtatgttgtgtttgaactgttagaataggtgtcgaatatactagtcttatttggttacagttagacttggagttataatatgtgttaggggatggagttagagtcggactctgtaactcagaaactctcttaaatagagaggggggcaccacaatgtaacgatggcatctacaatgtagcgtagacacgcaaggagatgatggcggcgaggccatggactcgtagcggctaggtgctatattggttggggaggagcgcccataatcaaagcctcggggatgtaggcttcggctgaacctcattaacaaatatcgtgtgttcctgtgttgtcatctagcgtatcttagatgatcaataattaaagcgatctagaaggttagtcatcgttccgctatatcgactaacttttataacatgaactaacatcaatttatcccttcaggtctcaactattacatttgtcaaaattcaccccaatttaaaaacgggtactagacacatcttaactcttaaaattgttcaaataacccctcaattcaaactaagctggtttttatctgttggtgctagcatgacggtacaatcgagagacccaggcccagggcactctaggccatggctcggggcctacggctaagaacccatgaaccaacattgattttcgcttgttaagctaagttcctagaaaattaccacaagctgacccgagatttgctattaggccatgtccgcccttaagtacaatcagacacaaaaataaaagaaatttatagacccacctgttagtgagcccttcatctcctccttttccatttgatatgcttcttccttctccctcattgtcccttctatgttgttgagatctccaatgtgtctctcctccaaggtactacctccgttccataataagttcatttttagctcaatcaatttatctcaaaataaattcgtttttagagtaatcattgcatctgggtttgtgaaaatagagaatatttgtattctgagtagacaaagtgatgaatagttgtattaggatttgttaaagtaaacgtattctagtcttttttattttgtattggtatatatgtaagaaagatgaaaaataaacttattttgaaacagagggagtttgtccaaggcgaactcagcttgccgagatcggcgaccacgaacgaagatccaagttcctccaatggattgttaaatatgtgatctgaattttggacccacagtatatccggattagttatctaataggactctagtttataggattagtttcctattatgactcctagatttctcctatatatatccttgtaagccttacggggagggtgcgatagcccaatgtatctcttgcgtttgtatccaattcctctatagtgatcattaccggccggcgtgtcggagcccaaaactaataacttggatccaactgagattaatgtatcaatccctggatcagtaaaaattgatacatacaatataactggttcttcattgcatacgttaaagtcttacaatactaagggttttacaataataggtactcacctatttaattagtacacagcggaagtttctatacattctgactagtgaggtataacctttagggattttctaagttatcggggtcttcgtagtaataatcataagggtcctcctcttgacccagatctgaaaaaggggttattagagcaaggatgagtattcacaatactcagcaagttatcacggaattatgttatgcattgacatataatagggttctttgcaaaaagcagtattggacaatctggaaaacattatagtagaatttataaaacataaaaactttagatttctaactagggtaccatatgagtcccggtactcaactccatgagtacggctattcgaatagttttgtagatattctactgcagcagatgtacgctttacccgcagtccacgacttgctgataattatcggctttagtcatggcccagcattaagtcattaacaattattgcacctgttccatgaacttatatcctcatatgctctgaacgtaatgttaacagcaacaagaggagttctggcattcccgaggtatttaaggggaactgatcgtatgacaccacgtcatcttgatcagggtttagaaatataccatatagtttatactcgagtatcacaaaccatttacctgtacatggtaatggttaaagttgcctttcgcggctatagttgcctcctgcgcgaggacttaaaaataagaaccactatacataggtgccatattgccaattaacctaataactaggtctgtccccattctagaaactgcggtcgtacccgttcgtttgacataagtacctggtaaaacttatatcgattgagacaatactagccacccggaaatcatccaaatcttacgtattgtcccaatctaagtatagggtattttaaccagattgtaagcaaaataagcaatactaaattatctgggtttctatgattaatttatgcatagaaaatagaatattgaatagaaggctataaataaataatttgtaaaatataggcttaaatgatcaataggtatatggtaacttgccttgctcgatgtcctgagattgattgatattatctagagtgtcaaaggaatccttaagacctagggttagacatataaaattcaaattcaaaaaggagtttaaataaaatctaaaaaaataagaaaaatagagaaaataaaataaaatgcaaaaatagcaaaaaggggcccaaaagatagagaatgattttaggagaatattggtccaagtttcactgaaattggatttatattttaaaagatatgggcttctaaagtttgaaaatcgaataaaagtgaaatggcactgtgtgcggtcccacctgtcagtctctctctctctctcttctcttcttcaacctccggccgttcccccaaaagcggccggcggcgctagggtttgggattgcggcggcgttagagggagaaagtggttgcgaccgaggaggggagggagctagggatctccggcgatggcgagtggcggcggaggagttaatttgaggtgtggacggcttagcggctagggccgcggtggcacggttaggccgagatggcgatcaaggtgataagagttagacatggctaggggaggggttctagagcatctacgaggtgtctagagggatttcgacagcttgccaacctttagcaaggcgcggagcatagttgccgacgagcgcctccctaggcggcggccgtgctcacgtcggcagctcagagggtggcaagatagtgcaaaccaattgcaaaaatggactctaggtggtatgtagatggttaaaacggaaaaacttaccgagatcggttgaaacgacgaattgcggccggaaaaacttcgcggcggcgaagaacagagcagtgcgggggtggcggtgctcggcttggtgcggcgaggtaaaacttgacgcagtgctttggttagggcttattatgctagaacatggtaggatataggtgttctaagggttatttaggggggaggatggatagagaggggtggagtcgatcgcgcacaaggtgttcgaccgacggggatggtggttgatgaaatggattggtgaggcagagctttggggttgtggggtgatggttgttgatgatcgatgatggacaaggaagggattggggtcctatttatagggctagaaggagcggatgagctcggacaccgtcatcgccatggatgagctcgaccttaggatagggctggggtggcaggggctgtgagagggcggccaagatcaattttagtggtgagaagctacgttcgaatacttaccggcgaaggattgacttgaccgcggttggaattagctggcgacgtgagggcgccaatccgggcgcgacgcgcggcggcggcgtaggtgaaaacggccggctcgggggtgaatggtttgaattgtgagaggggaaacccctgtctattctcaattcaaccgtgcggcaagatttggcgcgattcaccccaggtagaatcaaaatcgcactcggcagcggcttggacgggagcgcacggcgtcaagcggcaaattctcgcggcggtcgttgtcccagctttgtcgtagtcacgattggtgcggtggcggtgggctgagggcgtcggacgggcgacggcgcgccaagacagtaaggcacgcgcaagcggccccgaggccgacgtgcggcgaaacggcgcgcggctaagtcggatgcccgggcggcgcgcgtgaaggggaggagaaggccaactaaaccacggtttttgagtgggttgtggtcccctaggatcaaatctaaactttgcacaagattgggtagttgttaggctgctctagctgggatgggcatttcatcgagcaccttatgtgcgatgaacagtgaatttcagaatttttgaatatttccctagaaaagatttaaatttaaactatcaatttgcaatttggataggtttcactagggtttggagtaaagtaaatcctcactaatattagggtaagctaaggaaataatctatagtttgaaatttgagagaatttgctcaaattcactaaggtttggaataaagggaataattagagtaagttagtagggttctaaagaagtaatacttgaaccaaattaagaatcaaatagatttttaaaacacactaatttaatcaaaagccagcatgatgcagtcaaattttagtttaaaatttaaggatgttacacggcgtccgtggttttttcccgcaagggttttccacgtaaaaatttatgtcttcgttgtgcatctatttcataacaagtggtatcaaagcattggagatcgatctaataccatctcggctgccgacgagttcgtctgcttggagatcctatctgcaagttttagccgccggtacgctcgtcgcaagatttgatcggcagtagcaggcgcgtgtcgtcgcgttgttccatctatcgctgccgtcagattgatttgtttgccgagataagattaaccggtacgaagcggagtcacccgtcgactccgatcgggatttggtgccgccgtgcagcgtgttggagaaaaagcagcaatccatctactccagcacgttgatcaaggaaagaaaaatcagcagatgcactcagccttgttactgttcatgtgaattgaatttcacgttggttttgtgcgcgtgcacatgccccttcgtaccagggattcaattcaattgcggtgcttcggttctgtttgggtgaatcaaattcaggttcaattttgtgctatgttcacaagccatgtttaccaggaagttgtatacggagatcaacttcgttatatgcacccagagtgtttcgcgtttctgctagggtttgtcaaattgtaccagcagattcaggattttattcccaaggtgagtttgaagtttgatctactgcttctggattgagatgcaatattctcattatgatgagcgaagtttcattatggcaagtgaagttttgcagcggggtatttacctaggaggagaagtatgctaaaaaaaaaagagaagcacattcaagtcatcgagagggagtctcgctcctgtctagatcacaaggtgatcaaattgtccggcgaattttgctaccattgtacccaacatacaaggaggttatcaggggatctaagtacttcattttgtgcacaagaatttttcgcgtttctgtttggattccagaaattaatgccagcagattcaggattttattcccatggcgagtttgaagtttgtgcatcagtttcgcgtctctgctaggttcagacaagttaatactagcagattcaggatttgttcccaatggcgagtttgaagtatggtctacctcttctggatcaagggtgttatggattatagtccaagtgactatttggcgcatattgatcttatcatcacgaggttttttttagagattgaagttttttatgctacaagggaaattcgtctcaaggtggagattgttaaatatgttatccgaattttaggcccacagtatatccggattagttatctaataggactctactttataggattagtttcctattaggactcctagatttctcctatatatatccttgtaagccttacggggagggtgcgatagcccaatgtatcccctgcgtttgtatctaattcctctatagtgatcattgccggccggcgtccgtagttttttttcgcaagggttttccacgtaaaaatttgtgtctccgttgtgcatctatttcataacatggattgcttcacaagcccgccatcctcttcaagctcctccagaactatgtgtcacctctcctagctctagcttcaccttccttgacaagttttgcctcttacgcctcaatatcgatcccacgccgtctgccacagtggatgaacttggtcacctttccataccttagttcttggcctctagtgtaattgcccactatgacgaagttaaaatcgatggtgatttcttaaacttctcttcatttttaagttgacggtgatttttagaaaaatgtggtagttgaaggtggtgataaaacggctcttatcccaattttagatacacggactgtaccatgacctgtaaaagaaaacggaggtaacattataaataggtaaacatgttgtgtgcaaattaaaaagctaggcattccatgcaatttgtcaagattcgagattgcccgtgcaacggtgcaagccagcaatcgcgatgagacatggcatgtgagacaaaaatatttggacacgagtttttgtggctatatatgcgcgactaattataatcaggtcgtcttccctgtagatcagggctcggtctagtgagcaaatcgatcactgtaaacaaatgtcactaatatgttagtgaagtggagtatatgatgcagtccccgttgatgctagtagagcaacagactataaaccagctataaatatattttaagaagataaaaaaaaagataaaagtagcgggctacatacttatagccagctgcagcacggactttaaaacgtatgtgtgtatgatatgtgggaccagatattgattgtgtagtatatttatatataactattgtgtaaattgattattaagttaactatagatgacatctataaagttagaaattggctattctattaaacttgctcgtactagtagctatgcctaaaactttgggttatgtagtgatcgatttaattgatagagttgcactacctcgagccagccgtatcttgtcccctcttccaacaaccacatgaactcagatcaaatactagagccctagttgtagttaactagtggagtatactgtactagtactactattagcaggttttttcgttgatgaacactacacgatctgatcattgatttagtataggcttaattagtgtttagacactcaagtactacaatactcctacattggaagctgatcgaacaaacaaatcttgtacacatgtccactggaatattgttactatgatcataattaagcaggttcatgatattaaagactcgagatttaattagaagactaattaagtacacaacgacactgtctgctaacagtttggtttaatttgcaataattcgtgaccggcctattacgatgaccatgatgtctcaacgccagtcgcagcagcagtacagtacactactggtggcgacataatatgtcagcatctgtgatcttgttcatctcatctcatcacttgcagggatcagtgccccctacaccattcatcatgtactcccataattaattaattgagacctatttaagctaatggtattattaattatatatttgattagtacattggagtacgtagaattctactgttgcaaaccacgccgatgcgtgctatcgataggagtaaaatactgtccgcgaagtctgaaacttgcacagtctttgacgcatgcttgcaggtcttcagaaaccacaagttcagaagaacccatcatccggccggccattattttaatctgccaatattccgtacgctgtcaaaagaagaagaaagaacagtcgaacaatgttgtacagctcgatccgcagaatcgatcagagtttagtacttactactataattgtttagcatgtagaattgattagaagtaagcactaaaagttcagaggaagtcaaggaagttcagaggaatcaattaacttgcagattaattcaacaaagctaccagctgatatatgctcctaatgatgatgattgccatgatcataaactttagattcttccatgctccatggtgaagtcttaagctagtttggctgtttatattagggcctacacataggtcctgattggatccggagggctatttaatagttcggaggatccaaacaaggccatagttaaagttcagaaaaatgattgtccttttatctgaagaagtatgtactactactgttgcatgcaatgaacacgtacatgagagagtagatggatctgatcgatactgctactgatcatccagccttgcaaattatccaaggacaggacagggagacagaaaccaatcaatcagacgagaagatttgcgactcgacgaacggccggccgccatataggcaggattccaaacaaggccgcggtgataccgttgggttctcaaaaccgcgcttttaatttgattcatctgctcgccaattaatcttccaatctttgatctgtactgctccaatccactgttcgtatagtattaatttttagtaatttttagctcgccttggctacccatcttagtagagaagtaaagagagagaagaatggtactcttctcctatcataaatactaattgatttagcataaatttagatcatttttactggtactttgatacgtcatccctgtttcagtcgatttctaagtccgttctcttttagaaataagaagaagtcgtataaaaaatctctttaaaaaactcgtatgctaacttgagacgattggacttttaattgcagcttacaattttataaaaaaaatccaagcgaacaacagtaataatattaaaatagcccttcacccactgcaacacacgggcattttttctagttatgataaatataaaaggttttgttactatggcaatgccttcttaaggtgaatctctgtagtgtaacattttgattttatcacaagtcaaacctctctgactttaatcttgtttatagaaaaaaacatcaacatcaacacatactaaattagattttatcaaaaccatcatgaaatatgtcttgacattgtatttatctgttagtgcatttttctataattcagtcaaagttagagaatctcactaaagacaaaaagaataattttcaatatgaaacagatgtggtgtatatttgataaactattgatcaaatgccaaaatatttataaccacagtaacagaatagcagtaaggcaaagccatacgatacgacgacagtcagcatctatcgtttgacccgtatataaatgcatggtacgaacgctaaaaaaccagcgttactacttgatgaaattattgatcagattggcagtagctaggcatgctttcatttgatgggtttttttttttactggcataggattcgccggagttgaggtgaaacttgtgttctttgtacggcgtgtccggccaacaaaagatgggcagcgttgagagccaatgcaaggcaaaagggttgagtttttatcggcagatatggaggccggaatggcgcagggcggtcggtcggccggccggattcgcgcgtcggagcatgggtcactactcactactgtagtcccttttttccctctgcaaaatccagccctgcaacctgcatcattcctgctctcatgttctatggcttcttgctgattcgttcaaaaaaaaatgcattgtactacatttgtagcatgagtctagctctgttttgaaaacgcgggattgaaaaaacagatgaatagaatttttttttaagattttgctaggaatacaagtgcaaaatataaagttccgaaaacggaatgatcgtttggttaggagaaaacgtaggaatcggatagtaaaagatatagactcaaagggaattttccaagaggttagagctcttgctaaccttttctccaaaatctctctctctctctctctctctctctctctatatatatatatatatatatatatatatatatatatatatatatatagtaaatttgtttggtgctccatggtgcccgggcaccattgttgaaattgagtatatacccaattcaaatgagtatgaaactttttcaattacttaggtattaacattaactactttactaactagtttaaagcaagtttgaactgaatttgaacttgtttttgttagattttgattctaggtatatagcatccatacatataattagttaggtatgtaatcatggattgtgaaataaagttaaatttgagttgttttgttgataagtataggtatgaatcaaattattataactaggtatatactcacaatttaaaaattttgaaaaatttgagtgattttgtgcattagataccatggtgtccgggcaccatggtgccccatatgagtgtcctatatatatatatatatatatatatatatatatatatatatatatatatatgtcattccataggaacttcaaaggaaaggaaatgattcaacccttataaaggatttcataggaatttttcatataagattgaaatcctccaaatttactatgtttttttttttacaagtcaaaggggtctagtagttagaataccttatagctagaaaaaaacagaagaggatattaagttacatgcaccagatagttcacatgaaagtttaaactgaagcataagctgaggagaaaagatagacaatttacttgtatttcaatagaggacgatacattgagatggatagcttaacatattacatatctgacaataaaaaatggccttccagaactgttgttgatacaaaccagaagataacaaatcaaatttcaaatactgagatggctgaatatggcggcccttgttctacaagttgggtcatctcagatgttgaggtaaaagatatcagtgattccattagacaaaatggggtattgcatcagcttcacagagcaaactacaagcctatacatctgctaaaaaaatatggttacatcattttgttttggcgtcacaggattgtgtacatactatcttctaccaccatctttcttcgaaaatatgcgcaagtttgcagtctgccggcgccattcatttatagggacctaaattcagtgggcacagcaaacatttgtgagtgaaggaaaaagttaaacatgtaatgtcatagctataaaatgaaaggcttactgctggaaacccgccatagtcaccgggtttctgaatatcctttgtcaccgaactatttgctgcaagccgaacctgtaaatggattgaggaaaaaaaaattgaatggttaaagggcctttagagttggtcaaggcttaaaagaatagattgagcaatgtagttaaatttgtaatacagataaacacaaaactgaatagagactgaagtagtattaaatcatgttagcaggaagctatgaaaaaagaacagagatgggaaaacagcacctttgaagcaatggagacgtgatcccgaattgccaccctaccacccaaggttacatagtcccccaatctgttgatacatgccaatgacacaagttactaaatctcaaaaagcaggcaaaataaacatttagtcaatgagatgaaggaatgcatacgttgcagaaccagcaattcctgcttgtccacaaatcatgcaacactttccaattactacattgtgaccaatctgcaagaggaactgtcaatttggacaacaagggcggcggaagtccaatcacattaagcagaatatccaatacctgaacaagattgtcaattttggtttcatctccaattactgtatctctccaactgcacttagtaaataatgatgaaaatttccgctcgcgggttaggttcaaccaaacatatattcacaaagaaagagctgatattacaaaatgtttggtatatttaaatcaaccatggagtggccaaaggaacatttgccatttcaaggctgacaaattacctccctctgtcaatacatgtatttgcacctatctccacatgatttccaatttttacatgcaacatctggagaagcataaagcttttcaacatatagccatatgatgtttcaattgaatccaaaacaaaacatctaaatacagtctatgagagtgatagtcatcaaacatttgtatcagaagtacttctcccatgtcactggcattttctcagtttcttttttctgtatctctgataccaggtaagcacattgggtgaacgtgacaaatgaaggactgagcatttccttatccttttaatacaaaatgaaccctctttgcgatcctagaatatttcagctaaccatttcactgcccttccatttggaaactactaactcatcatcttcacagaacgtttactaagaaaagggttgttagagagtactagcctgcagtttcttcttaacctgtccatcatcccccacaaagaaaccaaaacctgaaacagatgcatcaaactaaatagcatcaggatgcaagttttaatgcttgatcggagtacataaatcaatatctactggagcatcaaacaagaatagcataaaaacaaaggaaacccaaaaggttgacatttaaatagatggactggacttcaatccacaacaataaatgtaattgggcaaaagtagtgaaattctgaagacagttcacaagttgagaattttttttcctagtttgacatgtgtgcaggtagcagaaagaatccaagattgcagcaatcttgctagttactagtaccctcactggcagaaagagtccaagattgcaacagtcttacttatccctcactgcatcg

SEQ ID NO: 8685 - DNA, 36080 bp, Oryza sativa
tttcatcgaacaccattcgcgcatcgctctccccgagcgaaccgcattcgttacgttacgttacgtgcgagatgaatcaacttgtcaggtacaaacacaaccggagaatttgcttttgtttatactggagttatacgatgtgatcctgatccaggctcagttcgacctagcccctgcttatctttgcttgtgggtcgttgtcgccgtctttggttacgctaggagaagcatctctctttcttgcgtaggtaatcaactatcttaatttttcttttgtgtcttgattatgtgcaacaccgagtgatgcgaatgggatgtgttcctttcgatgttttttctatataagctctgaaacttggacttttgcaacaaatggttcgggtgcagatgagctgtttgacgaaatgcccaggagattcctgcgtgcgttgcatgcccagcggcggtttgactctatttttcctttagtatggtgtctgctctctggtgatctaatgtaccattttctcttaaccttgttttacccaatcttaatgcaaagatgcataaagagaactctgcatattcctgttttctcttaaccttgtttcagagaaccttgttttctctgaactctgcaaaagattttctgcatattcctgaaaaaaggagaactctgctccggtgcttttaactagacttataaaggctttggcataggattcctgtattggttgatgcaaaatctgctggtaacagtcagctaaattcgcttaaaaagtacacttctttgggtcttcttgctagtgcaggtagagaagcaccatggccttcctggtttcttaggtggtaaacaggcaaagaaagtaaagcaccaagtggcgccattgctgcaatgaaatcaaattattattagcaagtggatgaaaggaaaagaatacacagcctggaagagctttcaacttgaatccccttgcaattgtgtaacactacttgtccttttcacattgcatcatcgttgaaacatttggattttaatacaaaaatcattgtgggtagattttgcctcaaaaagtgctttcatactgttttaattttgtcaggtttttcagacgttttgcaatagagaatgtcaatgtccattgtgacaaaggcagttggtggcaagaaagggaggagaatctataacagctctcttctgcaatctgcattgccctctctgttctcatcaggttttagccacactgcttcaatatctctttccatcttccgtatttaagtgatcggcactcagcagctctgtgagatatctcttctgggatctgcagtttcaagcatctcccataggagagatccagtgggaatccgtaggttctagcactatgggcacagttttggatgctctcgcttggaaattcttggaaaagctgggtcaacttattgaggatgaggttatcatgacattaagtgtgaaaaggggtattgagagcctgaagaaaaatctggaattcttcaacgctgttcatgaggatgctgaggctctggccatggaggatccagggatagattcatggtggaagaacatgagagatgttatgtttgatgtcgatgacatcgtagatcttttcatggttcattcacagaagtttttgctgccaccaaggccggtatgttgcaatcagcccttgttctctagctttgcaaagttttcatttgatcacaggattgccaaaagaatcgataatataaatgaaaagtttgaagaaattaaaatgaacaaagagatgtttggcttcgagagaaccaaccggcaacaagtccagataacaattgttgacagaagtcagacatctcctgtagatgaacttgaggttgttggagaagatatcagaagggctgttgatgacatggtcaaaatgattgttagtaactacaatgacaacaggtcaactgtttttgggatccaggggatgggaggcatcggtaagacaacattagctcaaaagatatacaatgaacagaggataagggagaaattccaagttcatatatggttgtgtatttctcagaattacacagagaccagtttgttaaaacaggcaataagaatggctggaggaatttgtgatcagctggagactaagactgagcttctaccgcttctagtggacactattagagggaagagtgtttttcttgtgctggatgatgtttggaaatctgatgtatggattgatcttcttcgatcgccttccgagagaggcttgaattctcgtatccttgtgacctcaagaaacctggatgttttggtcgaaatgcatgcaacttatacccacagggtaaacaaaatgaatgattacgatggcctagaactgctgatgaagatgtcattagggccatacgagcaaagaagagaattcagtggtgttgggtatcaaattgtcaaaaagtgtgatggccttcctcttgccatcaaagttgttgcaggtgtcctatctagtaagaaaacaaaggcagaatgggagagcatccgagatagcaaatggtctattcatggacttcccaaagaactaggaggtcctctgtacttaagctacagcaacttacctcctgaacttaagcaattctttctctggtgtgctttgttaccatcaaattttgggatccatcgtgatgctgtcgcttactggtgggtcgctgaaggctttgtgacgaaaatgcatgggtactcaatacatgaagccgcagaagaatactaccatgagctaattagaatgaatcttctgcagccaaaaccagagtttgttgacaaatggatgtcaacgatgcatgatcttttgaggtcacttggacaatttttgacaaaggatcattccttattcatgaatatggaaaatagcaaaaccttactgaatctacgtcacttagtaataagcaatgatgtaaaagaaatacctgctatagaagagctgaagtgcttgaggagcctcctaatttttaataacaagaactttaagacaattaataaggacattttcagagagctcaagcatattcgtgtcttagttctcagtggaacaagcatccaagtcataccagagtcggtgggaaacttgttgctactgaggttgctagatctaagctatacaaaaatcaaaaaactccctgaatccataggaaatcttaccagccttgaatacctttctttgcactgttgcagacatttggatagcctgccagctagtttgatgagactgtccaacataagtttccttgagctagaacaaactggaatcgaccatgttccaaaagggatcgcgaagtttcagaaactctacaaccttaaaggagttttcgagagtgcatctggattcaggctagatgaactgcaatgtctccccaacatccaacgtctccggattgtaaagctagaaaaagcaacgccagggggtgcatttgtactcaggaacagtcttcgtcttcgagaactgtggtttcgctgcacaatgggagctaatactcatgatattacccactaccagatgaacgagattgagagaattcaacaagtctatgagatgctaagtccatcatcaagcctaatttatttattttttgaggggtttcctggtgtaaggttcccagattggttgtgctcagaaccagagtataagatgccaaatttgggacatatgtacctcaacgagtgcatttcatgctctgagcttccaccagcaggtcagatgccagaactactaattcttcagatcagatgtgcagatgcagtagtgaatattggttcagagctcctaggaaaaggcgtcagcagtgccacgcatataactattttcccaaagctcaaattgcttcacatcattgatatgagcaatttggaaagttggtctcttaacacagggaatttgcgtggtagatctgaacagctcgttctgatgccttgccttaagcgtctgtttcttaatggctgcccaaaactaagggctctccctgaagacttgcataggattgctaacttaagaagaatccacattgaaggtgctcacacgctgcatgaaattgacaaccttccttcagtgttatggctcaaggtcaagaataacaggtgtttgaggagaatttccaatctctgtattctgcaggacttgtttgcacaggactgtccagcgctggatcaggcagagaatctaatctcactaaagagactccacatggttgattgccagaatgcaaagcaattcagaatgtgcctcctagaagaccaacaacttgcagtcgatgttgttacagttggtgcagatggcagggatatctttccagatgaaactctctataattaggcaggtgagaaaaactacatttgttagtctcaatggtttcctttccgggatctgtttgtactatggtttgttatccgtggtacatgttttgaaactctggctatagtgatgatttttcactactcccaatcaaaatatccttcatattgttgctcttcttgcagtggtagagtcaagagtggcgcgcgccaaggaaacggtggtactagtgtacctgaaatgttacaggaaacaattgaatttctgtggtaacaagtggtactcaaagtgcagtccagtggtaaatgcagcttggtgcagacctaacagcaggaagcaacaccgtttaccgaaattatagcttgaattcatcagcttgatctaaatgcaaaaattgagaacttggtcagcactgccgaaaactagatatcccttcaagtgaagttgccttactcaaggttaagactaacatcaatttgccactgctggagctgagaacggtgggtgcaagtgctgcctcaattgcagccatagtgtgatgctatctccaagattgtttcaggctgagcagtctctgagaacttgtgcagatttcaaatccaacgagtctctgaacatgcccttgtccagtaggctcctccgtgtaaatatcttgagctgtggatgcccaaactataagcagctagcatgaccaatagacattcccagtactcaatacaaatattttgcacatatattcgattagtcttgaaagtgatccgatgcaatatgtgaaattagttttgaaagtgagctgtccccatgcaatataaggcttcattgatttaaataccgattaacatcgtttgataaaaagggaagaaaccagttcacaacccccaaatccacgatgggccaaggcgcacaactcccacgtcacggcaggtcccccgatgcgcgccacgtgtacggcggatggcctccctccctctgtataagtagcaaccctctcggcctctcggccccccttcctgtgtgtggttcaggtgcccaaggtgatattcagattttctgagtgctcgtgtgttgtgcgatcagtgcccactgcccagttcgatcgatccgtgttgatctttgaaagaaagatgtcgtgctgcggaggaaactgcggctgcggatccggctgccagtgcggcagcggctgcggagggtaagatccgatcaccatcttctgaatttctgttcttgatctgccatgtatatcaactgtctagtcttggtgttggttagatgaaaattcgttggatctcggaagggatattgttcgtttgctagggttttttgtgtgctgtgatctgtagaggatttctgtttgtccatgttgttgatcttggtatgtattcatgacatgcatgttgtatgtgtcatatgtgtgcctctccttggatttgttttggataatagaacatgttatggactcaatagtctgtgaacaaatctttttttagatggtggccaaatctgatgatgatctttcttgagaggaaaaagttcatgatagaaaaatctttttttagatgatggccatgcatgacatggtctttgttgagagaaaaaaaagattcatgataggagattttgatttagctcccttccaccgttataaaacgaggagcatgcatgcagatgactgatgaggatctgatttcattttttatcccatcttcttataacagacaagaaataggctctgaatttctgattgattattttttgtcgggacggccaaagtaggctggccaatttcattaagattgggggaaacaaagttttaattacaacaatttcattaagattgggggaaacaaagttttaattacaacgacatgaaggatgtcgcgccggtctcaagcaaactcaagcccggaaagaaaaggaaaaaatggggcaaatcgggattactcgctagcctgggaaaaaatccctgctaccctccaaattgcgatttcctcgttgatgtcattcgctagccggtcaaccaacttggcgatgtgttgaaagatccttgtatttcgctctttccagataagccaacaaattagcatgaacagactatcgaaatccgtcctgtatgtgttctgaaaacgccgtcttgtcgcgatccaccaatctgcaagcggcctgacatcttccgcagtgattgcaatgttaatgttgcaccaacgtctcagcttgcgccaaagccgccgtataatcacaggacacaagcaaatgatggcagtcttcgttctcgcgttggcatagggagcaaatggcgtcatgcggccagtttctcttcgccaggttgtccgccgtgagacagcggcccttcagtgcaatccacatgaagaagcgaacacgcgacgacaccctggagtgccacagcgtgtccccgtaggaacagtcctctgtcgctatgaaaaatagatcatacgccgaggccactgagaaattaccatcagcagtcaacttccatttgatcgtgtcagccatctgctgcagtgacacgtcgcgaacttcatcccaaagttggaagaattcacccagagcttcattggacagggcaccttgtaatcggcgaatccatctgttagcaatcagggcatcagctactgtcagcttggcacggctcacatgggaaaacaacaccggccacctccaggcgaagcaacctttccctgtccaattgtctgtccaaaactgtgtgtccaccccatcaccaatgatgtgctcagcgacggatcgaaagatctcttccacatcgcttccaggacggaaagctgctaaggtccagggtctatccttctgctccaaggatttcgcaagccatttcaaccggagagcttgaccgaacaaattaagatctttgacaccaagtccccctttctcgatgggtgatcaaacctttcgccacgagactaggcaatgcccgccgctgatctcttcctgtccttttccaaagaaacccgcggcacttccgctcgatgtccttaatcgcccatcgcggtagctgcaggactgtcatgtaatgcaccggcaacgccattaggaccgacttgatcaagcacagtcgcccatcaatagacagcattttcggcttccaaccggctaccttctttgccagcctatcaaggatcggctggatctcggccttcgtcggtttcctagtggagagagggagtccgagataagtgattgggaacttttccactcggcaggagagaatggattcaacttgcacatactgctgctcgtcacattggattggagtgattgcgcttttggagaaattggttttgagacctgtggcagccccgaacaactccaggatacccttgatgactcgagcttcttcagctgtagggcggaaaaacagaaccgcatcgtcggtataaactgaaattggtggcaaattctgtcgtacgttgaggggcgagagcagtcttgccatccttgcctgggaaactgattgattatttgtacatgcagatgcaagatgtacccggggatggctgaggaggtgaccaccacccagactgtcatcatgggtgttgcaccttccaaggggtatgtgcactaatcctttccttcttcatatcctgtacttgttgttcatgggcaaaatccatgtgttatattactgaatttgttgaatagtataaggagagggaaatattgtgattattgacaccgttgtattgagtctcagggatcactatatatagaagtacatggtgtagagataagaaagaattacggatatggaagaagtccacgtaaatcaatcttatcctactctaactaccatatatatactttaatagaacagaattgagtacctccatctttctagctaccaacctcttttgtcaattatcatatgtttcctgccttttttccccttctgaatcacagagaacaaaagtacaaaacattttgttgagaggctcactgccttccattttacgtgtacgtatgacaaaattgcagcgctagctacagccaatgaaaaacgactaaaaacttcatgcacgttatgacaaaaactctctcctttatctgaagaaaacgattatgccttttactctgaaaactgcgtagcaacaatccaagatcgtttcatgtttcgctgagttctactcccttcgtttctaaatgtttgacaccattaattttttaacacatgttagattatttgtcttatttaaaaaattttgtggaatatgtaaaactatatgaatacattaaagtatatttaataataaatcaaatgataggaaaataattaataatttcttaatttttttaataagacgaatggtcaaatatatttagaaaagttaacggcgtcaaatatttagaaacggagggagtaattaattactgatctatggttggttaattctctgatggatgcagtcatgccgaagggttggaggccggcgccgccgccggagcaggagcagagaacgggtgcaagtgcggcgacaactgcacctgcaacccctgcaactgcggcaagttgaagcaagcaacctcctgatcaggaaaccaaggagatggaaggacctagtactgctaatctagtagtatgatccagttacgagtgatgagttgttgtcactgtaactttgtgtttcctctgtgagtttgtgatctaagacctgagactgaagaaatgcatcctagttaataagtgctaagaataaagatgttttgagacatctatggcgtctgtacgatgatagtccttcctctccagtcttgtggtgtgtacgtaattaagaatgcaatgctgtgtgtcatgtatgctttctatctagtgaaactgaactagtgagttggtatactaattttgcttttttgcttgaatgttgctttaatgtgacttgtgtcactggatgtttatcttgcttgcttggatgttgctggctacacgaacttcatctgaagttcatgctggtaaagaatctagctttgagcctgcttggactaatacactacaaaatgggctgagcccatggatttgtgtaccacatgtctacaactctacatcgtgtttaacctcagtgggctggataattccttcatgtttctcgaaggaagaagtacatcgaaggtccctcgtcttatacctgatatttgctatcctcatcttataggcggttttagttttggttttattcaacgtgacagctggctgcgggggagcatctgggcgcaggcggcggggggagaagctgcgcgcgggcgagcaggcccctctaccccaccgtcgccacgctgctcacgctctccgacgccgtctgccaccacggagacccgggaaatcgcgcagctccttcccgtccttgccaactccgacggatgaaggacgacggcgtcgagcctgatctcgtcacctaccgccaccatctgaccatcaccgcctcgttgctggcgtcctgtcccttgcggactccgtctccatcttcatcacctattgccaccatcttcttgttgccgccttccgcgccgctctaacgggaagagccccgcagccacggcggtggttggtcgcggcggctgcgcctgtcacccccgcccaaattattcaggggatcgccataattctcgtcaccagcaagggatgtgcgtcgccggggctatgcctataaacaactacagggaccagctctacagctatggcgattcaaagagttcgtgtaagcttttctgcagcaaagaatgccaaatgcaaatactactttgattgtgcatgcaggacacggatgtctgctgatctatgaacatacacatccacatgaacaaaacgagctcggccacgagtgcttcgccgacatcgccagaggattcatcctgctcatcggctttgcgtggccatgtccaccctggcgacggagaagctctaccgcatgctcggcatgtacgaggtgctcaccgacatcaagtcggacctcgaatccctcttcacaggatacgcgcgcaacttcttctccttcgaggtcaccagcatcgtggcccagctgggcaacaccatccgccatttatcgatgcagttttggataagaataagggaaggggaggggaggaggcagcgtcgggaggagggcttcgtcgggacgctgctccggtgctcccgtgtcaccgccgtcgtcgcgtcgccacgccatcagaggctgttgctagtgctcctcaccccgccgcccgagcctagctgctcccctgccggccgccgcccgtggccagctgctcccccgccgccgcccgtggagagggaaggagagaggtggagaggggagggaaagaagaggctgatgggtaggatccgtgtgggtcccatgctgagtcagatgtcgcgttgggtaaaaccagagtcaaaacccccgaggactcaaagtgattcggttttataagatgagggatggcaaatacggagtatctggttttgtggttggaggatgattttgtaatccgatgacaaaatgaggggcatttgatgtactttttccatcctcgaaatacaatccaaatcgacttgtttggcattcgaggaaggggattgggagtttacacgagggaattgatggtgagattaagaggggaatttgatttttaatcccaatatcttgtttggtagaggtaatggaaattgatagggagtttagttggagattaagtcattaatgaaaacggatggctgagatttgtttaggcaaagtaaaggaggaatccctcccaattaccacctcctacccaggtattgaaaaggagagagtttcttcgtcaattctctatctccattccactaaaatttttatgtctcccaaccaaacaaaatagttaatagcctatccctctgaacttctaattcctcctaaaaacttcctccaaccaaacaggccgaatgttcctcgaaatgcaatccatatgttcagagcttggaaaaagttcacttcttgtccctcaattatggatcgaatttcctttacatcacttagctgtaaatcaccactcttacggaactaaattttctgacctccacgtcgccctctctcgcgagcggcacggagggcgaaccctagccctcgccaccccctccctttctctcccacccctcgccgccgccggagcgcgccgccggagttccgtgcggccagccgtgagggcggtggcgaggcctttcctccggcgatgacgcgacggctctgcgcgaggacgacgacgcggcgtgcgatgggcgggcgacggcgacggcgacggcgcagagcgaagcttcggatccggcacccccgtggctggatccggcgccctaccgccggagacgagcgtcactgccgttcacggcggtgtgacggggcgcggaggaggcggagcggcggcgcttgtgctggcggccagcaaggtagaggccgaagtgggtgcgacggtgctggccctcccgcggcctgtctggaaaggggcggcggggagcgctggacccggtggcggctggcggcgcaggctgcagcggcagcaggcaggcacgacctcgtcggcgccacacctcccccccaccccccactcgtcggtgcgcgcggcgcggatagcaacctcttctccttcccctccccctagtatcctcgtttgtgtgccctctcccccctagttccaaacatcgctggtgatcttgcccttcaacttcttctcaatctggcgtgcttgtttggaaattgtgctcctgtagccgcttggattacagtggttctatgccctcctccaaagttgtcgttgatgttcttcctctgtgagaatccccttggccatttccccttctattagcccctgctcgtcttcaccctcttcctccagatgtccaggaccgcaaggatcagtgtttctccctcctttgaggcttccttcccttgaagggcgttggagagagttgatctaacaagcaacttgataaagcctgattgaagaagacttaatgtgggtggcctcgagccgcaacctttagtggcccaccctcctttggggcttacttccccaaaagggcgttggcgagctctgatacaaacagcaacaagatcaagtcagcttcttgatggcttcatgcgggtggccttggacttcaacaacattcccttggcctctcttttcttccgacatgcttgtggctgtgtgaggaattggatgttgatttgttggggtttagcagtaggttttggattttggcaagatgattttgtaggtgtcattcatcaattgtaatcttttaggaggttttctttctctgttctctcctcgttgtattctccgtgtattctgttctcctatcctccagggcccttgcgcttgcgtaggtaaagcttgccattcaggtggggattctcaccccccccggtgatttagtcaaaaaaaaaacttagctgtaaaacagctattgaaaccagcggaaatacagtccttctcgagcacgtggcggtgacacctggtagggaaatttaactgtttgccacttttaggtttggcaattatccaaataccatttttaggtttgcagttatttttttcccttcttaagaggtggtctcttaactatttgttacttttgtccacgtggcatgccaacttgacaacctatattgaagaacggtgtgagacccactcgtcagtctctccttcccccttcatctctctctctccccccacgtccatggtcccccatcgacgccggtaccgccccgccgtcgaccaccgatggcacagcctcacagacaagtagaggtgggagtggaggacgacgagggagatgaaaaggaggagcgtcgtcaccacgggcggatgcactagaacgacccagggtgcgcggcgaagacgcgagacgacgtctgtaacatcgcgccagaggatttggggtgaccaccgctgtcgtggggaggaggtcggcgtcgtcaaggacgagcggcgtggagattgctagcatggggacagcacaacggtgtggcgccgtccttgatagggaggatttggggtagccgccgctgtcgatggggagaaggtcggcgtctttgaggacgagcggcgtggaggttgtcagcacggggatagcacagcggtgcggcgtcgtcctccttctcgtcatccccatcgtcgaaggcccaagcagcgtctggtagggttccaatggtgggaggcagcaaggggcctcacagcgtcggctgcgagcggtgccatcagtggtcggttgcagggcgacgttggcgtggtggggcagcggagcagtgttggcgtcgatggcggcacagcggggagtggaggtctgcgcctctgcagcttggaccgggcagatgaggcggcgcctcggcggcaacagtgttggcttccatgggggctgtggacgcgtgggggagagatgaagggggaaggagagactgacaagtgggtcccacaccgtttttcaatctaggttgccatgttggcataccacgtaggtaaaagtggcaaataattaagagaccatctcttaagaaggaaaaaaaaataactgcacacctaataagggtatttggataattgtcaaatctaaaagtggtaaatagttaaattccccccccccccctccggtgtgacggcgaagtggctccctgttcagtcaaatctccttctagatgtgcacagcaagaatggtcggcagagtccagagtcccaacagccaacaccaaaagagtaggggtggaaatgagccgagcttggctcgtcttagcttgtagtgactcgcaacaagctaggcttggcttggctcgtttcctggctcgagccagcttgagctagcttgcaagccttcatgttgaaacacctcttcatatatattttataattattaaaaaacaagaacaaatcatcaacctataaaatttaaataagtttatatattcaattatttaaaatcttaatgataaattttaagttgacaaataataacttcttaaaaaataatcgatataaacacatgatggcctaggcttgtgagctagctcggactcgactcatttcagcaacgagctaaataagaggcttgggcttgacttgtttaacttacgagccgagccaagctcaccaagctcgagccaagctcacgagcccaagcttatttttccactcctacatacgagtccagagtccagagtcccaacaccagacgagctcgagctcgccggctctgggaggtcacagcgtgacaggaggtgctagcttcgtttttcttttttaaaaaagtgatattaatcaatttttcaaatttaaaatgattaattaatcatatattaatactcggctcgttttaagtcttaatccccttaacacaccttcttaatcatttagcattccagtcaatgtcaattttcctttcgtcgccacggacacactagtttgtccggcatgtatatgctcacggcatgtcggcatataagtgccacttttccagaaaactcaaatcatttcttaaatggatatcttcttatttttacatgtcacttaaaagtcatcaaggaattttcagagggatgctgatcacttggggaacctgttggcagactttgtgtttgacaagcttctgacagaggccctgcttacttcccaaaacaaaaattttctacctatcacattgaatattaggacatatgcatggagtattaaatataggaaaaaaaaccaattacatagattaagactaatttgagagacgaatcttttgagcctaattatttcatgatttgtcaatgtggcgctacagtaaacatttgctaatgacatattaattaggcttaatatattcgtctcacagttttctggcggaatctataatttgttttgttattagactatgtttaatacttcgaatgtgtgtccgtatatccgatgtgacaaccaaacctaaaagttttccccaactaaacaaggccagatttcactcttcaggttggaaattttgagtctaactagtttgtaaagtacacgagcggtccttaaacttgtagggatgtatcatttaggtccctaaactcttaaatgcttaaccagagtaaagtgcattggcggtccttaaacttatagggttgtgtcatataggtccataaactctcaaaatgcatatccaagtctcagaacttgtcaaagtatatcatctaggtcccaaattgacacatcccctctaggatcttatgtggcgctgatgtggcaatgccacatggacatgacgtgctcttttctcttttttttcttcttttctttttcgttttcttctcattcttatttttttctttcttttgcacgggtcacagaaaggagaagaaagggaaaaaagagaagaaaaaaataatgtcgcgttatgtccgtgtggcatgccacatcaacgcctcgtaggatcataaaggggttgtggcgatttgggacctagatgacacactatgacaagttccggtacttggatttgtattttgagagtttcggggcctagatcctatgcactttactctctctcttttttattttgccccctaattttgttggtctagctgtttctacagtggaaggctatgttatcctcatgtatatattaacattctatttgttatctccttgaagagatcaaggtttggaggggtggttgttacttgttacttgttagggcttaggaattcaattcatgtgctgaaaggttttgaaatttatatactgggtgaggttgaaggagcaattgtttttaaccagtttttggatacataatctcgtagaagtaatgttgaagaaatttatgagtcaacaaatggtgaggagcaggaattcatatatattctgaaagttccctaaactcttatctactcaaactgctgctgattctgcctaaaattccaagaaaaatttgtaatatttataggtgcaaaatgcttcttactagcgctcatgagctcgtaagctcccaaccatgtgaaaactaaaggaataaatccactttgactccctcaaatataggtcaaatcaaatccgtatcccttaaccgtaataccagatatcttgacccccctcccactattaaatccagtgcaaaatgactctctcggtggttttgaggatagtttccactaatgtggctcgttcacctagtccaaccagctgagtcagcatgtgggggcccataagtcacccactctgccaccgtcgagagacatggggccatacaactccctcgagctccttagccaccattgcgctactgtcgaccgctgccttctcctcaatctcccactgcccgagcgccgcgctacccactgttggtgtcgccaaagccgaaatatatagggtgagggagagaaaggggtggagaaggaaatagtgggagatgacatgtgggccttcgactggttggactaggtcaacgagccacgttggtgaaaatcaccctcaaaatcaccaagagagtcattttgcatattaaacttgtaactaggtgtaatcggtgtcatgcatgcagcaaaccgacagggacatattaaacttggacccctattcgggtctccgcggggagcggggacaaggaaaggaccatctccgcccccgcgaaaattgacgggggcatgtcttctcctatttatgtccccgtgaaaaaccaattgtaaccatccttgcttcctaataggtgaattcaccacgagaaaacggtgaacatctctaggcatgccccgccacacccagtgaacaacactcgacatgaggaagatgccgcgcgccaaacattggtgaacagaaagactaacggagaactgtgttttgtcggttttgggcctatttagttcgcgaaaagaaaatttttggatgtcacatcggatgtttgataggatatcggaaggagtttttggacatgaataaaaaactaatttcataactcgtctgtaaaccgcgagacgattgagcctaattaatccgttattagcacatgtgagttactgtagcatttatggctaattatacactaattaggctcaaaaaattcatctcacgatttctcccctaaccgtgcaattagtttttttaatctatattgcattattgcatgtgtttaaagatttgatacgatgtttttgatagaaaaaattggggaaaccaggcctttgtttaccggcgcagggagtcactattcactagcactgaaaatatgtcatcacctcagggagcaaaaaaaaaaagatttaagaaaaaggagatttttagagcacggttggcacaagagaattttattaagataatatggagttcaaacgtaataaagtcattaaacggttagcaagattaaaaaggttgatatagcttgacttaaaaacaatactgatttgaatttcattactaataattaaagataagaaaattacatgcatattcacttgcagtatgtaagtagagaaattacaatttaaaattacaaagaactaccctgatcacttttcttagtaataaatttttagagcacattactctcatggaacatatgcaaatttcaaaatctgtctgttacggtaaaagaagcaactggatctgaatggaccatgaacttaggcacttagcccatgatagcacggaagttaacacacatccatcagtacaaaatctgattgttttctcttaaaaaaatgtcaacacaaatctagcaaatcccccaaagaaaaatgctacgagaagtggacacaggctgaccgtactttagcggtctagctaaatttccaccatttgcctgttgccttattaatccgcatccatagtttgatttttgaaatatactacctccgttttttaatagatgacaccgttgactttttcttatttgtttgaccattcgtcttatttaaaaaatttatgtaaatggataagatataaatcacacttaaagtactatgagtgataaaacaactcataacaaagtaaattataattacgtaaattttttgaataagacgaatggtcaaacatgtgagaaaaagtcaacggcatcatctattaaaaaacagaggtagtatatagttaattttaaggttttctgattgtagtttattttctaaaaccatcgctaagaacaaatataaagtttaaccaaatttattttgttgttctgttagtttttccacggcttatgagatgtaaagaaaacgatgaggtctaggttctacacggtgcgaattcaacctcggggtgactgaacaaaatgtatattttgtcaaatagtcagctacaaaaaaaaaaggaacaaatccaccttgcacctcatatcattgggatacaacttttccgcagcaaaacgcagagcttttatctagtttcatcgcaattcgtccatttcaaacagaacccgtggcttcaccaacgaatataagcatatttataaggatccataacgattccattgctagccacaaattaccataaacaagacaacagacaccggagaagttgtctagttcaagcagatgcataaccaaaaccaagtcaaatttcgcatgaaacaccaaatctaaaattatagctgctaaattactgctgctttcaccaaacttacattcatcatagtggacagtttcagtccaaatacagcctagtcttgccactgttcgttcaaaccttcacatggtcattctgcttccctgcatcaggcaaaataaggattcagacataactcagaacacaagttattcccagcaaacaataaaataaaataagtaccatcataggtctcatgacaatgaattaaaataaatggtcaaatggttaagaaattccaatcgtcacaagagatcgggtgaaattgctttatgaaccaccgaatttacatactgcagttcggtaacatcgtaccatgaaaagaacatataaggatttcttgttccagaccgtgaagctacctgagtccagtgcatacttttgtaaaatataagtattgtgttgcgccgtttaaccaagcacagacttgttgacagtttaactcaacagaataatcaccggatatcaatctaagctaaccatgaggcagaccggtaacatcataccatgaaaagagcatatgaggatttccaattccagaccatgaagctaccctagtccggtgcatactttttttgtgttgcgcaattttaaccaagcacgtacttattgacggtttaactcaatagcataatcactggatatcaatctatgctaaccatggggcggacgtcccatatgaacaggtagatatttgggttacattagcaatggaaacaaccttaatcacagcttttgatgatttgatcaagcgtgccaaataaaagagccacagccagatctgaatctaatctagagcataaatgcaggatcgcagttgtatacaacaattgttggcttgttaaacatagttccagattaaaactgtattcgctagttgcctacctaaaataaaaaaaactcaaatgtttaagcaaatataatagataacctaagaggatgattactactccgtagttaactagtacttacttttgtgggcatgtgtactttaatggtgtataccagattaataagggttgggtgagcacaggggatggagcacagtccctaaggaacaatacatcgaagcagatatctacactatcttaacgacagagtcaagtggtacaaaacaattcagtgaaggctagaaagcaacttaatgatcagttataacctttacagagtaaccccccccccccccaacacacacgcacacaaaaaaagagaaggaaatccatgcagaccataaatgaccttcatccaggttgcctaatactaaactgattagtcagctaatcaaattctcaaatgcagcttcctgacaatttgtcatgtcataacttgggtggaaaactatactgcattagtcagcaaatcgaaatctcaaatgaggcttcctaacgatttctcatgtcacaacttgggtggaaaaaaggaagactgcattagtaagcaaatcgaaatctcaaatgcagcttcctaaagattttctcatgtcatgggacctgattgagcagcaacgtaagggtgtaaagaatggaaagtgtttgaagcttacatagttaaagcagcaacaaccggcgaaggatgagccaaatgacgagtccgatcaataagtttgtaaatctgtctgtgctgtttggttatgacagtataattattgtcctcagtgtcatcccctccaacctgagagtaggtgcgatgaacgatacgcgctttatgcagcttggcgtctggaccaggagtagcagcagatcgaacgtcgatggaagagaagatgcccttccccaaggagcagaaaagctgccctggaacaatgcccttggacaccacggggatgttgaggatggacaactccgtcttgtgtgaccctgaacttgttggctgtaaggggaagaccctgatgtcgtacactgcagcagcaccgccattggctatggagcgggcaatgaagaggtggccaccaaggggaacagccttgccgatgaaaggcaagttgttggcgtccaccatatcccactggttggtgtccatgtcgaaagcgcaggtgcccttgtcttgctgcacggagagcagtatgtgggagccgaccacggcgtaggaggcgacgcggacctccggcgggtcacggtactcgagcgggttgaggcggacagggaagatgggcggcggcggcaagtggtgccatcccatggttctcgcgtcgtgaggggcgaccaagacgtagttgaggtcgaggtacacgaaccagggcaggaagtcgaggccgggcacgacggaaggggttcgggagagcgcatacagcttgctgccccgcgggatgaggacgggccggagcttaggctcgacgaggaaggggccggggatctccatcgaggtcttggggtcgtacaccgtggtgaacaacttgccgccgacgcctacgatccggggcccgtagcgcgactccacggtggcgaaggacatcccgcggacgttgtgaagcacaaggtgggcttcgccgccgccgccgccgccgccgagctcgacgatggagtgcgcgggcacctcctggtcatcgtcgtgctccaccgcaaggtacaccggcttcccggcggcctcgcgaggagaagcacgacccaggcgattaagcctcagtcccaccggcgccaccgcgccgtccttccccttactcctcctcttcttctggctaggcgtcgacattgtttggtctgggacttgggatggggaacggcagcggcggcgagtgcgagtagacagagaaagaggaaggaaaccctacataggccgggtcctcctcctcattggcccgagtgaaacggcccatgctccgccatggcttttgaatcggaagtaagtccactttgactccctcaaatatagctgcaccgcatatccaacagcctctccaagtgactttccaagccaaattttagccattattataaaaaaaaaagggggttaattggatccatgctattgcaacttttctaaattaaaaaaataccactactattcgtcatatcagctacatatgccactcgaaatgtctaaaattagaattatgtcactctagtcactttttccgtcctgctctctcacgccgtctttgttcccgtccttatccccctccctccttcccgtcctcccgctcccaggtcaccactgctggggacaacaccaccaccgtcgtcgtagcctacgcaagggtcggcggcggcggtgcaagaagacgaggctggcttgtggttcctgttcgctctcaccgactcactggagaaggacatcatctcggacctcttctacgaggcgctcatcgcagcggtggtggcggctgcggctgctggcccaggcgccgacagcgacggcgacgggcataaacctacatccacgaccaaacctatggagtaatccacacttgaacacctcgagacccctacaccttctccaccacccggaagcttcctcgccctcgccacgcacggtcgctgactgagacggcggcggtggcggtgtcgccgcatacggagacggcgtgcctccccatgaagccgcccttgtcagtcgtcggcctcatgtaggaactggtcgccgccttcctcgtcgtccccttccgtctacggtgcccatcacccgctcgtccgccaccaccaccgttgcggcacccactctccctcacgagcaccctctccaactcccgcgtgatccactccacctcatatatgtccaacagcatcatccccttccccggcgaccgcgccggtagtggcggctgcggcggcgaaggaaagccttgcaaggacgacgcggcaatggtggaggaggagcatggcgggccaggcgcagcgtccgaggcgccacacgacctgatgccgccggccaagtcgacgcacgcgtcttgctcaaggcagcaaatgatgagcctggcggatggcgacgacaatgccggggacctgtcggtgctcgtccgggcgaggacgtccagtggcgcggcgcagcagaaggcggaggctggcggcgccacgtcgtcatcgatgctaagtgcgatcgggtcgagcatatgtggatttgttcggattcgcccttgtcgtcgtcgatctgactcactcggacctccttgcctagttcgtcgtcgacgtttccctcgccgggaggtccaccgcggtggtcgggatgaggacgggaacggagacggcgtgagagaggaggacggagaaagtgactggagtggcatggttacaattttagaattttccagtggcatgtagctgatataacaaatagtagtggcattttttcaatttggcaaagttgcagaggcatggatccaattaacccaaaaaaaagcatcttccaacagcgtctccaaatggccaaaaccttccctccactagccaaacatggccagccaaagtcactagtcaaaggtgcgccccacattcattcctcctcccatctacacattcttttcttcgctggtgctcgttgctgttagtcggctagcgttgacgacggcatggagcagagaggcgccggagctgcctccctccgcccgcataccccctgttgtcgtcccaatcttccctggagacaggatgcctccgccgcccctgccgccgacgatggcatggagcaaagatgcaccggagctaccttcctgtgacatcctggcccaatttggattaggtttgttatgcccatgtgagttgtgtgcgcatatttagtaccaccttactagcttagtatgagtggaaccaacttataaagcctattcccttcaactatatcactctcgggttaacccttttacacgaagcgaggacgaaagtgtaagtggggtggtatgtgtaagtgggcctgcccgtcggatgggctggctacgcggttctggagggacgactgttacaaatggtaccagagatgacccttgcggttgcacgtaccggtcagtgtgcaggcatatggcgcatagcgatgtgggatctgtgtgatgcattgcctgtgtggaaccaacttataaggcatatttggatgtgtgcgcatgtttactaccaccttgctagtttagcatgagtgaaaccaacttataaggcatattccctccaaccatgaggcatattccctccaaccatgagtggaactaacttataaggcatatttctccaaccatgagtggaaccaactaaggcatatttagatgtgtgcgcatgtttactaccaccttgatagtttagcatgagtggaaccaacttataaggcatgttccctccaaccatgagtggaaccaacttataaggcatattccctgcctccctccaaccatgagtgggaccaacttataaggcatattccctccaaccgtgcctccaacccgttacaaatggtaccagagacgacccttgcggttgcgcgtacgggtcagtgtgcaggcatatggcgcatagcgatgtaggatctgtgttgatgcattacctgtgtggaaccaacttataaggcatattccctcggttgcgtgtacgggtcagtgtgcaggcatatggcgcatagcaatgtaggatctatgttgatgcattgcctatgtggaaccaacttataaggcatattccctctaatcatatcaacttataaggcatattccagccatatcatattccctccaatcatatcaacttatatggccgttacaaatggtaccagagacgacccttgcgattgcgggtcagtgtacaggcatatgacgcatagcgatgtaggatctgtgttgatgcattgcctgtgtggaaccaacttataaggcatattccctccaatcatatcaacttataaggcatattccaaccatatcatattccctccaatcatatcaacttatatggcgcatagcgatgtaggatctgtgttgatgcattgcctgtgtggaaccaaccatatcaacttagctgtgtgcatttgccatgtgagctgtgtgcgcatgtttactatgtttagctgtgcgcatgtttactatgtttagttgtgtgcgcatgtttatgttaacagtgaaatttggtaagccccaaagtcaccatcagcttggagtcaatgtcggcttcaaagttctagaatcagccgatgagagtcaagtcgccacgatgtcgtgttctcgatggagtcggatcaaagagttcgagttcaagaaggatgcggcatggcagtttatctattaattaggaatagtttgttagtttccttttgtctttaggaaagtgtgtttagtgtccgataaggactttatgttttccttttatctttaggatagtttctttcttgtccagcaaggacttgtattaacccatgggtataaatatgtgcacccggggtctatgtaatctatcaatctatcgatcaataacactctcggtgcatcgccaccctcttccctgaggtttttacttctcttctggcggaatttgggcacctgacgcggggctgcattggcttttgatctccagcgaaggggtaagtcctacattccgtcgggccctagtgaatctgtcatctacatcggcgtcgttcaaggctgcattgttatgatctcttggatcactctggtttggttgatatatttgcctaccaaatatctcaattatatctctaattgtattgtgtttagagacgaatcggtttagctgggattatctcggttaggtctgatctcctgtattagccgatatatctctacaatcataatgttgttctaaactgatttgttacatccatcacattagacagatctatcggctcatcgagtattagattatcatatacaatctcgtgctgcatcggttaggttcgacctactagattgttgttgataatataagtcttattaagccgataggttcatgctaatgttttatcggggtgctagccgataagttatctggacgttgcatcgacttataaggattgcatatacatataagttggatttagccgatggcaacaaaggtttcactgtttaatctaatcttgtggattttatgacattggacctccagccgatgcatgctttaaccttcgggtcaatacttgttctactatatcatattgttagccgattggtttctattggattatattgctatattatattatcatcagccgattgcatttatatcattatctacattagacatatagccgattgtttaaaccctatcgctatcggctggtatcgacatcgactattatcggctatcggctggaactactccatcggtttgtcagcagatcggctgtttgatctattatttgtatatcttgtcagttacaggatcaaactgactggcacgcccgcatctcatcaatctttggacctgcacaggagttaagcagatctcccaggccggtgtgttcgattttttcgtcaatagtttactaccaccttgctagtttagcatgagtggaacctgtgtgcgcatgtttactaccaccttgctatgccgtgtgcgcatgtttactaccaccttgctagtttagcatgagtggaaccaacttataaggcatattccctccaaccatatcactccttgcatgtttactaccaccttgctagtttagcatccaaccatatcactccttgcatgtttactaccaccttgctagtttagcatgagtggaaccaacttataaggcatattccctcactccttgcatgtttactaacaccttgctagtttagcatgagtggaaccaacttataatgcatattccctccaaccatatcactcctttgttcggtcacttctcttctctttgttcggtcaattctcttctcgtttaaccgaaaaaaccgaattatcaaaaaagtctaaatgcaacctacaatccactacgttcaattaggactaagctctaattttcacatccttacttattataggcatgcaacctaataagagtatttactcataagtgcttacgaatttttttgtaacttttgtgttgaaaatttccattttctttgcatatatgaaaatgttgttgaatttcggtcaggaccgagaccgaatttgtctgtcctgacattttttgcattgaaattcggtcttcaattttcaaagaccgaaagaccgaagaccgagaccgaaattttcggttagaccgaatgcccacccctagttgtgtgcgcatgtttagtttagcatgagtggaagggtgtatgtgacatcctggcccaatttggattaggcctgtgtggctcatgtgagctgtgtgcgcatgtttagtaccaccctgctcagggtgtatgtgacatcctggcccaatttggattaggcctatgtggcccatgtgagctgtgtgtgtgggccatgtgagttgtgtgcgcttgtttagtaccaccttgctagtttagcatgagtggattcaacttataaggcatattcccaccttgctagtttagcatgagtggaaccaacttataagtaaggcatattcctttttacacgaagcgagaacgaaagtgtaagcggggtggtatgtgtaagtgggcccacccgtcgaataggctggctatgcggttctggagggacggctgttacactcccttcgtctgccggctctgctgcaagccgaggtagctccaggccctcgctgttggctaaagagggacggagttgacgccgctcattgcctcctcctctctcatctctcgcatgccatcaaggagcagatccacgacgttgccgccacctcacatgcccttcgtcgccgtcacctcacacgcccttcatcatcgtctgtcgtcgcctcctgtgcacgagcccgcctcatgcgagcacggatccgccgtgcgtcattgccttgtgcgcccgtcaccatcgatgttcgtcgtcgcctcacaccacagtaaagggagagtaacatcgacgcctcacaccacagtaaagggagagggcgctgaaaggagcttggggtagttgtagaggaggaagagtaacatcgacacaccacagtaaagggagagggcgctgaaaggagcttgggggtagttgtagatgaggaagagtaacatcgacgcctcacacctaaagggagagggcgctgaaatgagcttggggtagttgtagaggaggaagaataaagagtaaacatggctaggaaaaaggggagaaagaggaggaggaagaagaagaggcagtagaggctgacatatgagtcccacctgtcactgactcataatagagagtgtagatggagagtatgttgaagtaaagtgtttgaagaggctgatttgggtattatgttggagatgctcttaaaaccagtgtaatttgattccctcagcggttttagaggatggtttcactgacgtgacacgtagacctgatctatactgtggagtcatcctgtggagcccacacaccattctcccattcctttccttcttcctcttcctcttcctctctccttcctcttcctcattcggcttctccacagtgggctgtgggatgattactccgctgcccgtgaggagatggcacagccctagtcatttcttttttaataatagaatataataccggcatttgcttaacaagttataaccaattattacacaaatttgctcaaaagagtaccacaaatgcacacaaaaaatcttgtcatcttgggcaccaccgcaccagcaaattatgaatacatatcgaggaggctttcgattatttggccgaactcacctatcattttcttgtttctggaatcaaacacaacccggcgaccttgaacactttatgctcttaaaacacaactgttccattgcaatcatacaaatcgcattattactgtaaaagtgataacaaatcacgagatgttcttgaccatcatcagtgagatctgatgtatatcactactctacacaacagctaaagatcaataacaacaaagtggtattttagctggagtttgagaaaagagagtggcccttcatgcacttctcaagctctcatagctgttctggtcctgaactccgccgtattacttctgatcatctctgtcatttgggcatacattacaattttgaaactgcactttagtatcccatcaaaactgaaaaaaaaaagatgatctaagagctgcaaatatgtatgtttagaacaatgaagaataaactgattttacattttctgattgctttactcggccatcacatggatcttgggctcagcaatatttatgaataatgatgttgtggtaggtgtatcatccaagaacatgaacatatcacttgtttctatatcatgctgctgcagtgtccctattagaaatctaatcaagcatctctgaattccatcaaattacaactacaattgtgacataagatagtgccgatgatagatcacattttattcaacgccatgtcaaataaatacaaagtcaacgtgtcacattagccgaaaccaccatccaaaatcatcttgagactatagttgcactcgttttggaaaatgagggatgtgttggtactggttttaggtttgagtgacgcgatccaaactcgagcattacatgagtgacttaaattgaactttttccgcgtgagaactagcaagtgggctgggccgtgtccaccgtgccgctagcgggccggtccgcagaagacaaaacaccgggccatgtcgacacggcctactttgtcagttccatcagacacaaagccacaacaaaagtctaaacctctagctacccaaaccaaaccctaatttctcttctcaaaaaaaaaaaaaaaatccagcggcggcggcggcgcacatggatcagatggcggagcggcagcacaagaagcggaagccggagaagatggccggcgcgcgcaccagcggccatgataaggaggaggagaagaaggtgaaggctccttctgtgtacctggtggtaggccatgaggtgagctgggcaacctactccgtgttcaaggtggatccctacgcggcggcgaagagaggcggcggcggcggcgacgaggaggatcccgctccggtgcctatccctcgccggctcgcccgcatcagcgccaagttctgcatgtctttcgcccccgtgcccgtgcgctcatggatcgtcggcgtcgggggcgattcagcggatgaggactacgccccggagaccatcgtcttcgacaccgagactcgcgccgtgatccgggggcccaacctcctgtcgaccaagctccacccggttgtgctcaccatcggccacaagatctacgccctggcacggtatccctccgtcacggggcaactcgacttcgttccatggttcgaggtgcttgatctctcccaagcgcgcgtggtcgatggccatctagagagctgcgagtggaagcccctgccacggcctcccttcttcccatgggacctcaccccattgcagtacctttctccgccaatggttactgtcgagtcctacgttgcactggcctcctgcattctggtgtcattatctcagcaggagggcacgcacatgtttgatgtcgacaaggagcaatggtcgaaactggatgacaacagcctgccattcgtcagaggcgccgttccacacggacccatcttccttggcttatcgagagccaagaaaatcatcaccgcatacaatatcacagtggtctgccaaccaaggtcaggcggcacagcgccgtccttatcaattgttgagttccctgtggtgtctgacatggaagaggagatcttaagcacaccaatatttctttctctcggtagccctggcttctgttctttgaaaagttggagcgaccacccaacgacggatgatccatgtactcgtgcacgtatcaaattgatggcataccatacagaggaacccatatcacaagagtacatcgagtcttctcatggcttattgataccgaaccagtggaaacaggtgtacgagatatgtgattcgtccagggaattgatttggcaatgcctgatcactgcaatgtccttatgagtaagcccctttgtcacatctagtccctggagtcaatggattgtggatttcatttgatttcttgcactgcctgtttatttacaactgcaaccataaagcatctataagatgacattactgctaatcatggattaacaccttagcacggtactgctacaatgtatgtcaggattgttggttcggggtgtgtatgtttgacattgctatgcctgttattgatttgcgatagtgaccacatagaccttgtcttcataatactgaagataaatatcaatactggctttagtttatataagacgacataaattgcccagagctgtctttttttttttttgatttttagtttttttaggaagcttctcatatgttagttctgtaaaggtactcgatttaagatttgtatctacaaaaagcaacaatctacaacagcaacagtatatttgtttgctgttaattagtttgagaaatatattaacattgctcaatcctgagctcaaaaggtaaaagcctactaatcctccctaatcttgccgctctttatacatgttaaccattggcgtctttattcttatatctcgtgttgtttcatggctttgagcttgggcccattaatgtgaatggtgaggcagcagagttatcattgaccatccttcatttctaggtcataaccttttctagactacataagcgacaatttttgttgtaaacttgtgatggcttttcatggttttgatttacacatcagctgtttactactagagtgattttagttgcactcttaaaatatttcagatggaaaaagaaaacagatattatagaagaagctgggggtgatctatcactctgcaagattgtatgttgctagctgtatgtagatatatgttgttttcaattttctttgcacgatgatggtggttatagattgatctctttactcgtgtacatgattgttagatcagaggacgaatatctctttttccatttttaacttaatcttgtagcttacttagtaagcacccatctcctggagccggtgcaacactataaaattcaaccacataccacaaacaattgctatatgtctacaaatatttttcctggattgggagaacactgcaaataatataactagaattcggcaaaaggatcattggtgctgaagctcctattttgttctatggttgctacaaccatgcattgattttttatctctttctttggagattataaggcatgtgtagaaagctttggttgcatgcttttattaccagctttgtgtggctactgggctagtggctatattcataaataggaaagcacattagctccaggatgtgatgactgatgagagcacatatggtgattggggaatgcagtaaggtcgtaaattctggcaataaacttgttatgacttaccttgcttcctatggtggatattagctccagcagtaatatgcctttaagttgaaaatagcattcgttttagtttgatgttgtcacatgcatacctgcttttttgtactgtatcataaaactgaaaaaaagtattccagtaagcccataattcaatcagtcaataatatatttacctcatgaaatgtactgtttgtattgaagctgcttgtattagctgtagtatgttatacatgttgcctatttatgcagttaatcgtttggaacccactcattaagtatgccgtcttttttggaagtactttgttcaatgtgcagggaaaatgttgtgagagctttgttgattgaacaactgtcattattatgctatttcgtctatagaaacatgttttttgggcatttcactattagttcatcggttaaaaaaactcatacaacattattgggcaagcatatgcttcctataatctttatcagattgccaatatcattgtttgttctgttgtggccttccctgaatctggtatgttgggtaattacaggtgtataatcttacgaacactacaaagtaatgtgagtttgtttgtgttaatcacattccacatgtatactgccttaatctagctcattttttgggtttaaccgtttattggtagcagttttaatatttactctattttacatataattctcaatattttatggttccacaggtatattccatgatgttggagccaccagaagtttattgtagaggctggcttaagaaaacggtttacttgtagcaccctacaattccagtaaattcttcagagtacaacagctttgcatggcttcgaacttagggagtagtgctgcagggcatcttttgcttgtgtattaagtggatttagaatatgatatttgaggagaaatgatcccctgtagtatctatgctggactgatctaattgaacctgtctaaaagagtttcatgtatgaaacagctgtacgtatatgtgatgtgacgtttaatcattcgtttaactaaaaaaattatataaatattatttactagcaaaatatgcccgtgcgttgcacgggtgaatatcaaacaaatatggtccttgtgtacttataacacgtgcaaaaagatattgaatttgtacatattcaaattttatacaagaaaatatcaaaacatctcatactgtatacacattcagattcaggttgtatctcaaattttatagtacatgcatgagatattctaagttttctacacattcagaacatactccaactttcacaaatgttcacaagagggtgtagttacagctctgacttcaccatcctctacaaaaggaaaaaggtaaaatgcatctgcaataggaaagaaacatgcactttgtagtatcataataaattcactcaaaaaactttagtggaatatgttcggattatagaaataatttaatatttaagaaagtaataattatcttgacataaaaccatattaacgcttatcaaatacaatataacataattaataatttctagataattttttagtttggttcatttatctaaaaataatttactgagtgatcaaataatcgatcataatttcgtagcaattttaaatggcttaaaatagtgccaaacaaatttctgtaaatctaaaaataattaaatcaattccttagaaaaatactggattttcgcttaaaaggctcgaaccggcctagcactgtgcggcgcgtgctagtgcacagcgacccagccgataggcgcgatcgcggcccagcgagcagcgcaggcgggccgttaatttctgtggcccaaagcgggagagaggatggccgtccgatccaatggacgtccaagattgcagccgctccagtgaaattgccgtcggatgagaggggaaaccctagccctcgttcttctcgttttctcaatcccctattcccctttctcccatgagcgagcgagagagagaggcaacgacgatggtggtccagcaagtgagaagaggagtatagggtattaagtagacttttgcatatgcgggctgaagaaaaaaaataggctgaaaaaggcccatagagaaaaaataatttttatttaaataaatgctgaaatgatatttgtattatcaaaattaccaattaagctatgtaaattctaaaaaaattgcaaagagtgtaattaatatagaaaatttaataaaaactaaatccaaccataatattttatttctcacacttactttacttgaaaattaatttaattatatacctacctccttaaaaataccctaatattctagaaaatgtgtatttcatttaattagaatttaactagcaaaatgcccgtgcttcgctacgggtataataaaaggttaaatgctatacatacaccattaacatgtatataataatgttccaacatagataaattattcagtgggttaatgataatcaggactgataagaaacactattgcatattgatatactcatattttcataacatgcactctctctcaactcttgcatggcaagcgcctaatataattatttctaaaatcgaacatggacttgcgtggagatgaatcattttcacggctcatgcgtggacgatagatggtgcggactctaatatgtcgtgttttgcagatgacgaaaagaaaaaaaatatgtttaattttcaaattaaaaaatggttcattataagatttcagaatcactaaatatctgttgaagaaagaggtgcaaaaacttctgattttttagccatcggattcatggcaagcgcttgatataatttctaaaatcgaacacggacttgcgtggacacgaatcattttcatggctcatgcgtggacgatagatagtgcggactctaatatgtcgtgttttgtagatgatgaaaagaaaaaaaataattatgtttaattttcaaattaaaatctggttcattataagatttatcactatctgttgaagaaagaggtgcaaatagatggcgcggactctagtatgtcatgttttgcagatgatgaaaagaaaaatataattatgtttaattttcaaatttaaaagtgggagggaaagtagacttattctgagtaggatttgagctgtgggaggcaaagtagacttattccgagcaatgatttgagatatgggaggcatagtagacttattccgagcaatacaacctaggaaaggtgaagtaatgagatgtgggaggcaaagtagacttattccgagcaatgatttgagatatgggaggcacagtagacttattccgagcaatatagccgtatataaaaaggatggatgatgggaatcgaaccctggtgggcaggttgaaaattttctccaccaaccaggtgggcaagctactacttgtgattgatggttacattactgatacatatcatatattaagcaaggttttggagtagattagaaaacttccgaccgactattaagcggattaaaacgtattttggcaagagggagacggacgaaaagaagaaccggaagtcttacgtatttttttattattaggtatatatatatatatgttttaattcaattttctctttttattttcttttcattgcaacgcattgtcacttttgctaaaattttaaaatgtataattaatattgtagaaattttgtatttcattaaattagaatttaatatgttttaatttaattttctcgttttttttctttgcgttgcaacgcacatacaattttgctaatttatataacgttacctgaaaaaaaaaa

SEQ ID NO: 8686 - DNA, 76649 bp, Oryza sativa
acctaatctgtcaggactcggggcttttacgagtgcattgtgctgctctttccaacaaatgcaagtggtcagggttaagtgcagagcacggtgtgtgctgtccgccatactcgatgatcagtaaagtgggtcacgtagtttttgacatatggtagctgttgacatggacgaggagcaccggacgatacgccagcaacagcagccttgccgtcgtcgtcgctgccaccggtcgccctcatcgtcaatcctccgccattgcggtcttctgaagcacggaccaaggttcttgtttctttgagcacccttttagtgctttttcctagaattggaattcatgatatccctgattatcttgccaactgttaaattttggtgattcatctattgcgaatcaagcattagtcatagcatttgtgatagttgatgttgtcgtaggtgatcagtaacatgcattagtggtgattactgattagtcaggtcaggtgtgtagtttagacatggaaaaaccaccgaaaactgtgttggtagtagaagtgttgaattccgaagtgtatatactcccataatctaactcatgaaacatacagattcacaaaaaatctgtcttctttctctgttccaatcgcgatggcgaagtgatgaggtgcgatagttggcgaagtggaggtgtacggcaattcacagtcgcaaattctcctggtctatattccattaattccagcagataaatatttcactgccatggtgatatatctcgacgagacgacggcgtccagggtcaagcaacaatgacgggggaaacttcgatggtcgacaatggtgatatataggcaacattagagcaagtataatagaacggttgttgctggcattggctcggatcggcagatggcggagtccttgggcttgaagcgtgatggaagcttgcggggccaaaataagtgaaactatatatttacaaacgaaaaataatttatgaataaaatttttatatacgttttcttaactatctaaaaacaaatactgaaaaataaactttgataagaaaacgttaaaatcagctctaaatttaaggctgaaaattcaaattctagctgataagtataaacttaagcgaaaagatgagactcttagaatatccttgtggcaggaacaagattgtgtgaagattggagggagcattatgaggttgttaaaacgttagatatgaaaaggctttcatatcgatgtgtagtaagagaggagtgagtgttcgctgggaatcggcgcgcaccaccgcagaccctgcccactgcactaggcgcgattctcacgtgtatactttacatgttttaaacaattttttcctacaaaatttatttgatctacaattcagttacaccatcatatttggtacaagtaaatcttatatataggctgttacaccatccataattcgattacaggatgtcacatgattatatattttttaaaaaaaatatatccgtacttaaaaaatatataccatatactccctccgtcccataatgtaaggaattttgagtatttgcttccactatttgaccacttgtcttattcaaaaaattttggaattattatttatttttttgtgacttactttattatccaaagtactttaagcacaacttttcattttttatatttgcataaattttttgaataagatgagtggtcaaacactagaagcaaaaacttaaaatcccttatattatgggacggagggagtatgaaatatcaagttaaaacgaatgaaacattataaaaatacttcctgaaacatccagagaagctttgttcggaagttggttactgccggctggcagcagcagcttgaacaatatttttgctgctgattcagttgttgcaggcttgtagtacagcgttgtggctgcacaggaattgttgccgaacacaggccactatatacaattttcacaaataaaactagtgaaacatcgtaaaatacttattgaaacatccaaataataccatcagaaatatttaaaaagattcattgcaacgtaaaacttaaatgtgcaacggaattgaattttggttgaaacattgtttccaatacgcaaaacatcaattttcactaattgaaacatatgtattttatatgaaatcttgatgtagagttttaattataacgaatagaacaatataatcgaatcacatatttgataaataatttagaagaaaaatcattttgaagattgctaggtaaacaattaatgcatattacatgaaatatgcatactcctttatggagagacagtgaatgagcactttccgtggagaggaaagaataaagaacaactcgcgtacaatgtttttccctttgcattcccccaattattttggttgttcaggagcggacactgtgtaggttataggaattcacccaaacttttttctcttgaaaagaaatactatatgtaaatactagaagatataatgatactgcataagtaaatactttgctgggcctaatacctcgttcttaggcctaatactctgctgggcctcctcccgactcaccggcccaataactgcccaggacgcttcctccctaatcgtcatctcctcccggtccccgtcccccgatccccaatcattcctcccctgacgccgcgccgcaactcgccgccactccccgtcgccgccgccgccgcttgtcgaagctggtttgggggattcggggatttgacggattagaggtgactgaactctcgctctcctgctgaaatcataccgtatttttgtgatgatttatggggaggaacctaggttttgatgagagaggcgaacactgatttgattcatccaacgcgttatattcacatcctaacatccagcctttgcgcctacgcatcaggaatcgcagtcgcagatggaggccatggacgacatggcggctctgacggaggacatcctcctccagatcttctcccgcgtgggcagcatcaaggacctcttcaagttcgccgtgacatgccggcggtggctgcgccgcttcaccgacccggccttcctccgcgggctgtgcctggacagcggcgagggccaccgcgcgcgcctcctcggcttcttcttccagcagacgagattctatcgctgcgaaaagatgatcaagatgcgggtgacgcagcagagctcggtctgtccgcccaccttcctgccggcgccgtggtcgccgctcggcctcacggatcgcaccctcacctccttcctcgccgccgacgacgacaccttcaactacgccgagcccctcgcagcgcgctgcggcattgtcctgatgcggcttgtcccccgcaccgcgctgatgatagcgtgcagccacctcctcggcgtctgcaacccgatcaccggggaatgccacgttctcccgcctctgaatctctccggcctccatcgctacttgaccagctacgccatcatcacgtccaccgacagcgacctagatgggaagcagccgccatcatcatcatcgtcagggcgctccacgttctcgcagctgtacctcgtcgtccaacacaagaaagactgtaacgagtacttctactcctactctgctgctacgtgcagctggagcgctcccaccatgtgcgtggacggccgccgcttctccctggtgggtgagagatccgccgtcgttcacaagggcgcggcgcactggctgtttattgatcgtgtatctagcgcaacccaagatgacatactgtacaaactcaccgcggcggtggacacctcagaaatctccttgacaaggctcccctttggtgctggaggctcaccgctcctctgcgtcagtggagacggcaaactttcggtcgcttgcgtgtttcccatccacatgagagtttggactcagcaagatgacacccctgcaacgtggctccgcactgtgatcaggataccattggcggtgccttacccagactattcccatatatgtcagccccgcgagaagtggtttaacttcaacaggggatcaatgctcgtgctgtacaggagcaacggcgtcttcatcctcgacctcgagaagaaggtgatggaaaaggtcatggactgcttactgcccctattcagtgataaactgaacaggacggctgtggcgtatgagatggacttggttgagttctttgtgctccagctcagtggtctatgtagagggtctacaggataattacagatgttatgcagtgggaaaatatatgttctagaataagcaagtttaagttaaacaacagcatattacatggatcatatgcaaactgtgcaaactggcgagtgatatatcttgttctgtagcacggcattgtcattttgatatggtttgacctttactggtttccactgtaacatcccttcactggaaaaacaaattctcttgatcttacagttcacaactacgcaggtggcatttgcggcacagttcacaattttctttgtttgcctgttacgcttgctagcaccttaatttgtcaacttattgctagtgttaatacttatacatctgatggtgtaaatcaaaatagtttctttcatctgagaatccctgattgatctgtttgtaagctgtgttcttgttttgtatggtctgagtaccagctgctttaggtagagtaactgactgtcagttcctgagaatgccgtaatgctagttgtattccatagaactgtgattccttgcagtttacattgtctttattttatattcgatttcttattattattcggctagtaaatgcgagtttcctctggaatctgaatgtaccactttgagctcttaggagttgaagtgagttggagctagattgttagatcctgacgtttttttcttgttactgtgaagaacctgtttgtgctttctctaaaattggacttatatgcacgatatccttgattattttgtctactgtcaaaatctgatcacccatttatcagaaatcatgcattagtcacatttgtgataattgatcgtaggcaagaagtctatattgatgtttgacatccttgagtagtggttgctgatttgtcagctattgtctagacatggaaaagctactgctgaaaggccttcgagttctgaaggttatatactcctacatcttacatagaatttggatagaatgcgtctgttttgtttgtagttagtggcttagtgcacactgttgaatttgatagtatttgcaatacagtgttatatgctgctaaactaaggctgtgttcgtttgtgtgagatagggtgagaaaacacctcgttttccgcgcgcacgcttcctaaactactaaacgatgcgttttttgcaaaaattttctataggaaagttgctttaaaaaatcatataaatccatttttgaaatttaaaatagtttatactcaattaatcatgcgctaatggctcatctcgttttgcgtatcttcccaatcttctcaatctcctatctctcaaactcaccctaagtgaaaatggatttccttgtgaagattgtagaaacttcactaattgccaggattggtctaatttgttccaaggtttatggcattttttgtatttctttactcctttaaacgtttctggtggcgccgccaccaccaaatgacatttgggctccacataactagttgcagaaaaaaatgtgagagtttgcgtgctcagtgatgtcctgaagagtatgtgtaacacaaagatgcataacagaagactagttatgatcacgccgttgccaaaggttatcatcaagttccttgtatgttgtccactatgacttattttggtgtatccctactttttaatctctagatataaaactatggccaatatattgatagaacacagctgtaactaaatgttgcgtttctgactgcaggatacatatggaaattgagtttgttggtgatcacagttacaggtctggtaagatagttattgagtttaacgattgaacaaggtgtctggaaataccaccaggtgcttcaatctttgagcaagatttttctgcgctctccattgttttgtgttgtgtttgtttgcagtctgaaccatgaaagaggaaggagaaagaatgtgagaggaaatgttcttggatttttctctagcagagagatttatcttgtacgacaataaatgtttgctgaattcttagtgtcatctcaaaattcgatttgtctaaacaggaaaaactgacctattaatcaaaatatatagagtttaccctgtttttaattattattttcttcttatttacatgctgtttatggttacagactccatggcaaaaagcccaaaacctgaacccaaagaaagaacagcccaccaccacagcgctccaaaaacggggcccactgcacatttttctttgcaacgtcagcgatccgcacggaaacgcatcgcagccgtctaaccgaaaaggcaccggacgtcacacattcatccacgtcatcgatccgcgggacaagcctctccaccaatcagcgcccacttttacccactataaactcaccgcacccgtgtcctccttccacaccgcaatctcgcaacacatcagcacacaccgctccaaagcaaaacccacggacccgcttcccctccccgagaagaagagagaagcatccatggcgcccaaggcggagaagaagccggccgcgaagaagcccgcggaggaggagcccgcggcagagaaggccgagaaggcccccgcggggaagaagcccaaggcggagaagcgtctccccgccggcaagggcgagaagggcagcggcgaggggaagaaggcggggcggaagaaggggaagaagagcgtcgagacctacaagatctacatcttcaaggtgctcaagcaggttcaccccgacatcggcatctcctccaaggccatgtccatcatgaactccttcatcaacgacatcttcgagaagctcgccggggagtccgccaagctcgcccgctacaacaagaagcccaccatcacctcccgggagattcagacctccgtccgcctcgtcctccccggcgagctcgccaagcacgccgtctccgagggcacgaaggccgtcaccaagtttacttccgcttaggctgcatgccttcctctagtttgttagtagtagtagtagcagtagattgatctgtttatgtggtagtttaagtggaaatgatgattgcaaatgaagaattgtgcggggcttcttttggggaactcactgatctggaatagtaatgctttttatgtcatgtgaacatatctctggttgccaattgattttttgttttgtagaattgattacatcgttgatgtttgcatcgtcttgaaaatactctgcttgtgactggaatatgattttcggaacatctgtctgtactccctctcccaaaatttgaactggaaatttagctaggactccatttttggtactgctcaagtacccattggctcaatgtattttgtaggtttgatggaagggaagcttgatggccattttggttcatgatgttgcatttggaacataaaaactgtgtactattttgagctgataactttgaaatctgaaagtaagttttgcttcagcttcatttggtactgtttcaaatcgaaatatagaagttgaaatagtaactgaaacgccatatgtcttcgcttactgtttcaggagaatgctgttctctttactccttcctgttctgaatgtccgaatgggtgctttttctttgttactgattcgcttgtatgctagtaactgggaaacatgaggtatgcatctcatctctactgccacatcttctatcatgcttgctgttgtggtgcctgcagccctgcagtacataccatgcctgaaaaatgtgaccaaactcttgtgggttctacttgtaaattgtaatgttatcctttctattctctgtccagcatggttgtttgaggtgtactcaggttctactggaagattctcttgtagcagcatttttggcacgctcatataaaagcttcggtagctactgtggaatgtgatagaaataatgggtctgatgtttttgggaactctccttcatttctatttggttaactgtttgagcatttaagcgtttatctttttcgatagcataaattgttatggatttgatattctgtgtttaatctgtataattgcaatatttgttgctgtgtcgtatatgttgaatctgagtcagggagttagaaattctgcaactatggatgtgtaggaattggcaatgaaatcttactcacattgtgtaagaagccaaaactctcgtacttctacatcgtgcaatcaacattattgcattctgtatgcatctcttacactgacatgcatctaagcttaatataatgctataacaccttgtgtacctctgattatttcccaatgcaatcatcaactctacatgtggacctcacgtcctcacccaacatttagctcaagtactttactgttcatttcttaaccacctgagacagaagatattcatctctgattgcatgcatctttgacacagcatctgctaacaacattcgatctttggcttgttgctttgagcaggatatgccaagtctaaggacagaaaccaagcagtcttgaacaatacttcgtgttatgcttgcatctgttatatctttattttttgcttcttcatgtagccagattgttcgatcagctatatctaggactcggccaggaaatgctgctgatgcaaatttgtgcagatccaccgaatccttgaacatgtcatcagtagggctccttccggtaaatatctcaagcaataatatgcctaagctgtaaatatcacctagtctggagactgcagaaccttctccgtactctgcaatattttcaatttcagttaatatttaagtatacctctaaatgacataaatttccaattcggaatggcccaagttgatcccccacccattagggtggagggagactaggaagtgggaataaaggcagaatgcaatatttggaactacctggtggaatataaccaatggaacctctgattccaactatgctgtctgaatgttgcagtgctttaactatactttcagggaggattcttgatatgccgaaatctccaaccttagcgctcatgtcttctgcaagaagaatattacttggtttcaggtcgcaatggatgatcggtggctgacaatggttgtgaagataatccagtgcatccaagatatcaactgcaatgccgagtctctgcgaaaggctcagtgtgttgctagaagtgggattgcctgacacgggatgaagccaaccatctaagcttccattgggcatgtactcaaaaactaatgccttgaactcgtgaccctgtggattgatacttgagcaacaggtgatgatctttataagacaacgatgtcgtactcttctcaaagcctcacattcaacctcaaaactcttggcagatcctgattgtcgaaggttgaacacttttacagccacaattgcaccttcatcttctaaagtacatctatagacggaaccataacttcctttgccaagcaaattagcttctgaaaattcattacttcctctggctaatgcataatatgaaactctatgatagtgttcatcagtacctgggattgttgctcgactattttgtctccgtttaagcttcctgcagaactgaattagaacagtagctgaaactaacagcaagattgatcctgttattggcagggcgattttaagagacttatgccaccgtttgttgtttttgcttgcatcaataatgggacatggagccaagtgaagctgaggtattccaccacacaagttgtcgttccctgcaaccgatgcgtacgtaaggttcttgaaaactccctcatctggtacttctccttgcaaattattgaatgacacatctaatttccacaacattgtcaaattttgcagagttgctgggatgggtcctgaaaaattgttctgtgctagaaatagttgttgcagattgccaatcctaccaatggtatcggggatcctaccagataacttattcatggttaggttcaggatgttgagccctttcaggttggtcaaagattgaggtatgccgccttcaaatgagtttttatctagcagtagcgattccagcacctgacaatttcctatactgtcaggtatttgaccagacaactggtttcccgacagtatcaactggtttaggttagccaaggtagcaacttctattggaaggggtccagagagagaattgtatgacaagtccaagtaccaagagagtgaaggaagctccaagatttcctttgggattgacccattaagacggttggtcgataagtccagaacaaataacgtttttagcttcccaaggcttgcagggattggcccttccaaattggtgtagtatgcgtagagcctattcaaatttgtaagatttccaattgatgatggtatgaggcctgacaagctggtgttgtacagggcaacttcaaccaaatttgatagcttcccgatgctcgctggaatcactccagataaggaagtgaaccccagatccagcgtgtccaagccaatcaaattgccaatgtcctcaggtatgctcccagagatgctattattatctaagtagagcttatggagtgtggtcgacaagttgacaacagagtttggaagttgcccgctgaaagagttgtctgagataacaagctgttgcagctgactgcagttggttagtgaagtgataaattcccaacccttcctgttatttgcctcaagtcggttgccatacaagtataatcgccgaagagatttcaaccttcccacagtaggaggcacaaatccactgaatctattaccataaaggagcacaattgtgagtgatgaaagattgaagagagaagaaggtattactccactgaattggttatccgccaatccaaagtattgtatgccagggaacttgtcaccgatgttggcaggaatgcttccttgtagcatgttgtcatttgctgcaagcaccgtcagtgttgacaggttccacagagaggacggaaatatgccggagagactgttctgctgaaaactaaattcacgtagagctgcagctttgccgaggtccagcgggatcaggccctccaggttgttgttgtccatgtacagatactgaagcaatgacaggttcgctagcgatgccggaattggcccagtgaagctgttgttttgcagctgcagcttctggagttgtgtcaatgtgttgcccagctccaccgggatgcggccgccaagctggttaaaggcgaggcccagattcttcatgctgatgcaggaactcagattggcagggagctcaccggaaaacgagttgcctccaatgtccaggatctctagacgccggaggcggccaaggctcgggggaatttctccatacagctcgtttgagctcaagtttaggctctgcaagaagctgaggttcccgatgaccggagggagcccgccggcgagattgccggagggcagcgtcagcgccgccacccgcgccggcgtccgacggtcgcacgtgacgccctcccagctgcagaaactggtgctgctgttccaggaggcgagcgcacttgagctgctccccctgaacgctgccttgaaggcaagcaacgtggcctcatcgctgctgctgctgctgccaccaccagcgacggctgcaacgatcggcgtcaggatgaggacgagggataattcaagcctcaggctcatcatgatcgtcatgggacgtattgtgtttcttgattggtttgtgagagtggtagtgctatatcttagtaccaatggctgtccgtattatatggagagtatagatggtctttgaagcaaatttggagatgatgacagtttgttgattgcattcttttaattccttttttccatttctggaacacttcgtttgactttataatatagtactccctttgtttgtttgttctaaataccttccgttcaggatatgtatctggacaaccatatctagatgcatatcttacatccattatttatggacggaatagtacttgtcctgatacatcattcatactactaatattgctttggtcacttgtttttttttccctaaaaaattacaaatatttttaaaaaaatcatcattaccagtttaccacgagctgcttttgctcatcttagcattaacatttagttaataaaactactactgtcaaagctaaaacagtgctaaatcaagctaaaacagtgctaaatcaacaagaccgttctaaatcaacaaaggtcttggaccgaagtggcgaaagcaatggcgaaggagaccatgctttggaagtcggcttattaagggatccccgctgtttcgtctttacgaggtcgtggtagccaaatttagcacgagatattcctctagtttttcataatgtcctttatcggtccctgcttgttttccttttatccttataaataacttttatttctcttaatgaaaaaaatacgccccttgcgtattaaaaaaaatccacaatgaaaagtatttcgtgaacgagggaatatatacatttcgaacggtcaacgcggccaggtgcatgttgttagtattttcgttgagtcggagagaattgactttcagaacacggcgatttaggcggctaggcgatcgacggaaggcttgcatgatcaacgcactgttacataagcctacttgcagatggagatgggtttaggctagctgcctgcttgaagacgacgacgtcgttgtcgtctcactgggatgttgacgtgggcagattaccgaatacgtagcctaacaagtcgtggagtggctttcagagcaaagaaataggcccaattagcccataaacaaagacagcccgccaagaagcctgacaactaaattgggctggactgggctgtaggcgtacgccgaaggaaagctcaaactctaaaaattcgcccaccgacgcgcgccggaaaccgccttaactcctcccgttcccgctcacatttttcggcatcccaccaacccgtcgaccccggcatccaacgtcgtacatccctccacgtcatcgatccgcgccgcgtgctttccaccaatcaggttgcacatcccctcctctacaaaatcatctccccccgtctcctcctttccccacgccgcaatctcgcaaatcccaccgcttccctttcctctcctctccccgagaagaagagggcggcatccatggcgcccaaggcggagaagaagccggcggcgaagaagcccgcggaggaggagcccgcggcggagaaggccgagaaggccccggcggggaagaagcccaaggcggagaagcgcctccccgccggcaagggcgagaagggcagcggcgaggggaagaaggcggggcggaagaaggcgaagaagagcgtcgagacctacaagatctacatcttcaaggtgctcaagcaggtccaccccgacatcggcatctcctccaaggccatgtccatcatgaactccttcatcaatgatatcttcgagaagctcgccggagagtccgccaagctcgcgcgctacaacaagaagcccaccatcacctcccgggagatccagaccgccgtccgcctcgtcctccccggcgagctcgccaagcacgccgtctccgagggcaccaaggccgttaccaagttcacttcctcctaggctgtacgcctgcatctagtcctagtagtaatagtagtttttatatgtttatgtggtatattgtttaagtgatatccaagattggaaatggatgttaaattgttggtttggtagtcattggctgtaagaagaatggctttgggttgcttttgggaaacacttgcttcacggatcgggcataagtaaccatgcttttataacatgcgaatgtgtgctttctcttgtgccatcattgataagaatttaccttgtgccagtgttggtgatgccttcgtttaatgttgtggaattacatggttgctagtattttgtctcgtaaatttcttttcatgtcattggaatttgatttctgcagcatgtacattggtgttaggtactgctcttttgcgtgtgcctcttttgcgtgtgcctcatgtattgtttagagattttagaagcacacactttgggacaataccaaattgtttttagcctgacaagaaatttagtttcgtgctgtctgcatttgaaacaaaaagtttgtacacattgtttggtgcactagtacatgatataatctgtcctccattgctgttttattctgagattagaacttcgacaagtaagtttttcttcagcttttgtcaggtactgattttcaaagaaatatagcgacaaggaaatggtaactgaaacatcacattacaattattgatttttaagattatgttgtgcccgcatgttttctcattccgttctgaatttctgagtgctgctagcttatgagctaactgttaggtatgcatcttataccaaagttttcagtcaggctattgctctattcaagatatgcattgccttaaggcatatgtgttaagattagaccaaactcttgttgattctacttattgtaataatgtgtcttgtcctttgattcactctccagttaggtgattctccctccagcgaagttggaggtgaataagttacatccaaggttctacgtggaatattgtcctgaatttcggttgggcttgttccataatacattcgctgtcaaataactctaatttttatgacagcataaggattaatatggatgtatcataatttttactcatggaataatttcagttgctattatgaatttgcagtggttggaataacatgcccatattttgagagcaaatcccttggttctatctggttattggtttgagcacttgttcttttcttttcagacaacatgaattattattgatttggtattcagtgttagatctatttagatgcaacctatgttgatgctatgtttatgtgggtgggaatcgtggaactttgttttcttatggttgcaagggtatccctatcaggtaggactgtaggagtagttggttatattttttttattatggatcatggatgcgtagaagtttctgttggaagttgctaccatggtttcgtgtgtaagaagccatatggtcagctcttcagtattatttgatcagcatgattacattgacattctgtatacgtctttgcaatgacatgcatctgagctttatttgataaatataaatcatgcagccttgtattccaacgattatttctagtacaattaattgacactacatacatgtcttatccaacatttagttcaatgccaaccatccaagacctgagatattcatctctgatggcatgaatctctgatacagcatctgctaagagcactcggtctctgggttgttgctttgagcaggatatgccaagcctaagaacagccactaaacactgttgaataattcttctttttgtgcttgcatttgtcacatctgtctcatttgcttcttcatgcagccagattgtctgatcagctgtctaaggctctatcaagaaaagaagctgcaataaacttgtgcaaatccattgaatccctgaaaatgtcatcatagggcttcttccggtgaacatctcgagcaacaatattcctaaactgtaagtatcacccgctctggttactgcagaaccctccccatattctacaagatatgcagtcaaaattagtttctaactgtaccattagcatgtaagatatacaaagtgcacaatccgaccccacccatgagggaggaggtgggaggacttgtgggaataaatacaaaaataaaacttttaactacctggtgcaatatagccaatggagcctctgattccaattgagctttttgaattttgaagagttttagttgtgctgtttgggaggatttttgatatacctaaatctccaacttttgcactcttgtcttctgcaagaagaatattacttggtttcaggtcacaatggacgattggtggctgacagtggttgtgaagataatccagtgcatccaagatatcaacagcaatgctgagtctctgcggaaggctgagtgtattgctagtgagattgcttgacttgggatgatttcagccatccaagctaccattgggcatgaactcaaacaccagtgccttgaactcttgaccctgttggtcaatactcgaacaacaagtgatgatctttatgagacaacgatggcgtactcttctcaaagcctcacattcagcctcaaagctccttgaagatcctgacatttgaaggttgaacattttcacagccgtggttacacttgcaccctcatcttctaaagcacatctattaacagaaccataatcttcctttgccaagcaggttagcctctgagaattcattacttcctcttgataatgcatggtacgaagctctgatattgttcatcaataattagggatgtcgctcggctattttgtcttcatttgagcttccggtggagtaaacaatagaagcacaacaactgaaactaataccaagactgctcccgttgttgttagagccagtgtaagagacttaggccaccgattctttttctttcttacatcaaggattgggcatggagccaagtgaagctgaggcattccgctgcacaacttgtcatccccagcaattgatgcataagtcaagttcctgaaaacaccccattgagcatgtttccgatgttagaaggaatggtgccattgaacatgtttatatccaccgtgagcatgatcagtgatgacagattatacagcgacaccgggagtttgccggagaggtagtttctgttgaagagaagataccttaaacctgcgatgctgccgatgcctggcgggatcatcccctccaggtggttgccgttgatggcaatgcctgaagcggcgacaggttggctagcgacgcaggaattgaccctatgaaggtgttgttcgccagcgcgagcgtgggagccgtgtcagcgtgttgccaagctcaccgggaatgcggtcgccgagctggttgtattgaaggtacacggttgtcaatctgacgcaggtggtgaggttggtggggaactcgccggagaaggcgttgtggtccatgtcgagcacccggagtcgccggagccggctgacgctctgggggatctcgctgtggagatcgttggagctcaggttgagccgccggaggaaggtgaggtttccgatggctggtgagagcgtgccggcgagatcgctggacggcaggtccagcgccaccacggacgtcggcctccgccggtgactgcacgtgacgccctcccagctgcagaagctgttggcgctgctgttccatgaccatgaagcggcgctgccaacctgccggagctagccaccagcgcagccgccgctgcgtgtgatagagatcctaacctgcagaggtcatcaggctacggaggaccagagcggggggctggagatccaccccactgtgtgcaccgccatctcctcctattcttcattggtgatttctgcaggaccagcaccacaaccatcgtgtaatcaaatagcgcatccacccaaaccaaataaatcaaggtacaagcctgctctgattccagtgcatttgattaacactaacgtttctgtttgcaatgctgaaccaagcaacatctatgttagttgatcctatgtctgtgtgggagcctgagaactttggtgcctcatagctgcatcggtatctatatcagatagatggaaattttgctagtaaatatggttcatggttgcataggaatgtgttgaaatctgctagtaccatatatggtttcatgtgtttttctgaagtaaaaactacagcagttcaatattatttaacaaaccgattacattctctgtgtacatatcgagaaatttgatcaaattcctcgtatgtattttacaacggctaactgggtccttgttatggctttcaatagaagccgggtcttttgaccttctctaaaaaaaaaaatctgggaccttgtttacctccgattattccaggcaaaatgattgacactacatatgtatattatctagcatttagctctagtgctctattgctcgttgcccaaccacccgggacttgaaatattcatctctgatcgcatggatctttgacacggcatctgctaacaccattcgctctctgggttgttgctttgagcaggatatgccgagcccaaagagagacaccaaactctgttgaataattcctcttgtcatgcttgcatctgtagcatctgtataatttgtttcatgcagccagattgtttgatcagctatttccagggctctgtcaggaaaagcagcggtagcaaattcgtgcagattaagcgaatccttgaacatgtcatcagtagggcttgttcccgtaaacatctcaagcaatattatgcctaagctgtaaatgtcacctagtttggaggcagcagaaccttcaccgtactctgcaatatttgcaacacacacagttaaactttaagtgtaccttcaagacaaaaaaaaatacgaatacccctaattctacttctatctattagaagaggagggaaatgaaggaaataaggacagaattacaattttttttagctacctggagcaatatagccaatagaacctctgattccaattgagctttttgaatttagatgaattttagttatgcttttggggaggatttttgatatgccaaaatctccaaccttagcattcatgtcttctgcaaggagaatattgcttggcttcatatcacaatggatgattgatggctgacagtggttatggagataatccattgcttcaaagatatcaataacaatgttgagtctctgtgaaaagctgagtgtgttgctaggactgcatttgctcgatttgggatgaatccaaccatccaagctaccattaggcatgaactccaaaaccagtgccttgaactcctgaccctgtggatcaatactcgagcaacaagtgatgatctttatgaggcagcggtggcgtactcttctcaaagcctcacattcagcctcaaagctctttgaagatcctaattgttgaaggtcgaacacttttacggccactagtgcatcctcattgtctaaagtacatctataaacagaaccatatcttcctttgccgagcaggttggcttctgaaaaatcattacttcctcttgacaatgcataatatgaaaccctttgatactgttcctcaataaccagtgatgttgcttgtctgttttgtcttcgtttgagcttcctgttgtgtaacagaataagaacaataactgaaaccaacaccaacattgcacctgttgttggcagggctattgcaagagactttagatgctggttcttgttcttgcttacatcaagaatgggacatggaggcaagtgaagctggggtattccaccgcacaagttatcattccccacaaccgatgaaaaggtcaggtttctgaaaacacctttaactggtacttccccttgcaaattgttgaacgacacatctaattgcttcaatagtgtaaaattttgtagggctgctggtattggtcctgaaaaattgttatgtgctagacacaggtattgcagattgccaatgttactaatggcattggggatcctaccagataacttgttcacggttaggtttagtacgttgagccctttcagattggtcaaagattgaggcatgtctcctccgaatgagttattatctagcaagaggaattccaacacttcacaatttcctatactgtttggtatttggccagaaagctggtttcctgacagaattaactggtttaggttagctaaagtaccaacttctgatggaaggtgtccagagagggagttgtatgacaggtccaagatccaagctagagaaggcagctctagaatttccctgggaattgaaccgtttaggcgattgaatgacaaatccagattaaacagattttttagcctcccaatggttgctggaattggcccttccaaattggtgtggaatgcaagcagcctattcagtttggtaagatttccaatggttgacggtatgaggcctgacagaccagtgttgtatagggcaaggtcaaccaagtttgttagcttcccaatactttctggaattactccagatatgggattgaaccccaggtcgagtaatctcaagccaatcaaattgctaatgtcgtgagggatggtcccagagaagctgttattctctaaatcgagcatctgtaacgtcattgacagattcacaatcgatcttggcagctgcccaccaaagaagttgtgagagagcatcaattcttgcagctggctgcagtttgctagagaagttacaaattccgaaccctttccgttatctgcctcaagctggtttgttccgatgtatagatacttaagagaatgcaacatccccaaggtgggaggcacaaatccagtgaagttgttatctgcgaggtacaaatctgtgagccttgaaagattggacagagaagatggtatggccccatgaaaacgattctcatgcaatccaaagaagcgcatggcaggaaacttgtcaccaatgttggcaggaatgctcccttgtagcatgttgagccctactccgatcaccctcagtgccgacagattccatagagagtgggggaattcgccggtgagcatgtttgcttccaagctaagctcatgcagaactgggaagttgccgaggcatggtgggatcaggccctccaggtggttgtagtccaagtataggtcctggagcaatgataggttggctagcgagggcgggatcggtccgatgatgctattgttggtcagtagaagcatctgaagctgtgtcaacgtgtttcctagctccaccgggataatcccgcccagctggttatagtcgaggtccaggattttcagactgatgcaggaggtgaggttgacagggaacgcaccagagaaggagttgtagctcaggttgagccattgcaggcgtcggaggcgaccaatgctggtggggatctcgccgtagaggccgttggagctcaggtttagccttcgcgggaaggtgaggttcccgatggctggggagagcgtgccggcgagattgctggatggcaggctcagcgacgccacccgcgtcggcctccggcgactgcaggtgacgccctcccagttgcagaagctggcgccgctgctgttccatgaggcgagcgcgcttgaattactcccggtgagccccgccttgaaagcaagcagcgatgcctcatcgctgcttgacgcagcagcgatcgtcaggaggacggggaggaggggcagtccaagccgcctcatgagacgtatcgccatgtggatttttatttggtaagcgtctttggagcaaagtttagtttcaggctggagatatatcgctgctttctgattccatttttccccccggcccccttgttgtaagagttcacttgacctcattgacttcaagtcaccgggcaggaccagtgtaattgtagtactaggagcagtgtgttccacttccacctacttccttcttgtgataaaaaaaccaatctaatatgggatgttccgattcgttgcaatagaatgtgttatatccagttttatatatatatatatatatatatatatatatatatatatatatatatatatatatatatatatatatatatatatatatatatatagtaaatttgttaggggcaccatggtgcccgggctccatagccatccaccgtccaaatgctttaagatccgtgcaacacactagaggatgctatcacacattaacgggtctaacccgataagagttgcatgcatatactttccttagaacatgcatgcaggtatttccatttttactgtgcatgtatttacaaatttgcgccctctaatcatgcatacacattatgattagcactttccattttctatatcacatttccatatatacaacgtttgcatgcagatacttaccttttgaatcacgattcgtttttgaaaaatgacgccattccactaattgcgattattgccatctattttcaagattacattccattttcaagatgcacatataaccggctactgtattcctttttttgatttttcttttccacactgtttcacggtccaagagctagctatccacatcgtcttcaccgagttacctcgccgggattgctcgccatgccgtgaagagggccgacgtccgtggttttcgtcaccgacgacgttcgtccacaagcctcttgctggaaaccagaactcctcaaccatttttgtcaagccattacagcgcctgatgtccaagtgccttttcgctgccgtcgctggttgttcgtgagcttcggaacagacattattcaccagcgagctgcattacctgaaaggtatggatctcagtgtttatcactcacacatcttacattcacatgcagtccctgttatgtatagatgatttgccattcctcttctttttatctactaaactgagcacatgatgaatcacctggaacctaaatttatagattttttgttgaaatgcagttgaatttagattgttttaggtatataacatgcccgttcgaatatctttaattgcatccagtgaataaaatttaggtaggtagtgaaacagcagcaatgtctcttttacgtggacatctcaattataatctttgtaaatatagatttaattaattttaaattgaagtatatgacccgaagagaatcatattgcttgttttaataatggtagtttttaatagcatgccgcggcttccaaagtgtgcgagcgtgagaagaaatgtgaagcgtcgttccattcatgatgatgatgactttgtcactccacctacaaggaagaaggctgttcgtgttaaattcgtggcaccggtttcgcgttgtgtaccatcttccatcacacctatcatacagagatttagtgctgaaaagaaagagctggtagctgagatgggttttgaggggctgctgcatatgcccctcataacaaaccatcgtgacttcagctactggcttttgtcacgggtatccccaacacgttcggctatcgaactagaaagtggtgaggttttgccactgtctcctgaggatgttaagaaggtgcttgggattccttgcgtaggggaggagctgcaagcacccaatgttgagtttgtttctcatgtcaagaggttaattgctgaaagaatgaaagttgctagttttaaggacgttaacaaggaggtattggaggatgtattagataaacaccatagagggcaaatgtcaaaggctgagaaagaaagtttcaaaacagcattcctaatgcttgttatgatgaaatttcttgcgccacaatcaaatatggacaataaatgtccaagatatttttctgcactacttgaccccaatgaaatagcaaagttcaattggtctgggtatgtgttgaacgagatattggacgcagcggcaactgttcaaaagaagcacgctgatggcactaaatgtggttatatcactggttgctctatttatttgcaggtatatagactttttcccaatgcagtacatacactaaatgttataattatataatgatagtgagtacactaataaaatttttcatgcaaaggtccattatttggataacgtggactttggaggtgatctaaacttggagcataatatatttcctcgaattgcattatatgatcgtgatacaataaaggaaagatatcagctggacatcagcgaaaggaactattaccaggcaacacagtttggaaaattaaaggtactttacaaaaaaataattcatagtttatattgttctaacccttcacatgtctgatatacttgcactttatatcgatccagctacggcccaaaaatgaagtctgctacaaaagaacgtgcgaaagaacatctgtcactgacagcgggggaaatgaaaatgttcagattgagtctcaggtaagttattaaaaaaatttctaccaaacatgtttatttagtaaatatctagagatataaacttttaatatcaacatgcaacacagcatgctgctgaattaatacagaaggcccaagaattgaaaagtttttggatttcctgcattggcaaccttgataaggcaacagagagtctagttaaggtgacagaagcttcgaagaacatgcccagcgtgaccataccaatcagcgatgaagttgatgtttctaaaggttatacatgcacaactgtcaacgatgatgctgagaatggaatagaggtcaaccaaacaccatctttaggaaatgatgtagaagatgtgagtgcagctgctgccaattgtacaccgatggttcatactcacaacttgaaagaagaatcaatcgacttgaatcgcactgttccacacaggacttatactggtctggacttcgatcctccatcatttgatctaaatattgactactcaccatcaaataacacaggttattttcctacacgtatatgtttgctgcctgattttcatgtttcacatagtaagtacccttattgttcctttttttttccatggctggttgtgcatgctgacagtgaggcgagagaatcatggagtaagttgtcattcaaagttcaggtagacaaagatgaagaagattacaaatgtgtttgcaagttgtttgagcacatgggcatactgtgttgccacgttatcaaggtacgccagctttattttggtccttgtacttacatttttttacctctagagcatgcctctttcttcttaaattgttttacccatctaccataaatttgggtaagcgtatatgttgataagttaattcttgattcgattcatattctgtcagctttaatccagtgtatacatctgtagaaaaccatagttaccctaaaaaaaattagttttgatgtataagcagtttagtttatcatttccgtttttcattgttcatgtaggtaatgacacacataggctgcagaagcatcccagataagtacattctaagaagatggagtattagtgccagagaaggatctggcagcaaccttgagagcttcaggaatgacaaagatgctgcctcttccaggacacaccgccacacactgctctaccatgcatgtatagacttgtccaaacaaggtgacatatcggttgatgctttccaccttgctatgaaacatataactgacgcactggatgagattaaactagtggccggtaccaacgaatctcccatggggtacactgatcccccaaatgatgaacctgctggaccggatcaaggaggtgaacaaaatgaagaccccgcggctcatcaggccgtacaaagcttgccactgccacctgatcgtcgggcaaagcgtggccgacctaggtccaccaggctgaagtccccagtagatggtggagtccgaaaaaagcgcatttgttcgaactgtcatctgaaggggcactatagaactggatgccccacaaatccggagaacacatcgaagaacaaagtgatcaaggtgtgcacgaaatgcaagttagctggtcactatgcatcaacgtgtggtgttggtgtatagaagcaagtctatcgttgtttttaaatacaatcttgtaaaaatattcccatatcttgcgtgttgcacttggacaagtttttaattaaattcggatatgttttctatttcataattatgtcattcatcttgtgggatatacatgtatacgtgttcgctctgtcactcataaacctatgtgtacatgtacacctgtaaaagtacagattatgtcattaatcttgtggtattcagacgtgcattttttcactctctctctatcccgttgactatggccaattagtaccgaaatcactcgttggttactaaattaatcaattgatacccaattctgactggatcgatccatgttgacggtaacaaattatattatgtaacctatcggtcgtaatagctataaatattaccataaataagatctttatacttggtaatgatattaattttttcattccttccaacggagacacaattgcaacatataaagagcagaacaatacgactctgctcacttctggtgctctctctggttctcgccaacaacacatttctgttccaggtatggctccaacttatctgtacgtatatgtacttctcatatatgttgacctcttcttagtattctgaaatttatacttatattgccagtagctatggacaagatgaacactggtgcctggagcgataagatcgatcagtcgctgcagaagtatgatcacccacgctgccgttggcacatattatttggtacgaagtcagaactacacaacttatatcatgcacgcacagcaagtgattttgaagatacttggacggccctagtcaatgagtatggtcttcaagaggagaatgcatatctccaaaaggcgcagatgttaatagacgatgaaacgaagcccaatgattcacaggtaatttattttaatatatttttggttcacgttcagctccagttctggatttgtcactcctgctcttaacattttccacttgtttttttttcgtaggagatagatacagaccgtaaagatgtcaagagggaggtggaggctcctaagttgatcatttctcgtcatagtgatgataaattctcatcctagtgatgagaaatgtgactcgcccaccgtctgaatagcaaacatgaggcaacatgcaagtaccagccgaaaatcaactctctgatggtgtgatatggttgccagccatcggtcaaataagcagccattcggtgtttttacatttatgaatcacaatcgtactgtaataataaactagttacatctatatttatagatcgtttttactttaattagcatatgtttcatttatattatgctaaactcctatgatatgtggatgagccaattcaccgatattttgtttcctttcagacttcacttaagagatctactctttcaattcagcatattaaacttctaaaagcgcatctaaaacactgtggaaagaaattgaatttaatctaaatcggcacatatggaaaaacatggtggaaataataatacacagtacacacatttaaattttagatatacttaaaatccatggtacaaaaatatacttggatttatttatattaaattttaattttagatatacttaaaatccatggtacaaaaatatacttggatttatttatattaaattttacatccggacgtaacgacttaaaatatacttgcttccaaatttaattaggaaataatgtactgtcagcctaggtaggcgagttttaaattctaataatctacagtacacagatttgaaatatagatatacttagaaaccatggtatttctatttacaacaatataagatgacaatcaattaacatataccgtgtacacaaattgtaaatttatatacgcttggattcataatataattaaattaacgtaatttaaaactttgtatacttaacaagttagctaagtatatagaaaaaataacccgtgtatacatagccattacattacataaatgagtaaacattttctgaatctggaaattgcaaaacgcactaatttagctaggtgtacataagcataccatatacttagcctccatatatacttatattccaattacatcgtccatggtgtacttagggtacctcggtttccttatataattattttcaaaataacagcaggataacatttccatatatactacatcgtagaagtatacttagattttcatataccctaataaaccgcattatatttgttgccaaataaaccgcaaatccatgattatggtgacaaatatttagaaaccaaataacggccgtgaactgttgatggaaaggtattaaatacgctaaattaatactcctaaatattttgcatgcatgcacacgctgtcaattaccaaacctaggtattaaagacgttactaaatattttgcatgcatgcacacgctgtcaatttccaaatcaaatgtacttaacgggtgaacccgttaatcaaatatacatgtaccgatcaactagatgagaatgtgatccaacggcagatgtcagtggtgcccgggcaccatggagtcctatctgggcgtcctatatatatatatatatatatatattccatcaaatgcaagtggtcagtcaagtgccagcatatgccgtcccgtgagaatcattgccgacagacaagatgtagcgtgcattgcagtgattgtggcgacaaagaaaggggttcacggggacgatgagtaagacatggtggcaaaattaaggtccgttcttttcttcgataagagttaaatgaagattaaaatttttgtggcacgttttttaaactgttaaacgatacgtttcgtgcgaaaactttctatatgaaagttgctttaaaatatcacattaatctatttttcaagtttgtaataattaaaactcaatcaatcatacgttaataccacatcgttttgcgtaaaaaacttaaatcttcattttcatattcaggataaaagaacaccacttaagctcacataagttttatttatcaattatcaggggcatgtctgaagagcagggtttcacttattgcgctgattatcacgcttaccgcggggtacggtaggggaaattggcgattgatttggatggattttgaccaaattcaaacttttggagaaaaaatgaaaaaaaaacatggatgtagttcttgatttataattgccaatggtgaagattttttaaaaaatagagtaaactaaattcaaatttgagggtaaaataaaaaatagtttacaaattgaaaaaaggaagacaatattgggccttaagtatcctacatattctttcaattattctcaatttctagttttctacacatattcaaccgtattttttattttttccctatttatttttcatttacatgatttcaactatacagaccgcaataaccgtgcaaatatcgcggttatcacggtaaaccgtgcggtaaccgcggtgaaaccgcgaaactgccgagttttgaattcgaatttttgaatgtgatttctgtacgattttagacaattatcgcggttatcgtgctaccgcgaggtggcggtaacctcggcccaaactctgttgaagatctttatttatcggcagaaataccttcttaagtgacagcttctaagcataaaccactacaatgacgtgcatctaagctttatttaagataaaataatgaatagtatcaactaagcaaccttgtattcctccaattattcctggtacaatcatgaacactacatatgtatcttgcgcaacgcttagctcacagtgctatgttcttcatggccaagcatccaagacctgagatattcatctctgatacagcttctgataacactattcgttctctggttgttgctttgagcacgatgtgccgagcctaaaaacagacaccaagcactgttgaataattattgtttttatgcttgtgtgtttaacatctgaatcattttcttcttcttgcagccagattgttggatcagctattctagggggaattgagatcaatcccagccctttatttattgatccaatggtccaaattgtgagctacagtaaaattagagctgtacattttcttcttcatgcagctagattgttggatcagctattctagggggaattgagatctagtgcagttacacaatcccaaccctttatttattgatccaatggtttaaattgtgagatacagtaaaattagagctgcacattttttcattaaaaaacgctacactaatttgctacagtactaaagaggcatctaggccatccgttttaaatccaatgatactcttgtgactgcttaacttgacagtggccactgcactggaaccgaatccgtctaggggtcggtcaagaacacaagctacaacaaacttgtgcagatccattgaatccctgaaaatgtcattcgggtgaacatctcaagcaataatatacctaagctgtaagtatcacccaccttcgtgactacagaaccttccccgtactctgcaacatttgtagccaaaattagtatttaaccctaccctcaacatgtaaaaaatgaagcaccctcagtctgataggaaggggagagattaagggaataattgcccggacacctctcggtttgaccgccgcccattgtctggtctgaccggccactcagtgctgcactgttcactgacagaaaatattaattactatattttcaataaacactcgcatttaataattgctcatcacaaaaattgaccatcacatgattctagaggtgtgactccatctaatttgggaaaaaaagaaatagaggttcatgcgactggttcaattgctttatgctgtgataatgctattgacaaacaacaggtgttataccattttagcgattcaccgtggaaggccggacggttgatgaggtcatacgctaagacattaacatgtttgtatagactttagagcaaaaagaaatagtagtagctcgattagcccagaaacaagtaaacaggccactctcgtgggcctcgaatcgggaatagcccagtttccaagcctgcgacttttactgggccatgagctaaactctacgaaagaaagcccaactgcccaaccatgaaaactcgtaatccccgcgcgcgcgacggaaaccgcctactcctcccgttcccgcgtacactttccgcgccgaaacgcatctcagccgtccataggaaaacaacaccaatcgtgcgccacatgctcctccacgtcatcgatccgcggcgcaccccctccgccaatcagcgcccacctctcccctcctttaataccatcgccgccgcctccccttcaactccacaactcgcaaccgaattcccccaaattttcgtctcccctttcccttccccgagaagaagagagcggcatccatggcgcccaaggcggagaagaagccggcggcgaagaagcccgcggaggaggagcccgcggcggagaaggccgagaaggccctggcggggaagaagcccaaggcggagaagcgtctccccgccggcaaggccgagaagagcagcggcgaggggaagaaggcggggcggaagaaggcgaagaagagcgtcgagacctacaagatctacatcttcaaggtgctcaagcaggtccaccccgacatcggcatctcctccaaggccatgtccatcatgaactccttcatcaacgacatcttcgagaagctcgccggggagtccgccaagctcgcgcgctacaacaagaagcccaccatcacctcacgggagatccagacctccgtccgcctcgtcctccccggcgagctcgccaagcacgccgtctccgagggcaccaaggctgtgaccaagttcacctccgcttagattccatctattggtagtatttagttctgtctactatctggtagtggtagaaatggatgtcttattagtgtgtagttggcggttgtggcgctgcttttggtaaactgttgcttatttatctgagatattaacgatgctcttctagacttctatgtgcttcctgttttgtgattgctcgatttcttgtttgtggtgttcattctgtttgagattactacgatactgtgaaattttctggaacaaaattgatgttctggtatgcatacgtagcaactgaggacatggcaactcacttcaggaataatgctgctcctggcttgtttggtgttctacacttttactcatgcgttttatgtgtggacacaaacacaattgcttgaattggatagattcttgctgtttgctagttggtactagtggaagttggcgcttttgtactttgaactaacaatgtaaggtgaattttgggaaggaaccagtacagtaggagctctaccatttcaatcaagcaggaagaaggaaacaatgaaattaagcacgaaggaaacaattaggtgaattttacattaaattgtatgattctgatactctggcaaagaaatatagctctcagaagtgagaacaattgctaactgaaacactacatgtgactaaagttatttcaggattatttccaatgagcttggctattgtagctgttttcggtgtctcagtggaggcttttccttctgttctagtaatacctatgcaagctaattggcaaacatgaggtatacatctcttagtgcatgcatctctactgctacatctcttattgatgctcgctcttgaggctgttgctttgtgcaggatatgcctaacatgaagacagaaacgagacactcctggattctgctctgtataatgttatcccgtggttctacatgcagccagattgttgagtctgctatctccgaagttatgtctggaagagcatccttggtaaacttattcagatctaatgaatctctgaacacgtcatccgttggactctttcctgtaaacatctcaagcagtaatattccgagactatagaagtatagatatcaccaagagttgatatccagtacagctgtacaggcccaacatccagccgcgtttcggcctgcagcggcgaccttcacagcttgttttgcaactcgagggaagaggattgggagtttacacgagagaattgatggtgagattaagatgagaattttgatttttaatcaccagatttcaccctcctatacaatgcaatacatctactagatgcaatcgcggaggcctttgcacgtacgtacgtgcacacacccatggcggacaacgacatcatggcggcattgccggaggacgtcctcctccaggtcctctcccgcgtgggcaacgtcaagagcctcttcatgctggccgcaacatgccgccgcttcaccgatcgcgccttcctccgcgacctctggggcggccagcgcgccggcgacctcctcggcttcttcttccaccggcaacgcaactcggcctcgacattcggcttcctgccggcgccgccgcttcgcccccatcccctccagctacgacggcgagcccctgacggcgcgccgcggcatcctcctgatgcggctttccccctccaacgactggtcagaggcgaccagccacctcctcggcctcttcaaccctatcaccagcgagcaccacgttctcccgcatctgaagggcccctccaaccttggttccttcgccgtcaccagctgcgccatcatcttctccgacgacctcgccgggaagcagcagccgccatcttcaggccgcttcatgttctcgcagctgctcgtcaccaccaagcacaagagcatcaagaccgtgtacctccactcgtactccgccacgcgcagcagctgggccgcgcccgccgtgttcctggatctccgccgcttctccctggtgggcgagggatcatcgtcatccgccgtcgtccaccgcggcgcggcgcactggctgtgcaccgaccacgtcgcgagcgccacccgagacgactacctgtacaagagctcagcgtggaggtgggcggcacagccacggccacgccgcgcgtctccatgacgaagctccccgtcctcgacggcggcacgccgacgccgctgctctgcgtcggcggagacggcgagctcaccatcgtctgcgtgttcatcatgcacgtcagagtctggaagcagcagcgacgcggcgatggcgatggcgacggtgcggcggcgtggcgccgcgacgtgatttggatgccaacggaggtgtccaactaccccaaaagttacacgatggcgcatggattgggacgcaggggatcggtggccatgatgtacagtagcaccggcgctgtgttcgtcctcgacctcgacaagaaggtgatggagaaggccatggactgcttgctgcccctgcgaatggaccattcactggatcggccgcctgtgccgtacgagatggacttggtggagttctttctgctccagcttggtggtctatggctctatgcagcagaggtgatctacaggataatcaattaattaattgattgattgattacacatgtttatggccccgcgaaaattactcatgttatgcagtagaaaaacgagggttaattgtagaataggggtatgtgcgggaaaaaaaagtaagttttgatttaaggacaacagcatattattatcattgataaattcttcaagtgttattaaggtttggtaattggtgtcaccttttttttttccttttttttttgactgtctgatcctttgttcagcaatttttgttcattaacaatatggcattgtgcattatccaccctgatttatggtctggtcgtttgctcgttgcttacgcacaacctgatgaggtgagcgtgaccgtccgccggaaatgcgggattttataaggctcacgcagaatatgaaagttggccatgtcgaagggtataggaggaagaggtttcatttttctccctcacccatcttcctcgattctaaagatatggctagagtgaggtttagtgtcggttgttagaattgggttatgatcttttggacaaccttggctgtagtttcttcgttggcttagcgacggccgatctagtgatagttttctcttgggtttgtgtgttggtgggtgggtggtggttattttttcttcgtttttctagttacgatatcccagggttataattttataatttttttctactttattaagggcctatttggttctctaccctaccaattaattggtagtgctaaaatctagacaacttttagcactaccaattttttggtagggtaaagttagctagtctatgtttggtttaataccaatataaagctaaaatttagtatgagagtgaagaagattttagaatatagccaaattgagcgtaggcgctatcaattgtttggcttcaatctaaactagcacgtttactattaaaaaattttggtagggtctcaatccaaaacagccctaatattgaacttcgcagctcgatatttggtgatggcggtaggtatttagcgcgaaacccattaagccactggcccatctacgcgtcgtctccagaaacggcccaattttcatttcctaggcccaacatccagccatgtttcggcatgcttcgtcgaaccccccaccccccaaccacccccacccacacacactccccactacgctacgattcatattcagaaaagactttctcatctactagatgcaatcgcgggagatcatctaacgcctttgcacgtacgtacgtgcgcacacccatggcggacgacggcggcatcatcgcggcattgccggaggacgtcctcctccaggtcctctcccgcgtggccagcgtcaagagcctcttcatgctcgccgccacatgccgccgctggctgcgccgcttcaccgaccgcgccttcctcctcgacctctggggcggccagcgcgccggcgacctcctcggcttcttcttccacctgcagcgcatcaaggtctcgacattcggcttcctgccggtgccgagctcgccgctccgccccctcgcctcctccggctcctccaactccgtccagccactggcggcgcgccgcggcgtcctcctgatgcggcttcccatcacccgcctcctcttcctctccaaccccgtcaccggcgagcgccacgtggtcccgcgcctggaggagtactctgaccttggtccctacaaggtcaccagctacgccatcgtcgtctccgacgacctcgctgggaagccgcagcagccggcatcgtcaggccgcttcacgttctcgcagctgctcgtcaccaccaagcacgcgaacagcatcaccatgtacgtcaactcgtactccgccgccggcggctgggccgcgcccgccgagttcctggatctcctccgcttctcgctggcgggcagatcgacgccatccgccgtcgttcaccgcggcgcggcgcactggctgtgcaccgacgacgtcgcgagcgccacccgaggcgaccgcctgtacaagctcagcgtggaggtgggcgtgccggccgcagccacgccgcgcgtctccatgacgaatctccccgtccgcgccggcggcgcgacggccacgctgctctgcgtcggcggggacggcgagctcaccatcgcctgcgtgttccccatgcacgtcagaatctggaagcagcagcgacgcggcgatggcgacgacgatgcggcggcgtggcgccgcgacgtgatgtggatgacattgccggcgccttacccatactgcgtgccgctgatgcatggcttggacatgggatcggtggccatgatgtacaggagcagcggcgccgtgttcgtcgtcgacctcgacaagaaggtgatcgacagggccatggactgcttcctgcccctgcgaattggccgcgagatggatctgccgcctgtgccgtacgagatggacttggtggagttctttctgctccagcttggtggcctatgtggaggagggtctacatctacaggatgattacacatgttatgcagtggtaaaataatgagtaatataagcaccagcatatgaattgaaatgcatggaccatatgcaggaaagtttttgattgataaattcttcaagtgttgttatggtttggtaattggtaaaacagctcgaaacctgttctttccgtcccacaaaaacgtggcgcaatctcataatctgattttcatgtgtgattacaggtatgatttgaattttcattttgtacgaaaaggatgaacagtcaaaaatctttctgacagttctccacatagtagtattgccgtattggttgtaatgtacacatcggcagttactgaacgttctattagcttacattacatatagccatatgaactgacgcaaataaagactgactgatatgaaccacgaaggaaaatgctacatcttcagcgtctcagcttttgtttctcggaattctggcaagtcgccatcggcagctgagctgttaaaacattttccccagcaagcatatcttattcttgtacactcttcaggcctagttactcactgttgcttcaaatcgctgctaatttgtttcgtctcctcttccatgtccactgaaagagagccagaaaacatcaggtaagcgtcgtctctgatcgcatgcatcttcagggctgcatcttgtattggcattcgctctttgggttgatgctttgagcaggacaagccgaggccaatgactgaaatcaaacactcttgcattctgcttcttgtgatgctatcctcggcgtctacatgcacccagagcgtcggatcggctatctccaggattctgtcaggatgagcagcctctgagaaactgtgcaggtccaaggaatctctgaacatatcgtctgttgggctcattcctgtaaacatctcaagcagcaatatgcccagactataaacatcgccaagagttgagaccgcagagccttccccatactctacaaatattttggagttcattagattcaccggaatgttaaatttgtgtaagaactaggaggtaaaaagcaaagaaacaaagcataacaattcagttacctggagcaacatagccaatggaacctcttattccgattgtgttgcttgaattttgctgtgttttgctcgcgctttcagttaggattcttgatatgccgaaatctccaactcgggcactcatgtcttctgcaagaaggatgttgcttggcttgagatcacaatgaacgatcggcggctggcagtggatatgaagatattccagagcatccacaatatcaacagcaatgtccagcctttgagttaggctcaaagtattgtcagcaatgggcatatcagattttggatgaagccaaccatttaagctgccattgggcataaactcaaaaactagtgccttgaaatcttgaccttggttatttatgcttgaacagcaagtgatgatctttaggagacaacggtggcgcacacttctcagtgcgtcgcattctgccagaaaacttctagtagatccagaccgttcaaggttaaacacctttacagcgacaacaatttcctcatcaaacaaagtgcatttatagactacaccatagcttccttttccaagcaaactgttctgtgaaaatcccttggttccatttgacaattcctggtaagaaactctttcaaattgttcctccacaactggggttagggactggcccttcttcctatgtacaggctttctacgacgaattaacataataatcaccataactagagctaagaacaagaccacagctattgatgccagagctattttaagagaccttaaccaccctttgcttctctttctaacagcatgcatggagcatggaggtaagttaagatgagatattcccccacaaagctcactgtttccagctaaagacaagtaagataagttcttaaaaataccttcttttggcacttcaccttgcagatcattgaaggatagatccagcattgataacgatgtcaaattctgcagcactgctgggataggcccagacaagttgttatacgctagatacaactcttgcaggttgtggatgctaccaagggcatcaggaatcacaccagaaaacttgttcatggttaggttaagtacacggagccccttaatgtcccccagaaacacaggtatagttccttggaacgagttactgtccaataaaagtacagtgagcactatgcaattttttatactacttggtatctggccagacaattggtttcctgacagaatcaactcgttgaggctagtcaaactcccaacttcagaaggaaggggtccagagagggagttgtatgataaattcaagtactgtgaaatggaaggcagctccaatatttcctttggaatcgaaccattgaagtgatttcttgataaatcaagaacattcaggcttttcagcttaccaagattcgctgggattggtccttccaagttgttgccttgcatgaatagcttcatcagattggtaaggtttcctacagaagacggtacatggccagacaagctattgttattcaggtatagcgtagtcaagttttccagcttcccaatgctctctggaattacacctgatatgtcagtactaaacaggtataatgatcttagaccaaccaaattaccgaaatcagaggggatgcttccagaaatcctactgccacccaagtaaagtttttggagagtcttcgagaggtttgcgatcgaaatagggaactgcccagtgaaattgttgttactgagaactaaaatctctagcttactgcagtttgtcaatgactcaacaaattcccacccctttatgtcccctgcttcaagcatattaacacctagttgcagattctgcagagcattcaacctccctagattatgtggcacaaacccactaaatccgttcattgatagctgcagactcgtgaggttagtgagattggagaacgaggagggaatttccccgctgaactggttgttgaacactgcgaaagactgtaaatgaggaaacttttcatcgatatcagtagcaatgcttccatccagcttgttgtttcctgcatcaaaccccattagcgacgacagattgtacagggaagacgggagtgcaccactcaggttgttggagcagatgtcgaggaagtaaaggcgcggcatgttgctgccgaattcaggaggtattgtgccctcgagactgttcatcctgaggctgaggtatcccagggacgtcagattggccagtgaagctggccaatggccgacgaagctgttgttgtcgaggcctagcacctggagctgtgtcagcgtgttgccgagctccgaaggtatgtgcccggcgagcttgttgctgccgagggccaggtattccaagctggtgcaggatgtcagattgctggggacctcgccggagaaggtgttgaagcttaggtcgagttccctgaggcggtgcagctgaccgaggctcgcggggatgccaccgtgcagccagttgtaactcaggtcaagtttccgcaacgacgtcaggttgccgacggccggcgacagggtccccgagagatcatggccgggcaggctaagcgccaccacccgcccgtgccggccacacgccacgccctcccagctgcacggcccggcgctgccgttccacgacgcaagcacgccgttgccaccaccgttgcccaccgccacggccttgaaagcgagcaacgctgcggcgtcttctccgtctgctcctcgcactgccatgaagtgcaagaagatggacatgaagacggacagcagcagcagcaggaagctagcaagagccatcgccatggtggttgcaaacttgcaaggtacacaagtggagtgacaagcagtgccccagagcaccgtattttaaccccacgacgccatgatcccagagtgccattggcgagacggcgaggacaccgagtcaaaatcttgacttgtttagcggtctccgcgctcacagggagagagacaggagtggtaagataccatgtcgacttggagcagtgcatgttacctttttgactgttcccgccattcctttccacatcatttcccaactagatacttactgtaacatagtactggaaggatatggaaagcttggacgcatccaagctctcgtcgctgtcgccctcggccctcacacatgacttagctcgctccaattatgtcctcaccccttctctgttcgaccaaattcctgataatttcttcctgactgattccaacagagaatccattaggttggcagtccagagtgttaccttgtacagttgtacggccacccttttccacgcttgtatgcggagttccagacacacgaggaaaggtaaaagtcttgtggtgatccaggattagattcagcttgtgtagagcttccgtgaaagcatggacaactacagttgacgagcacaaaaacgaacaacaccgagcctcctgggaacaacgagaaatcgagaattacagcaggcacggccatgtctttccacatatgtacaaacttgaaaaggtccgtggcgtggaaaatttatggagattaaccaattggatgctcaccttagtcaaagggccagggacagtaagctcctcggaggagttctgtcgaacaggtaacgggcgcagactgagaactccgagtctctggagaattgttgtggctacagcgacgggagtctcgaagaagaaaaagtatacaggattgggcatcgtacgcgtcggagctgagcacggcttccagtgacggcgcattccggcggcggcggcgaggcggtgcccggaggtgagcacgagaccccggcggaagcgcgcgcgtgagcgatctgtccaacagtgaatggaccttgcggtggattagcattttggtgggcccacaataccagaaggaggcccacaagaaggttagcgcgcagcccatgatttgcaacgggctacaaccaagagagatacatttgggcccgtgtaaaggcccaaactattcgaggcaagcacgagatatggcccattatctgacaggctgagcaacaaagttgctcacttgctccccgtcgccgccgcttcaccgaacacttctcctctccgtcgtcctccatctccatcgccggtgaacgagttgacgcgatcttctgctcaggcgaagaacgtttatctgtctagccggtcaaggggaacgcagcttttcctgccgttttcctcacgcgatcgaccgcgctggcacgcagcagcgagatcatatcggtgatatgatatccaagtccagatccagtgactcaggctgtgtttagatccaaattttggatccaaacttcagtccttttctatcacatcaacctatcatacacacataacttttcagtcacattatcttcaatttcaaccaaaatccaaactttgcgctgaaataaacacagcctcatctaccatcctttcctccgaactgtcgtgttcctaatagtaatgtgtccataatagtgggtgtgtttagttcacactaaaattgaaagtttggttgaaattgaaatgatgtgacggaaacattggaaggttgtgtgtgtaggaaagctttgatgtgatggaaaagttagaagttttaaaaaaaactttggaactaaacacggcgaaaatttcttattagtccatttcaccagcaaattattgagcttcgttggttgggattgggaaattattgagcttcgcttgttgggattgggtagggaagaatgccattttcttctcttttttatggccttttgaatcgcaggattgaaaaaacggaggaataggaaaaacacaagattttgataggaatgaaagtgtaaaacagaggattgcaaaacacaggaaaaatataggaatgaccgtttgattagaccgcaagagcaggaatcagacgagagagatagactcaaggaaagttttccaagaggtcaaagtggatgttaactttcctacatttttgctctagaattgtaggaatagaaaagtttcctacgtttttccttttcttattccgacgaatcaacgacatgaatagtgtaggatttcaattcctttatttttcctccaattcaaagggggccttattttcgattacacgacagtggcacagtgcacatcggccaaatacgcctcctagcataagctcaaaaaaaaaaaaggaaagacaatggccctttcttaactcgctaaaatcctaatgagaacatattttcatgtgcataatattcataaacatcaggatttaggggtttggttggcatacccacattgtcaaaacttgccatacttcatttagctaacatatgcttaacatgtggccaacaaaattgaagccacacttcagccataggaaagcaagcctaccacacttttacgtgccaatgacatatgacccacattatgataaatgaatcttgccataagtgtggcacaaaccaaacagatgcctaacttaatcaaatttggctaactttagttgtgatatggtgaggtaaatcagttgatgatttcctcagctcttttcgactgtgacaataagagcgtcccgtcatccttggtgcgaacgcaactaggcaaattttcagatgccaaattaatctcaccccccccccccccccccccaaaacacacacacacacacacaaaagaacctatcgaggtccagtactccagtctgaaaattggactatgaaaaagaagaaaaagatatactttacatgctatgtagagtaatagcatactttgaaaaagtcacctctcttagtagttgtgctgatgcttgatgacgccattaggtccgaattatttgctgctatgtagagtaatagattgtgctgcggcagatgtttgtaaattagcagtgtataatataccttccattgtttaggttcctgcacatcaaatgaacaaaatcctaaagagcagctacaatttgcacaatcatcagttaattcagtaacagtccaaaacgttatttcagttaattttttttcccttcaattttgaggtttaccagtttgactataaaacctgatgcaaacaaggtgacaagaaaaggggggagtatgtcaggataccacatccatgtatcaagaaagatctaaaaataatgagaccaacgcatggatctctgttacttggatcaacataactgatggaacatctaattccaattgaactgattgcaaagttttgcttgtattttcagaaagaatttttgacacgctgaatccccaacatgtgtgctcatgtccactgaacaataatgttgcttggcttcagatcacagtggatgattggtagctgacagtggtggtaaagatactccagtgcatctgtggcgtcaacagtaatgccctgtctctgagctagacagagggtattgcctggagtcttgacacatttctgatgcaattacccaatttaccatgaggcatatacttaagactgctaggccagtgctgttgaatcattgaccttggaagtcaatgcttgagcaaaaagtgactatctttattaagtaacagcggcacaccctactcaatgcctcacattcagccatgaaactcctagaatatccaacaaattgacatcttcacagctgcataaacctgggctagctggacattcttaggctagatttggtcagcccataaacctaagcccccaactggagtataatctattgatgaactatttacgaacatggaatagtcttgaaattggatccaattttagattcttcctggtaagaggttcttctgtagcaggttcatctttcttcatacgtattgcttttaccaatagcttcgtccttggttctggtgtcatccctctcgactccatcgttctataataatgcaaagcctcatccagtttatcgtgggaatggagtccatgaaccattatagtaaatgatcgttgatccgggcctgatccattcctctccatttcatcccatactagctgaacccctttctcataatcccaactgacataaaggttcaatattaagttatatgtatcagagtccagtctgcaaccagacttctccattctctgcatcaatgaaataacatctttgggtttctctgtcgtcttcagaatgtaggagtatgtcatattgtttggagagacgcccttaacctccatgtcatccaaaagctcatagactttctccatccgattaatcttacagaagtgttttatcaaagtgttgtaggtagcaacatcggcctgacaaccacgatcattcatctcaccaaaaatctcaagtgcttctggaatccttttcttgaagcacaattgatcgatgatacaattacaaattgccacatcaggattgatccctttctcccacatgcttgtaaatagttttactgcagtactaagtttgccagattttgtaagcgaatttatgaatgtaccataggtgaacaggtcaggcttaagcttagacgcaattatctcattccaaacccttttagcgtctgccaagcttcccttgacacaccaaccattaagaatgatgttccagctctttatgacaggagggaactcatctttcttttggagaaagagggcctctgcttcctcaacatgcttgtaccgacagagagacatcaaaagtatctggaatccaaccaagtcaagctcaaacccataatccttcctcttgtagaacatatctatcgcctcctgcaccttgtgcgcgcctgcataccggtttaacaggacagcaaacatcctgtttgtgaccactgactggcggctctccacaggaatctcatcaaacagttgtctcatgagcctgaccttcttcatcctcccaagaatgtcaagcatctccgtgtaggcccttgacccatggttatactggggcagaccagctgcccatttgaagaaagatagtgcgactttccaattggacctctgcttctggagcacctttagcacaacatcctcatccatctcgtctgcaaattgattgagaacttcggcgagctcactgtcgccatctctagacttgaggattttaacgatttcgctgacatggacatccttggaaccatccaaagcggtagaatgacaaagccgtagagatccaacaacgcagtgaattgggagaatgctctggtgaaagcgtggatataagcctgccccgggaagctccactgaggcattctgacgaacagttggcgtgcaggaaccaaggaagccgagcctcctaataactacgcatgaacaaagtttaaattagtaccccgcacttaaattcagagaacgaaacctcgttccacttcagtatatgcattcaaattcagataatgaaacagtgcgcggtgtgatggactcatcaagagatgatgaaaaaaatcagaaggggccaagagaaaaagaaaaaaaaaagaagaaggggagtcggtgcaggtggtgcctaccgaagagcgtcctgctggacctgcaggcggcggagaggatggcggacgcccgcggcggcggcatcgtaccggagatgagcacgagagcggcggagggaacgggtaccagagcgctctctctctctctccggtcgatgactaaatgggctactaataactaagttaagcgaagctattgggccgacttgaaagcccactatgtgttgaatgggttgtggccgacgtgcgggcccgtcatgtaaggctgggcttgtgatggacacaagcgaggcccacaatgtgcgtgtccggcctacattgaggcccaaaatattcggagcaatcatacagtccggcccagatagcaacagatatagaggcctgatataacctgcaacagaagtacagaactaaccaaacagcttttaacgtttcagcatgctgcaaatctgaaccaaccaaaatacaaacttaaattagtaagagtacccccactttgaggaacttagcccctctcttctaaacacccccttagtcgtgatggaaagattgattaactcaacaatttatttgttatagaaaaaaacaattaatttcgcatttcaaagagcgtagcaggtagtagcagctaatcttgcattgaaataaattacactttttaaaattacatctatataattcagttttaagagcaggtgagctgagtggagcagctcgaagcctcgaatagtttgaaatatactgagcactccacttcacttgacgaactgagctgaagtgtcaccgctcacctgctctcccgccaaatcctctcaacccaaaagccattgagctgagctgcctccttgtatatatccatggatccacctcgatctctgccatggcgttcccctccctctccgtctccggcattctcgcgcgccacccggtgctcttctacgcggccacctggacggccgtcgccaccgccgcggtgtccgtggccgcgttcgcgccggagctcgccttcgtctgggctgtcacgccgggcgccgcgccgctggcgtcgtcgacggccggctgcccgggcggcatcgtcctgccgctcgacgggccgccgtgggacgccgcctgcgtgcccgccgcgctgttcggcagggtcaccctcgacgtgctcgtgccgcccgtgttcgccgccgcggtggtgtccaccgctctctggttcaccaaggccgtcggcgtgtgggaggacgacgacgacgaagacgacagcgacgaagctacaatggtgtgactgagtgatgctgtaattttgtgacacttagacgccatgcttgctatgcatattagaatcttggagttcttgatcttaaatattaatggctctgatcaatatcatcgtcaactaagagtgacaaagcaattgaattaggctgaactttattgaagtatgtagacagttgaagctggttataattccctgtttctgtaacagaatgaagaggaatttgtttcatttcaaatagttcttattgaaagaaggaaggaggaaaatgaattgataagaacaataggtgaagcggaaaaccgaaaaagagcaataagtccttttgtttacaagtcttctttatatagaaattcgacctattgctctggatccccgtttactaggaagatatgaatcgaaaggatcgaactacctactcattattcggaggtgaatcatagaacactaaaagctgtggtatcttatagaactatctatttgtataatgttctccagttggacaaatgttcagtgaaggtttacactgacagcaaaattgacagtctttcatggccaaggtcagtgagtggcaagattgacttgaattccattatttcaagctgcatgtgcttcggtagtttcattgtatactcttaacacctgatatggtgcctcaaaatgcagcctgttatgcaactaaaatcatgcatacaagctaagcaaattcatgggcaatagctgcacatatgtagaacaatatctagccaggcagaatttcacaactgctgaacaactcatgtatttggcaaatatattaacaagagtacacaggttgatctcattctcagccatgaccgaaggaaacattagaaaagggttcagaatacttcaggttcctaatactactgctgctacacatatttatcaatcatcacatactagtatgccattaaaccaaacagtatcagaacacttcttttttctgctgatgatcctgctttgggctctcattttgaagaagacttgatcagcttttcgctgaattcccagagttgcttcgccagcgcgtcattcctcgcaaatctgctagttttctccacattgcagtcagcaaagtattgtccggtcactcccttgagctgagggttcagtcctacatagcaagtggtagctgctccctgaaaaaagaaacatttgttaagtgtgttgtttcagatgaatttgaatttcaagacaattcaatttgtctttcagcattgctgcagagaattcggacagaaagaagaacagagaagatattgggttccaaacctggggtacgctcttccacaagatgtaggtggcaaattgaagcacccctgcaagtgaaaacaaagtgtttttttcagaacattaaggaaaggaaacagcattctcttttcaatcgaagcctgaaggtccatagcaaaaactctagaacaatgactcagaaagagagaacttgcatatacgtactcataaggaaaaaggagtgcctcatcaaattggtcatgatcaatccaggatgaacacagttaatagtgatgttcgctccttcttcctgtttcatcaatggcacagatcaaacatgtattggtgaattagtgatggaaaatagacaaaattaaatgtgttttatagaaaaatgggaaatgcatagagttttcagctctgttaatctgaataaagacatcacaaataaaggtgagaatgagggaagaaaataccttcagccgtctagagagctctttcgcgtgaagtatgtttgccagcttagattgtccataagccatcttgtcatcgtatctgccaatacaaaattcttatttcaatctctaatccacataaattttccaacagaaaaacaacatgaaaacactcagcacatacgttttctcatcgttgagtttatcaaactcaattcccttcggatatgtatggaggtgagcaaccgatgacaagttcacaatacgaccttcaatacctgtggacttcgcggttgctttcatattatcaagaaggaggttggtcaacagaaagtgacctgattgagcataacacatcagacagatatcagtatcatccaagcactttttgcatgtttaaagtaaatagttgatagtggtagagagtgaataccaagatgattggtcgcgaactgcatctcaacaccatcttcagacaatccaaacggacagaacatcacaccggcattatttctgcatgacggaaaaaaaaagaatatatgagaccccttaattaactgaaatttaagcagaaccaaaggatctttgcatgttaaaaaaaggcaagtgtgctaagagtttgaagggagttacatcaggatgttcagaggaaggttcatcgagttgaactgatctgcaaaagctctaacagacttaagggagctgaggtcaagcttcagaacatcgatgtgagcttttgggttttcctcaatgattttcttcctcactacagatgcagcctctgtgttccttgctgcgatgatgacatgggctcctctcatcgcaaagactcgcgaggtctccagaccaatgccactcgctcctcctgtaagacaacagaatttacagatttccgtaaatttgcgaggatagatgtttatgaacagtttgcagtaactagctactgtgagtctgacacaacatgaaatttactcacaagaatacaagattgatgtttggtgaaaactgaattctatgacagattggttatggatgcactagaagactatgattaatgcttttatgagcaagtttaattgacaagacctaacacagaaaaagttactattatataatgggaaaatgtttatagtttaagaccacacagttccaagctcaaactcttattttccacacaaaaagaaaggaatatccaacatctccacatcaggaaagagagggtaaaaatcctcagcccattgtcagaatggaagaactgctatgcccttccgatgaattgattttccttcacacttctgtatatcaatctatgtttttgtttttttagtattatctaaaatacctgattgaattatgaattctctgtagtcaagaaagttccagaaatctaaaccacaaccacaagattgagcaggaaacagacaaactttcatcaaaacataataaactcttctggtccacaaaaaagctacttatgcataaatttctcatatacaattttttgaagagcgtagtattattttgatattatattaatcataacacaaaaggtggctgctttcataatcccaactctaagccacccttaccaccatccaaaacacacccaaaaaggaaaagagagaacaatttgagagagagagagagagagagagagagagagatgcagagactgcctatggtgagttggtgacgggtagagaattggagattattcacacgagtttctcacaaatctaacaaaaacatggcaagaaactaaccaaaaccattaaaaataaactgcattgatgttttcaagaacaggtttttgctggccacaacaacacattgcagagaaataaattccaagattcggaggtacggaagcaggcagctctgtctcttacctgtgacgatgacggtgaggccggtggcgtcgacgccggcggtgacctgctccgccgtggacccggagccgaacccgctcgcgccggccttcccggtgatgagcgacaagatgcccatctcaaaccacgccgccaagaaacccccaaactcacgatccaacactgcaccccccaaccccaaaacccaaacaagaacacgcaaagaagctcagccaccgcaacgcaactgaattcgacccccccccccccccccccaacaagaagtcgccgaaaagaacacgccaagaagcactcaccctcgccggacagatcgacgagttgttcaatgcgcgggcgcgggaggcgggagcgaggcggaaggggaggaggaggtggttatttatggttgggggcgccggtgcagagttggtcgcggagttagaatcgatgcaggaaggattaggaagaagacgagacagaaaggaatttggaatcgtcacagaaagaatcgaatcgacctggattcatccaaattttaagagaattttatacgtttgggttttgtaatttactgctagtccggtatatgaatatgaatatctcaaaaatgtccaaatgctacaccaaattggttcacaaagaggtctggttggtgtgtagcagcgcttcgtattcgattaaaattcaggggaagtaatttgctgtagattatgaactacgtagcgtgtcactgtcccgttgggtcccgttgtatacatgatgcattgatgcagtgctcctaatcacttcctgatttgccatctgtcactcgtataatctcgtactccctctgtctcagctatgatttttcgtgtccaactttaatcgtttatcccatttaatttttttttaaaaacaaaaacataagttatacataaagtactatttatgttttatcatctcataacaataaaaatactaattacaaaaaaaaataaataagacggacgatcaaagttgagcacagaaacttatagttgcacttaaaatgggacggagggagtatgttactgccagtgctagcaaccgtggcatactcgactctgtttgggacagttctagatttaagatttttctttaactaagtattcataactctagaaatctatacatctaaaattatgattatattgataatatttagatgaattgttgtttgtattttatgagaaatataaaattttaaatctcactatagtttatcttacaaactctaaatttagcaagtatctagaatcaacaccttgcttgcctgtgtttatatgagaggtttgattttctttctttttactagtattttacaaattaggctttaattattttacagcccatagttggtccgatgtgttactggaaattattttggtcactcgtctgcggtagcaaatggggccggcctactttgtataaccattggtccattgttgtctgatcatctgatgatgctgcatttgttgaagattaggtcgatgatgaccgaccggccggccggcatgaacgaacttgagatctcaattcatcatcctctgccaatttcgctaatctctttagttaatgtattaacccaaaagaattaagcttaattgataggagtagttaatatcttttgatctgtgtgaaacagtgaaagagatatggggttaacattaaccaacatatagttaattttgactatacaaaaaaatatattatactgagtagtgagcactgacacaaatcactccattgtgcaatataatactgacacatcttttttaaatggactgacacacaaacccctccaagataatagctcgagtcagctcgtgtgtaaattaccgaggtaattaaaaaaaaggctatgcataatgcatgcagattaaaaaaaagttactgaccattacaggattttgtggtacattattgaaggagcatgcaggaccagattatttgctgtaacagcaaggaatctgatggccatgctggtcctgatcacacagtgacattagattccatctcatttctacaatcttttgccccttttttttcccatttcatcatggagagttttcttcagatttttcagtaaggtaccagtgatccagactgccagtggatgcatggttggaagggagccaagcatcatggcgcagcgcagacacgggctcacccggtagtccccatttcatgcccactggtcctgaaatgcttatggacgatggattagggacgaaattgagttgatatgtcaatttagttcctttcaaatatgtcaatttagaaaagctttcaaaaaaaatatcgatgaagaaagttctcgaagaaatcataatgctcagaagcttggaaaatgtgtccataataataataaattaataatccgtaggcagcacaccaaactgttctcatcctattgctatggttgtatttagttcctttcaaactttcaaaaattcttccatcagattaaatttttggacacatgcatagagcattaaatgtggacgaaaaaaaccaattgcacagtttgcatgtaaattgcgagacaaaacttttgagcctaattacgccatgatttgccaatgtagtgctacagtaaacatttgctaatgatggattaattatgcttaataaattcgtctcgcagtttacagacggaatctcgtttaatacttcaaatgtgtatctatatacttaaaaaaatttggcttaggaactaaacacagcctatgtgcatgttttttcaggttcagagtttcagatacgtacaaggtttagagtaggaaaatattcgtcatccccaaccctccatgtcatatagtttctatagcattaaatatattgtcacgtaagtaaaaatcttatgtgacaagagagttaacgaggataccatatctacacaagaactaagaataaaaacaaagggatatgtggataaaaagagagaggagagagatgattggatgggaatttaatttaaagacatcatccattaaatacatagtgtcataatatctatatataacatgaaaaatatataaactaatagatagtttttgggttgggatggcctcacgagctcctcgtgaatggcatggggcatgggcaaacctatacgtatctccttgaccttgccaagaaacatgaatgattcattgattcagtgctagattgagctaaatatataatgtgacatgatgccatgtgaggagcttcatcatctgccatctgatgcacgggtgttgcaagcgatgtgaggacttgtctggtaataatagctcttgaggtgtccgagttgttgcttgattgctggcttgctgctgctgctgctatttgggactgttcaagaatgtggttggagcaattcaatgatgaggcatttgctgttcttgtttgttgccaaaccctgtcaaagtgtcaataaccaacacacaaaccagaaacaggggctcacctaggttagatcctacttctacttttttttatgtcattcggctatctttattgatacgaaaatatagttacatcactcaccagcatgctcataataaagctaggggattcctaccactacagtttatgccaacggcttctcatcgtttgcctttgataagccgtgagaaaaataaacgaagcaaaaaaaattatatgtaaaacttttacataggcgttcttacaaatttagaagctaatgatgaaaaataaactgcgataagaaaacctcaaaatcatctctaaaattaagtgctaaagttaaaatttagctgccgctgataaactggcaagccagatttaaatttgactgttgcaatcaagaaagtacactttggccgggaaaaggggaaaagaaaagaaaggacactttgaactatgctatgagtaagcttatctcaggctcttaattagctagatctgaagctgcactaaatggctgcaagaattgggtgaataatatgtttacaagtactagcgaacttaatctgcattctagctagtacaccaactcaaaagtctgaagaattttctgctgaaaggagaagttgctataaaattctgcatgcttggattgcccagtttggtttctgactttctctaccagatcatttaatttaatggctaatagttcatgagtaatttcaaggacagtcttgttgagtacgtgtaattagatagcgatcatatcatctacattattgataggtactgtttgtatctgaaaccaacaaaaagaagcaaccttatcatcaaaatggaataaaggggataaaattaggtacagtctcgtccaaaatttaaatgaactgaaaaattagttgacgatcctgactccacacttcaaaaaaattgatttgtgataatagactgtaatgattttggaagggtaaatcaatccttaaacttcactgaaaataatgcagtccgggtatgcatttagtgtgtggcagcacagttaggttggattggagcatttgagcctgaagatgaggcattgggcccatgagaatttatgctcaattccagtatctagtgtagcaggtaaagagaattaaatgtttctaaatgaaaacataatcatcattcacttttactgtttataacttcatggttaacggttattatcaggtgaaaaacgctgaccatatatcagacagcaagcatgtcgatgcatgcgaatatgaagagtactgaactgaaaatttgtagttacaaacaaagaggcaagagggagtgaaaacagaacagggacgaaacagtgttccgccttcaacttatgaatcatagccaaatttaaattttagaattaatttagatgtttcatcattttctattttctggccttaatttttgtggaagtacaaaaactttaccctaaaatcaattttggttgcttcatttatttttctcagcttataagccgtagcccaaacaattagaatattttccagagaaaggccaaaagcatagttgtattattggtctcttgtgcatttgccaaaaaaacaaacaaacaaaacaaaacagagacaatcatctatttatgtgcagtacagactacagataaacagttcactcttgctcatggcagctacagtgcagaggtcctaagcaattcattgcctggacccttagttgtattacaacacaaggtacaaactgcacattagccatttgctgctcaactacctcaacagaccatgcactgcattgcaaaagggactctatggagactcttcctaaaatctcggccattgattattgacatatactaaatctgaacaatgtaatttcctatctgaaaagtctgatgaaatttgcaggcttccctttcttttctcttgcattactttttttttctcactccatcccccgtgtaaacagcataacaaacagacaaatttatacagcaaatgttatttgaacaaacataagagctaccaggctacccttgaaaacaaaaaagaaaaggaaaacaaaaacaacacaagatgctattgctagcctttgatttggctgccatttcttcagtccctatgcatcctttggtggttgggccgtctcatgttctcccagcttgagacaattaggttgaggatgtagtagtagacagtcttgacgcaagtcataataaagttccagcaagaggaaggccagtaccacggatagagaagccgaaagaacaggcttatcacatgccttggatatcggccaacctgtagcgcgacataagtcaaaattattatataactcaacaagtattcacattaatttcaaatagaatagtcatggcaaccctctgtgaaaatggatcaagatggttcatgagatatccatgtcttgctgcttattgatgaaaagggaagagaagaagagaaaacaacatatgatcctcaaagagaattgcatattcactaaatatatgcatgggattccatcagcaggaaatcatcggtgaccataaccgcagggcatcaacacagtaagtccagtataacagcatcacagtgatcatcagcacacatgcttgaaataaatcgattgtgatggtacatcgcggaggtaatatttgagaatttcaaactaaccatcgaagcgagtgttcaaataagttaaggtaagaaaatggtactcacaggaaaaagcagatccagtgtattccaggctgcatgccttactgctcgtgtagggtaggtaggacctccaggagaagtgaagctgtaaaggcaagccttcagtctagtgcttgtactcatcctcaattccaatcctggatgattttttttttcagaatgaagaatttacatttcagtggagaaacagatgcaaaaagtcttggattacttttggaatgtgtctgaaatctgaataactataccttgaaggatggtcaagcgggagaggtaatgcagaagcacaggttcaacttttagtttctggagctgaaaaacaaagaacacacgatttagtttgaggtgaagttttagcatgtcatgagaacaccgaagatacttcacttagagaacaacctgatcagtgagttcaattacatagtaatctgcagggccaccaaccaagaaagaatttggaaaagtaggaaaatgctcaaggaaacttgcaagcaagtgatctgcacatgcaaacttggatcacttcaatagcaaacaattgggaccaagaacgtggagaaaaataacataccttgatcatagaacagcataaatctcgagaggaggaggaaaagacctctaccagcctgttcaaaacatcaaattaatgacaacaaatactatcgtacatgcttattaggaaaactcatagcagagttcaatgtcaatagggagtgacctgtactgatatcttactcagttgatctgggactaaagcaacctcttcaaggagatactgtttaataaagcaagcatgttttgattttactaaaacacatacatcacagtttcaacgaaatttgagcaactgaaaccaaatatatccttacattatataatgagagaaagtgtcttgtattggtttggatgtcaatcctgtcaaaaagtaattccatcagatctatggaagtttcaggcaagaaaaaaaggaacatcagtgcaataatccctctgttagcagaaatattttgcagtaataactttctcagtcaacagatcaaatttatgggtgccatcataccaaaaaacattagtagctccttggacaagagcagagctgtatctcagtgatacttccttcccatcaagagggacttcgaataactgcaaatgatgaactagtaattcaccaaactgaaatagagatgaaggctaatacaatccggagcattcttgtatgcaagatcgaataagcgaattacagctagcatttacagaattctgtacttagcttgtttaactagctatttgcagtaaatggtggccagaacaatgggcagtataagcttgatgctgggatacaaattccccagtaagattatctttccttttgagatcatatatacattactcaaaagtgaaaacttaaaaccaccaagacattagctcattcagaggaacatatagcaaggagtaaaaggtaaaaggcacattcactgaggtactggttaaacaaattccttaaacgttactggaaatggaaaacatgacttcttgtgaacatgattgagtttgtacttatattggttatgaaaatcaacctattgcatgttctaaacatataaggttgtaagaattaatatatacccatctgtggaaaagaagtgcaaatatgttcgctgcaaaagactggctccagagttgcactatcaagtcaagtatacgcctcccactttcaggtactttaacaaaatggttagcaagaatctcatagaagcacaaccgggtatcttctcgctcatctactggagcaataccatcatcgttcgtgcttaaaatcacatctgttaaaaagaaataagtatgtaacatagcaaaaacacttgtaacaagattgagtagtattatgacccaaacattgatcataaaaggaagtaaggacagagcatgtgcagaaaataagtgatatactaatgtaacaacaaagttcttactgtcagaagaatccaagcaaccaaaactcaatactctgaatctaaaagaaaaaatggattgaatttctattaaagtatagccttattgttatgcacaattaagtcaaatatcatgttttcctgtgatgcaggtgtgcacagtaacgatggtgtatgcagtacttccctagttagcaagtgcatgccaaaacagccaacttttttagacacttcaatctacagatgcatataaaataaacaattaagatggattcctagaataaaaatgaagtaatgccaatcttggtaaacgatttttgaaaagcaaaatatagtgaaagtgacaagggaaagaactagtttttaactcttggctgacatcaatgaattgttagttctccgccaaaaacgttaaacaagggaatggatataaaccatagtacaaaggaaggcaatgcttttgccttccttcaaaaaaaaaaaaatagtacaaaggttcaaactctaggtaaaactaccacaaacttggtgccaatctcatgattactgtccacaaatacacacatgacgaaaaagcattagtttgattaacatctgaagctatgaaagaaatggcacctcgagcgcggtcatccaccttcaatgcgatgtcagcaaacaactgctgcagcagctgaagacgttgcgaattggagttgagagcctacacgcaagcaacaaccagtgaaacagtgccacctgccctatccaaaccactcaaattatcagtatcgtttcgagatcatataaagtaatctttaattcggtagagaatttgagaaaagaaaacgggagaaccaatttcgattctgtaactgcggtaattgccatcgacttagcgccattcgaaaaggggaaattctgggattacgaaacaggcccaaatttctctaactgatacgtggaaaacaaatcaaaatcgtatattcttcaacactgaaaactcccaacagaacaacagtctcgaaaaaaaccattgattcagaaaaaacaaatccaaacaaaaaaaaacaccttcctcactccaaaccgaaattaatcgcaaagaacccaaaaaggtggccaagaaatgctcaataatcaacagaaacaggccaggacaccaccagcacgaatcaacccaaccctcccggaaatcaatgaaagaacgagacgatgaggggggggggggggggggggcaggaaccggaatgcggaaaggaaggggcaggatataaccttttgcagcttgcgctcgatctccagggagagcgcctcgaggtggtcggcggctcgggcccgcatctctcgccgtcgccgtcgccggcggggggcgctcgccgtggacgctgggtcgagtagcgtcgcttcgcttctccaacgattcgtctcgtcgttgttctctttgctcctctcccctcttctgactcgtggtagggcggtccaatcagagccgtacacgtggcgggccggcgacgctggcgagtaaccgcgagttcagcggtggtggcaggataggcatcaccgtgattttgatattgcaaatggatgagaagagatgattctgattctggtcgcatttgatcggcttttccaacgaaataattttgccaaatatttttttttggactgttttgtgtaggccgtgtttagtttctctttattcccaactttttatcatatcatatcacattaaaaatttacatatacttgtaaatttttaactttttttccaaactctcaactttctttaaactttcaactttttttagaaactaaacaaacctgtaaagtttgtcaaatttttgtgttccaaacatgtgtctgattatcaggttgtactccacaatagtctgtctgtctgcgtgtttcagacatgcactgtaagcattttttttcttaatattaacagtgaattgattgtgtgattctttgctttcaatagaagcagggctgcaaagccttttctctaaaaaaaaatttgattgtgtgaaatgattgccgatttcttcttatcccacgctattgcgtgccgtctgctgtgctccaccattttcgccgcgtagctgacgtgtaccaacctttatcttggctcgaggacagcacgacagctgcatgcagcgacacgtggaaaaagcctactccacgggatcttctgcaccagctcggatcggtcactcttcactcaattcaaatcatacaatttttttgcagaatttttcatataaacatgttcactttttcacatgaatcttgtgagaattttcggtggtttaaaaggaggcctaataggcgccgtgacacgtcatgcatgcgtcatcacatcccggcaggtctcccgtctttcctcgggtcgctgacggcggtgagcatcccgtggaagacattctcgtcgccggcggcggcgaccggcgtcagcaagtcctgcacgatgaactggcagacggcgccggagtccgtgctcgtcagccggtggcccctccgccgcaggaactccctcgcctcgccgctgagctcgaacacctcgccgtcgaccaccgtcacgttctcgtacaccacctcatttggcaccagctacatatacataccaccatagtgtaattaattaattgctccttccgtttttatcatattataagttatttttattttttttaattatattattttgaagtttaacaaaatttatataaaaaatagcagtacttttaattaaaaaaatatattactccatccgtttcagattataaaacttttttactttgatcaaaattaaattattttaaggttgactaagtttatagacaaataaagtaatatttataatatcaaattagtttcattaaattaataattaaatatattttcataataaatttgtcttgagttgaaaatgttattattttttctataacttagttaaatttgatacaatttgactttaagtagagttaaaatatcttgtaacctgaaacggagggagtattaaaatatatttaatgaacctaatttgatattgtagatgcattaaatttttttgtaaaattggttaaacctaaataaatttaattaaaaaatctaagcagcttatactctgtttagggagtactggttaatcaaagagattaggtctaatcgattaactgatgcttgccttgtggtagaccctgggattcaggacggcggcgagcgggtgcatgccgacgatgaagtggttcacgaacacctggaccaccgtcgctatgatgaacggcccgccgctgccgccgacgacgccggcgagctgtccgtcctgcacaaagccacaaacagtaatggtggtcgtcagcaccggcgacggtgagctcgatcagcgtgacagcgtcgtcagccaaattgttagtaactacatgccttgagaatgatcgtcggcgtcatggaggagagcggccgtttgcccggagcgatgaagttcgccggcgccggcgggaggttgtccggcggcggcgtcccctccgccggcacggagaagtcgtccatctggttgttcaccacgatgcccgtcgacggcgacagcaggtgcgccccgaagaggtggttctccgtggtcgtcatcgccaccgcgttccggtcgccgtcgacgacgcacaggtggctcgtcccgtggtcatccagctggctccatctgatgatcaagatgtaatatcatcaatccaaatgtttcctggtatgatctctgcaagaacaagaacgtgtacattttctgagatcagttgtactttgggaagtagtagctgggagggaacgtggtgttgtcgacgatcctctgccggagtttgtcggcgaacgccggcgagagcatctccgagacgttgccggtgatgttgacgtagtcagggtcgccgagatccatccggatggccagcatgtgcttgaacgcctcgatgaaccggtgcaagccaagaaatcctttcaagaactcgagtgatttgtatccgctcaagatgttcaaaatctggaattaatcatattcaagtttggtttggatggatcgaggaatgaacagatgatcagaatttaactgggacgaatttggatactgaccagagccaccccgacgccgccgctggacggcggcggcatgccgaggaaggtgtagcccatggcgtcggagcgcatggcgtcgctcacctcgaccttgtacgccctcaggtcgtccaccttcgcgatgccgccggcgcgccgcacgtcggcgacgaacctctcgccgacggcgccgtcgtagaacgcctcgacgccgccgctggcgatggcctcgagcgtgtcggcgagcgccgggttgcggcacacctcgccggcggcgaggatcctcccctccggcgccagcacggggcggaggcccgggtccgcgagcacgtcgcgctccgtcttcttgagcgcgatctcgaggtacggcaccaccgtgaagccgtcgcgcgccagcttgatcgccggcgcgaagaggtccttccacggcagcctgccgtagcgggaccacgcggcgtggaggccggcgagctcgccggggatgcccatggcgagcgcgcccttgtacttggaggtcgggttgcccgcgtacatgtcctgtcagacacaaaaaccaccatttcagcttgtcatgtttgggaattcaaatgtaacaaattcatatatattttgaattttgattcgagcatcctttttcggatgcctctcacttcgatcgaattaagaacataatctacctttatttggaccagcaaactcagctagcagcaagtttacacaattgagaaacgtccagaggttttccggctagctctacaaggtggtaggctaaataacctagattcgaagcctcaccccttttaattatttgatattagatcattccctaatattcgcgtcttttttcttagcaagtttacacaagcaaattcagtgtaaccataagaactgcccaaataatggcaaattcagatgctctcagattttgcttcataatgctatcgatagaattagcacttgcaacgcgcgcatggtgcattatcaaaaaatgttttgcttcataaacacttgcaaatgtgctatcgacaaaatgcgttgttattgtggaactgatctgttcagttcttttaatgcaaattctcacttgaaagaaatttcctaatggacaatttcagctctggttcacacaaatcccccaaggtgttgctatctctgtttcaaattactgttccaggtttgttctaagttaaacatgtttatccttaaccattaatttttaagaatccgtgaaagttaacaaataacaatatatgaattctatattataaaaatattcttatggtgaatccaaaaatataaatttttgatgtttagctacacaactttatataaatttatagtcaatgattaaagtgtttaacttagaacaaatttaaaatgacaaataatttgaaacgggaagagtatatagttaatgttatgcaagttgttgtaccgaattacaccaattttacaagatcatacatcatgagcacaactattttctttaagtaatttcagatattttttcccaaatctattggtttcctatccttttagctatggttttcaaaagaagaaaaaacatcatacatggtttcctcgtaaaactacagctttgtattagtaacatgatcattgctatatatcaaaggtgctatgtccctccaaggctccaaaagtccaaataatgacagggaccatagaaagtactaaacaatggagttgatgaaccatattataacaaactatacacaaatggcgaccttatactgttatatataccgaaaacatttcccggagatatgctagttctaatgggcgatcgatcaccctacctacctagtagcgatcaggtagccccctccacctggtttccttttttggcaccgcattattttcctattttaataaatttatgcatctaaagtttatacatctcaagtttacacatctaaagtttagagaccaaaagtttataagtcaaaagtttatatatccgattcaaatttgaatttgaattcaaatattttttatatatatagtatttctatacatataaagtttatatacctaaagtttatagaactaaagtttataagtcaaaaatttatatatctgattcaaatttgaatttaaattcaaatatttttcatatatagtatttctatacatttaaagtttatacacctaaagtttatagacctaaagtttatatacccgattcaaatttgaatttgaattcaaatattttctatatatatagtatttatatacatataaagtttatacacctaaagtttatagatccaaagtttataagtcaaaagtttacatgcccaattcaaatttgaatttaaattcaatttatatatatatatatatatatatatatatatatatatatatatatagagagagagagagagagagtatttctatacataaattgttctaacttttgttttttaaaaaaaattgtgtggtgtactttggtagaaagagaagaaagggaggaggaagggggggagaggagggaggagtacatagtataggagagaggcaggggggtgatcgctgggcggatggaggagcgatcacccgcctaataggaattaccaacgcgtgaaacatgtgagaagaagaaaattataaatctagatcgaatctggacaaatttcatcttttttattcagtgtgaacaactgaacccatattttattatcttaaagaaactgaactcattttcccaaactggcaactgcagtatggtaatcgcgaagtgcagaaaaactataaagaccaccttgaagcaaccaatgaattagcccatgctgattgcacgtgtgaaatagagagtcttacagaaatggacattttctgaagcgatctacaatatttcaataatataatcaatgtccatttctgaatagttctgaagactgaagcagagttgtagcttgaataattctgaattacaaaatcacagcttgattaaaaaaagagtaaagtgtattagcgattcttaaacttgtagggttgtgttatataggttcctaaactctcaaaatgcatattcaggtcctagaatttatcaaagtgtatcatataggtcccaaatcggcacatcccctctaagatcctacgtgatgctgatgtggcatgccacatggacgtgacgtgtcattttcattttcttttcttcttttctttttctttttctttttcttcgttttcttctcattcttctttttttcctttcttctgctcgggtcacagagaaaggagaagaaagggaaaaaaagagaagaaaaaaaagaaaagttttaaatgtgacccatttgtcagtcaaaatgatgtcacgtcattccgtgtgacatatcacgtcaacgccatgtaagatcctgaaggggttgtggcgatttgaggcctaaatgacaccctgtaataagttctgtaatttggatatgcattttaagagtttagggacttagatgacacacaactacaaatttaacatacactttactctaaaaaaaaaaaggactacctactaagcgacctacaatgtgttgtttttgtttaatgtggttttaggatcatggaccacggggtagtcgacaatgcacatcgcacgcttgtacagtggcatgcctctccatgaatggaatggaatttgcaatgagccaaaaaaaaaaatcaaagtcaaatgccaatcatgtttctagatatggtgacttacatgctgttgctaaactaaatgaagcggggttcaatttaggttgtgttattttgtgcaagtcaccaacttcttatttatcgtttttaaaaaaatatataaaaaaattgctttacaaaatcatactaatcatttttaagctctttatagctaatacataataaattataggctaaaatgtttcatcgttttgcgtgtcatacctccaaacacagccttaatagctgtcaaatgccatcacaaaataaacaagttacggagacaacctttctaaatgaaaaaaacaatagctctattcagaaaaagaaataatgcagtggctactgaggcgaagaagaaagaaaagaaggaagaagatgaaaacatgagagaacgattctaactttgtaaaattttagtgatattcagctgatattatgaatagtaatattttttaaaaaaaattggtaaacttgtaataacatgatccaattaacccctttttgaaagttgcaatgtagacatttcgaattcttttttcaaaatttactgatagggatacttcgaattgctgatgtgaaatttttcttgctgttcttttacagccccgtcttttcacttatgcttatcaaccaaaatttaaaatttcaaccttaaatttagagttgattttggagttttctcatcaaagtttattttacagcatttgcttttagatcactaagaacacgtatataaaagttttattcataaattatttttcgtttgtaaatataccgtttcacttattccggatggggccgttagttggtgagcagaatcacgtgcctatcatttgcgtaggcaggtgtggcccaccagacagtgacatgcgccagaccaccgaatcgctttaaatccctaatattataagagcaggtatagatatattttaattttaatgaaataaaaggtgaaaaaaaagagcagcgggttatagatctgtagccagctgcagtacagactccaagagatagtgggtgtatgataggtgagaccgtatattaatagtatataaagaaactattgtataaattggctattagactataatataatatatacatatacatatatatatatatatacatacatacatatatatatatatatacatacatatatatatatatatatatatatatatatatatatatatatatatatatatatatatatatatatatatatatatatatatatatattggagctagtagtgagctgtactattcaacttgctctaacggaggtctcgttgccggccacgtggcgcgtggccacacacgtcatccgctcaaaatttccgggaaaaagttttttttttttgtttttactgcgtgctctagttggtgacgagtagtaacgggtaacgcactcaccggcgtggccgcggccggcgcggtctcgcgggcgtcgaaggctacggcgtcgccggaggcggcgtccctggcgacgatgaacgcgccgccgccgacgccgctcgacatcgggtgcaccacgccgaggcagagcgttgccgccacggtcgcgtccaccgtgtgcccgccggcgcgcagcgccgcggcgcccaccttcgagcaccgcccgttgtccgttgccaccgcgcccaccccggcctccacctcgtgcgggctcagtctcacacccccgccgccgccggacaccaccctgctccgatcatcgccgcccgagctcaggtgcagcacgacgcacgccgccagggcgagcagcgccgcggcggcgatggcgagcgcggtgcacggacggcggcgccgactgtccggagaagaaaccgcgccgccgccgaggagagggttctctaggccgcctcgcgcggccatggccgccggatcgccggagattgtagtggcgatcggcaggtaggtcgtcaggaaggggagggattcttggatggcgagagcttgtcacactgtgcgtttgttggcttgtcaatgagacgcttgatttttataatgatcgtgtgtctaactgggcaatgattctacagatcctattgtacttgatattttcactattttcttaattatactcccttcgtacaaaaagaaaatatataacagttatagagcgggacacatcggtagggctgtcaaaaaagctcgagactcgcgagctgctcgagctcggcttgtcctaggctcgattcgagctcagctcgagctcctgacgagccgagccctagcctctctataagctcgcgagctttgtcgagccgagcttgagcttccaacgagcttagtaatatatgatttttgttattatttaataaattaggagatcaaatatgttatttgtatggcttatattgacatcatatatttattttattcttttttcctcttatattaatatgatgaactaaaaattaattatatttttaaagattatctttcaaatatatgttgttttacttaaaaatcaagctcggcagtcgagctcgagccgagcctatcagaaagcttgaacattttataggctcggctcgagcttgtatcgagctcgagcctaggcagacaagctcgctcgagctcggctcgttgacaaccctacacatcggtattaaaaaagtgagtggatattgaggaaaagttatgattcgtgaggagaaaaaaatataggtagagataaaatggagaatactccattttgggacaagttgagaagtgatagaaatagctttagagctaatcaaatgacttgtgacttgtgatttggttaagatgggagaataggtggaaaatagttttattttaggataagtttaagtgatagaaatagttttattttagaacagagagatctaatcaaatgaaaattcagaatttgaatgtttgacgcaattgtactgattcaatggcgtgattctaactcatcaaaagcaataacccatcagatttttttttaaaataatatttcgatttagtgctacttgttgttgggatatcactttccaaattaagccgcaggaattacctttttcttgtaagtaaagaagaaacagagtacacagcagattgacaggtctacagatgtgtatactattgtcagatttatgagatcacaaaatttaaattctgacagttgatcttcttaagagtgacaaaatatcagataattttttttgcaagaaagaaatagagaaaataatctgcacctgcaaagaatattatggtgtggacagtgtggcaagcagtggactgcgtagccgcagcggcagcttgatcacagaatcagctgggaaaacaaccattggcagaatcaggagctctgatctttcagagttgtgacaaactgattttttttaaaaaaaaattgatcacgtcattataaattttgcaattttacaatttggcattactatttgcctatatacatgttgaaattgaaaaatatgacactaacattgaaaactgaaatatcccttggctgtatttttcaatttttgggaccaaaatacccaatcttctccgttcatcctctcatgtacctccagtcatcttctccaccaaaccacccatggctgccccgtgctcgagcgccacagccggccgttccactgctgtacaaattttgaagaatttccatataaacttgttcagctttcacatgaatcgtgtaagaatttcggctgtctaaacgggggcctaatcgatgccgtggcgcgccatgcatgcgccatcacattccggcaggtctgccgcctttcctcgggtcgctgacggcggtgagcatcccgtggaagacgttcccgccgccgtgctgccgacggtcggcggccgagccgaccggcgccagcaagtcctgcacgatgaactggcagacggcgccggagcccgtgctcctcagccggtggcccctccgccgcaggaactccctcgcctcgccgctgagctcgatcacctcgccgccgaccaccgtctcgttctcgtacaccaccacgttcggcaccagctgcattatatataccaccgaccagacagtaattatgagattgatttttgtgcatgtccgttcgaaaagttataaaaaaatttaaaagaatttgtcaagatagatcaatatacaatatatcttttcacaaatatgtgaattaaaattcgacatatacaattcgaaaaaaataaaaataattaccataatgtgttctatttatagtcaaatttgttatttttttttaattgtataagttaaatttgaatttgtattatttgtgaggtgacatattatataacgatctatttctactaatttttttaaatttttttgataactttttaaagcgacatgtaaaagtgagagatatcctaattgagtttcccagtaattaattaattgctgtttattaatcgacgagattaaggtaattaattgatgcatgcgtgcttgccttgtggtagactctgggatgctggacggcggcgagcgggtgcatgccgacgatgaaatggttcacgaacacctgggccgccgtcgcgatgatgttcgtcccgccactgccgccgactactccggcgagctgtccgttctgcacagatagcactgcagtggtcagcatcggcgagctcgtcagcgtcagcgaaatggttagtagttactactatatgcttgcctttagtatgatcgtcggcgtcatggaggagagaggccgttttcccggagcgatgaagttcgccggcgccggcgggaggtggtccggcgtccgctccgccggcacggagaagtcgtccatctcgttgttcagcacgatgcccgtcgacggcgacagcacgtgcgccccgaagtaagagttcaccgtcgtcgtcatcgccaccgcgttccggtcgccgtcgacgacgcagaggtggctcgtcccgtggtcattcagctggctccatctgatcacacaaaaaccaaaatctcatcactaaaactgctctagctaacttctgaaagaaacgttcatttctgagatgagaattactttgggaagtagtaactgggagggaacgtagtgttgtcgacgatccgctgccggattttgtcggcgaacgccggcgagagcatctgggagacgttgccggcgacgttgacgtagtcagggtcgccgagagccatcctgatggccagcatgtgcttcagcgcctcgatgaaccggtgcacgccaagaaaccctttcaagaactcgagcgatttgtatccatccaagatgttcaaaacctgcgattaatcatgtcaagtttgatatggatcgatcgagggatgaacaaataatcgaaattgactgggaatttgatactgaccagagccattccgactgtgccgctggaaggcggcggcatgccgaggaaagtgtatcccatggcgtcggcgcgcatggcgtcgctcacctcgaccttgtacgccctcaggtcgtccaccgtcgcgatgcccccggcgcgccgcacgtcggcgacgaacctctcgccgatggcgccgccgtagaacgcctcgacgccgccgctggcgacggcctcaagcgtgtccgcgagcgccgggttgcggcacacctcgccggcggcgaggatcctcccctgcggcgcgaacacggcgcggaggcccgggtcggcgagcacgtcccgctccgcctccttgagcgcgccggcgacgggcggcaccaccgtgaagccgtcccgcgctagcttgatcgccggcgcgaagaggtccttccacggcagcctgccgtagcgggaccacgcggcgtggaggccggcgagctcgccggggacgcccatggcgagcgcgcccttgtacttggaggtcgggttgcccgcgtacatgtcctgtcagacacaaaaaccaccatttcagcatgtcattttgggaaatcaaatgtaacaatttcctatttttgaattttggctcgaacatcctttttgagtgcctctcagtttgatcgaattaagaacataatttatcttaaattttgagttttaatgctgaaatttggagtccatggtcatgcgaattttcaccaacttcagatggagatttacaaatagaattgaataaaatgtatttctccttttactactatattggagtgttagacttttgtctaatcatagttagcttctatgagctcaatgttgagtgaacaatatttgtaataattggttgtagcatcttttgaagtaacgaccagatgttattttcattatctaaaaaaatatgtatgagcataattaaaatttaattttccactttttaattatgctcttcacaaaaaacatcatacttgaaaatagaaaggtctaaggttgcatttgtatgtgtaacttgcttgagcttttcacctgtacgtaaaactgagaagaggaattagagtataattaattaagtattaattattaaaaaaagtagagagttgattttttttattttttaagaaactttgatgtataaagttttcaaaaaacacattgtttagcctgtttagcagttcaggaaatgcaccaacgaaaaataagaaagttgttgtatagagttgctcaaaagaacgcaacataaataatgaagatgaaccataccatactaaactatttgtatgaaattgtggcgatggaatctacactgttacaccataaacatttccctacatgccaaccaactcgtgaagcatgtgaggagatgaaaatgacaaatctagatcgagtctgaacaaattctgtcttttttattcaacccgaacaactgaacctgtattttattattatctaaaaaatctgaacctttcttcccaactggcaaccgcaatggggtaactggtaggagtatcgcaaagtgcagaaaaaaaaaagaccaatgttgaagcaaccaaatcaattagaccatgctgattgcccatgtgaaacacagtgtcttacagaaaatgaccatttttttgggatcagatcacggatcatgctgtagttgataatgcaatgcacattgcacacttgcacagaggcatgcctctcagtgaaatgaatttgcaatgagctaaaaaaaactcaaagtcaaatgctgattatgtcttctagctatggtgacgttttacacgagacatgccgttcgctaaacaaaatgaaacaatgtggtgtaatacggaaatattagggagggtcagcttagataccgagtgaaccatagttaatcaggagtaaaaaagataagtacagtggtttttgtgcaaactgcaatataaagccattcggaaaagaacaggattgctgattggacttggagaggaacgtcaggtgcctatcatttgcgtaagcaagcgtggcccaccagacagtgacctgtacccaaccagcgcatcgcactaggccgtgggccccacatgtcatgcactcaggattgcagtaaaaaaagttttgctttttctttttttttttaatttttactgcggcgctctagttggtgacgaggagtaacgtactcaccggcgtggccgcggccggcgcggtctcgcgggcgtaaaagattacggcgtcgccgaaggcggcgtccctggtgacgatgaacgcgccgccgccgacgccgctggacatcgggtgcaccacgccgagccagagcgccgccgccacggccgcgtccgccgcgtgcccgccggcgcacagcgccgcggcgcccacctccgagcacctcccgtcgtccgccgccaccgcgcccaccccggcctccacctcgtgcgggctcagccccacgcccccgccgccgccgccggacaccaccctgctccgatcaccgccttgctccgctccccccgagctcaggagcagcagcacgacgcacgccacggcgagcagcgccacggcgatggcgagcgcggtccacgggcggcggcgccgactgccctgagaagaaaccgggccgccgccgaggagggggttctccaggccgccgcgcgcggccatggctgggtagctgccgccggatagccggagatcctggtggggattccaaggtaggacagagaggggagggatttcttggatagcgacttggcgagagcttgtcgcactgtggtgttgggtggcttgtgtgcttgagacacttggatatttatatttagtgactgtctgtccagctggccaatgattctatagagcttgttctaacttggattgtttctagtactatatttttaacgactcaaagctggagtagtaattacttatcagatggaaattcagaagttgaatgcttgacgcaactgtactgattggatggcaagagtaattctaacacattagagtgaatctggacataccttacgttcagattggtttattttagaacggagggactatggataaaaaaaaatttgaactctgaccattaatctgcttgagtgtcaaaacatcaagttctcaaatgtgtactactagtattatttttgttgcaaggaagaaacagagaaaagaatatgcagatgcaaagaatattgtggcgtggtgtgtgtgagatggtgcagcaaccattggcagaatcaggaaaacagattctttcagagttgtgacggactgatatttattacgtttatttatgcttagaaaacccagcatctgaatatctgataagcaccttggatctccgtctggctatcactattttagcctttaatttcatttccctattttttaataaatgaaacttttattgatctcaaacagttctccgcaaaaaaatattaaaggctaaaatatactacccattacaaaatatagcaacttttagctataaatatacctcatcccacaatataataatttttagctacgaattagacatgccatttgagcggagcgaccaaccaacttggcgaggcgagtgagacgaccagagtcggtgtaatcgcgtctcagcaatttgtcgctgtcaagtgtcaactactccggtccaggggcatgacttgttggtaatccatgcgtctcagcttctctttgctgcaccttctgtcattttctaattaaacggttgatatgtgttattccttaatttatgggttagttattactaacatagtacggagtactccgtaagtagtactagtatttatggtttttgcgaattgcaagcagatttctggatttttcacattttggtccttttaaaaaacttatttcgcaaatagacccctaaaaaaacttattctaaaaatggtcctttttaggcgccagaatagctggctcccccccccccggccgaaattttttatttttgttttatttgtttgatatttttttcacgcttagggacacacaaaaaccaaccatagaaaaattgaactcaaatggacgtaatatgtgacctgtagaatttttccactcctctcctctctctccaaaccagtgcaaaggagagatgtgcaacttttttatttttatttttattttttgatatttttttcacacttaggaactcacaggaatcaaccatgtaaaaaataaactcaaacggacgaaatatgtggcatgtggaattttccaaagttctaccgaaaaacttctcctcgaaaacacaatcttacaagcggaatttggaggttttaatatcgccgaacccggcaaagcggggagaatcggatgtaatattttctgtagatgtccgtgcatatattatttgcctgattccgagttcgtatgagaaagttacgcctattttaatagatgacatattttgtccgtttcgattgagttttggaaaattctacaagtcacatattttgtccgtttgagtttattttttatacggttggttcctatgttctcctaagtgtgaaaaaaa

SEQ ID NO: 8687 - DNA, 68363 bp, Oryza sativa
  unsure (1)..(68363): unsure at all n locations
ggggtggtgagtggtggtggtgcgagaggaggaagaagaggtagtcgttggaggggaagaggcggaggtgggggatgctttatcttcttcctcctttccgcgctcttttgctgtggactcggtgcacaactccacttcgccacttcatcaaagcggctcactactacagtgtacgtaatactccctctgtcctaaatgaaactaaaactgtatgtaatattttctattataatatagagtctattatgatacattatacttgaaaacgtcccatccaattttatattctaatattttagaataggtagtaatgatttttcgaggttttgacacgaataacgtttccgttccgtgtcgaaacctcgaaaaatttgtaagatggttttcgcctaagcaccggatcctgatccatgtggatataacggtttttgtcaatttttttataacttttcgtttaattttggtcaaattgactgtttcagatttgaaccattctaaatttcagtcataacactatcaaaacctcgaatttttgcggttttcaattggtttttatcgaaaacatgaatcctaatgtctacacttctgttcacttcagttcgattttagtgaaaagcctccttggggacaaaaataaattttgaaggaccttcgtatacaggaattacactgatctatgcagaaaccatttgaaaaaaaaaatgtatttcaaagaaaccccgagtatttcgcaaccaacctttttggcatattttttctttaaacatgcactatattcagattcaacgatgcaatcgtaatttcattacaatcataccctacatatcagttttctgaacgttattatcattttttttctaaacccattttgacaattgggtatagatcgaccaaatgtaaggccccgtttgaaacacgtgaactgtttccctgattcttgtgaatattttgtgtttcaaactttcagaatgtgaaatacaaactgaattgtgcagcattgaacaaagaccgcaccggtaatagtactactttgacagcacggtaacagatggtcaatgtctgctagtaacagcctggtttctgaatgatcggcccgggtgagaagagattgtttgcctgaagaaaatcgagtgtggtcaagggactatctgaagaattcgcgaacattgtatcagtgaaaaattattcaccattcgtcagaaagaaagaaaagcacacgacaaacaatgaaacaaacatcactggggttcagactttcagaacagaagctgtgattgtttcacgaccacacacaaccatcggtctcaagcacattacgctcctttctccatggctacacaaactacagaactcgtgagaagcaggccacggtagcatggctcattgctggccacacgcaagcccgaaaatatcatttgctacagtccaggtgaaaaaaagatctttgcttcaccatagcatccaggaaaggtgcaatttactgtagcaaaaaaaaaaaaaacagaaattttgatcacttcaattcaggattcagcaaacgggttcaccaaacggaattcgcataggagcatatcgatcatgaagttagtacagcaatgggatcgagtttttggtttcagttgaaagcgatccagccagtagtattgtagtacagcacattgaaatgattaagacagcgattacaaacaattgctgaaattgacaacacagttccgaacttctagtcgtaagtagctgtcgacattattatggagtaatgaaccgttgaacttgatcatcagatatatatacagaattttaactttgccatgttccatagaaatcaagatctccaatatagtggtgctagtgtaaaaagtacaggggagaatcaacaaagtggtaacttttttgcctaaatcaccaacactactgagaaaggaatttcagctaaatgtttagcagcaaaatatccatggcatcacttgttactttcctgcatatcatggcatgacacaggaagatctaaagactaaactgttttctgttctatgataaaagaagatcgttttcaccaaggtgtgggggcctcatgcaaacctggacttcatgctcttcgggtccaactcggtgcttggggaccatgatttccagtccagtgccagtctcgtcataatacgcttcgagctttgcatcttctggaatccttgtagccaaaggtatctctctcacaaattctccaggagggcagtgctcagggaaaggatcagtcaacttgaatgtcctgtcatgtctcttaacaaagggcattcgagcagtgctcacacacgatatcttcacaatgccatgtgtcaatgtgttcctccaagagaccttgacactgtgaggatcagagaagagcatgctcaccatgattaagtagccttcatcgtcctcatatattgtcttggcagccgtaacaggtccacttgcatgttttgctacaccagtgaactcatgcatccatgacggctcacctgtgtgaacttctatctcttgctctctgtcagaacaagaattatttgccatcacgcaatcctcatctgcaccatgagcaaagaagtccttccgtcgcttggcgcattttggtgaaaggtccatcccatcgtctgatgatggtggcgtagaaaggttaagacctgaaccattcagtgcctttttgtgactgtgagagccatgtgtaatctttgatgacagtggcagtggcctatcaagttcgaaatcagtgcttggaagattcctccatgattcaaagtcacttgcttcaggaggaattgagaaattaagttctcttcctgtaagttccgcccaccttttcatttcagcttcaggaacagctgacagatttggtgaactcacaatctctatcccatgaaggcattgtgggttggacagccctcgatagtgctttcgttgcatgcggtgtgaccttgcaaagcccttatctgcactgaatggaaaggatggctcaccatgcttggaatgcccattcatgaagctccggagctgcatcttcccgagggcattgtcaggccgttccttaaaaacccacatgtacatgttctccatgtcatgctgcaccaggaagacatcaaggcgaagatcagacttctcaaagcccgaaacgctcccagaagagtcccgtgtcaccttgcccttcggcttttccacaagtgcaggtttgaagtagtgattgaagaagaaccatgcaccccaaatgctgtcccccctcttggcacacttcctcgcaccgacgccaaccgcagtgttgccattgccagtcaactttggaagcgtgagcgcaacctcagactcataagtctgcgtgccgagaccgacatcaagcatgtcgaactggtcgataccccacgacggcggatgcggcggcggtggtggtgaggggtctgcagaaaggggcaggttaatgtccggtggtcctggatgcgcagattcacgccgcggaatgatgaacaattccctgtcaccaccgccaccaccaccaccaccaccggcaccggtgctgccgccacctccaccgccaccggaggagtcacccgaggccgcgtgcgacccggcgggatccatggagaggcgggtgcagggatggctgttggtgttctccatggacagggtggggaggaggggctctcccanggagagctccctcctctccttatccttcgtccttcctattctcacctacttctcttcgcttccacctcttgctcctcctctatctactgcctcttcacctcttgccccatgggaggagaactccatgggagcatcaaggatttcgcatagccttgccccataaaagatggagttttcaacccaccaaatccacccacagatcaagatttgcgatgggggatccttcctttggagcaaaattaagatcttcggagccaatccagcgctgcaagcctagaaaaatccagagacaaaaaaaaagaaaagcaatttatcagacttactaccaaattaacagcatgttgatgcacacatacctcgaaatacagatcaagtaaaaaaaaacacttcctttcgctaaaaaggccactcgatttccccacaatacctcactaaatttcgtcacgaaaacaacaatattttctccaatcaagccgtaccacacctcgaaaatcccattaaacacacaaagaatcctcgctggaaggtggaaacgaagacaaacgaggaagaaagaaagaagaaagagcagctgcccttgctctgatctaacctttgggggaggaagcagcaaggttctagaaggccccttgtcccttcggtgaggagctctcctgaaggttctggaggcttcgcctcgccggagcttctcgccggaagcgaggaggagaggggagagaaggggaggaggggaacaatggaggaagagagagaggagagaggagggcccaaagaaaagcgaaaacaggggtcgcgggtgtcaacgggttacggatccaaaagtcgtttgcgggtcgcagaatgcaaccgtgtccagtaattttagagatattggggtagtgtattggatccagggagttaactttagtccctatatttagacactaatttaaagtattaaatatagattacttacaaaactaattatataaatgaaagctaattcgtgagacaaatattttaagcctaattaatccataattagagattgtttaatgtagcatcacataagctaatcatggattaattaggctcaatagattcgtctcgcgaattagtccaagattatggatgtgttttattaatagtctacgtttaatatttataattagtgtccaaatatccgatgtgataggacttaaaagttttagtgccatctatacagggtctgaactactcccttcttccctaaatctctaaatgttcgacgccgttgacttttttaaacatgtttggccgtttggccgttcgtcttacttaaaaacttttgtgaaatgtgtaaaactatatgtatacataaaagtacatttaacaataaatcaaatgatagaaaaataattaataattacttaatttttttaaataagacgaacggtcaaacatttttaaaaaagtacggcgtcaaacattttaggatggagaaagtatatgccacttttagatgaactatttgccactgtaaccacatgttatagacacatgtggacccacatgtcattgagataggtgtggcaaatagttaattgctaaatctaaaagtggcaaataattaaaagccccgtaattttagcttcccttgggaaggggtttgtatgtaggtgtacttatgttttcgacgaaaaccgatcaaaattcgtgaaattttgatgtttcaacgttgaacgaaagaagatactaattgaaatgccaaaatggtctttcgagaattcaagtttgaaatagtggattcgacccaaattacttgaaatttgtcggaaaccgtaataccgttaggatttggatccgacgctcaatcagagaggtaaaccttgcttgagataatatttgtttgtttggaaacttttttgggaggaggggagcattggggggtttggtttactccacattatttttcttgacgtttaggctacaatggagacccacgatttagcttggttggtgagcaaattcaggtgccagaagctctccttctaatgaactttctttaaaaaaacaattggttggtgcaattatcttgagaggatctttaaaacacatgaattttataatatttttataggatttagctcaaatcatacacaagtcctgtaaaatcactccattcaaaagccaagttttacaatccggtgctatggactcactcaacccacaaaaccgcactcatttagacccacaattgagttaacaatagacaaaaccatagtattaatttgtacaaactcacactattttaaaatcgccacttagctagatctgccgccagtttctaggctaacattggaatagaactcgagtaaataataaataataaacagatcattacgtttccaaagggtcgtttgcaacaacgtattgagcatcgactagaaagattattctaagcatggagcattaggaaattacgatgaaatgcgaccaaagcaagaagccaaattatccgacgactacttgccgtttggaacggccaaggttgcaattattactagtattcttttctttcttttttttttcttaagacaggttgcaattattcaagagaagattccctcgtcaagtggtcaatcagatcccttttgttttcccatttcaaaggtttagccgtacatgcaatgaagcaaaaaacgatagatattggtctcttactacttcacacatatactctccgttccttaatataagagattttgacattttgcctgtttgactattcatcttatttaaaaaaaattgaaattattatttattttatttgtgatttatttttttatccaaagtactttaagcacaccttttcattttttatatttgtataattttttttaataagacgagtagttaaacgttacaagaaaatagtgaatatcccttatattagggggatagaggtagtatatattctagatattcttctaaaaattcaattcttctctaatgctaagaggatggttggaggtgccgtttccattgtcggaagaagggaccgaggggctgacagagtggtggagataagtctggctagttcttcgaacgggctacagggacgccttcgacttgttgtatatgcttgtttgccgggtgatttagaaagaaaggaacaccaggatcttcgagcacaaaaactacacggcagcacaagtttaaagggctatccgagaggaagtcctggtttagagagaagactgttttcaaacaacgggagtaaagcttcaggaaggtttttttttttttttcgttttcgcttgaggcttttggctctcagctgatcgatccgtctccactgtttaaatttgagttcttctctatctccatttcacatttgtttagcgactgcatacatacttagttacataggatttttgtcaagcacaaaaatagacaattagacagtttaaaaagataacagaagataccatgaatcaatcaaaatatcacacaaatggtgataacacttagagactcaaacaaagaaaaggtaaaacaaacaaacaaataaacaaaatactccagtataattcaccagtcagcatgtcacgcgtaaagtgtaaacagaacagaagataagtatagtgataatagctgttaggatgatgcacacatactgccagttgagaaagcatgtggcatcaatgtaattatggtgccactaactagatggcgaggacaatctggaaaggcaacacggagctgatgagagaaaagtacaccaggcgaaaaagaaaagcatcactttggcaacttttcagcaactggatggactgatgaaagggagaggtggaagaaaggcacagcttaccaactgcagagggcaaaatctaggtatggagagatgcaattggcttattggctccctttcaactgatcttcctctcacttcatgtcatcctttttcagatgagaacagtaactacacatcgacctaaagcaaatgacggtactagtatccttctgggttcttgacaagcacaacatcgaaatataaaagatcacccagagtttaagtacaagaccagtacattttatgttaggaacggagaagctagtcattggtacaacatactattagcaagccattagctgcatccagaaacaacactagataatggataatcggatctacaaagctcatgagcatattatgcaatttttgcttttgagaaggccttcttcctttgggccacaatatagcagaacatcagaacatcaggccatggaaatcctgcagtcattcaaatagaacaacaacatggtgtcttcaatcttatcaaattttatgttatatacgctagtatatattataattattagtgtgttatactatacaagctaatttttaggctattaggtgtatgaacaatttttttttacccctgtcatttcgaatatacaagttcaaaaagctaggcccacaatttagaagttcaaaaagctgaacccgccatttagaagttcgggaagcatgcacattcatccatttatccgtttaagtgttaagcagaaaagaacagggccatctgcatactcgtattatataaaaacataaggggcattatttgcatacttctttattgtgagagaacagggggcacaatgccccgataacagatctattgtgtcccaataacagatctacattcttcagacaagatatgatgcttcattgcttttgctgctatacatcggaaggccaatctcatgcaacaaccaactatatctttgacaatctgcaaaggcttaaacattttagcatttggatgattcacgatatcaatgtgacaatgtcagatgcaattggctcctttcattgatccacccctactttcatgaaataatattcagaaacagttacagggcaccaacatgaatcaaatggtgatagtaaccttcttcatccttgaaaagcagaaaatctacacatcattttttggcatcgatacggagtgcaattttatttacatatggaaaagccaaagtttggtacaacacaccattaattagcaaatcatgaaaatggtactcgtgtacatttttatttaccaagggaaaagatagtccatgtatttcggcatttccattctaatacacttttacttatttgctgaagaaacggtagcaacctgagctgtagctgcgagcagaaatcagattagatagctcttcagtagttatgtggttttgcttttgccaaggccttcttccgcagggcgatcaagtagcgaaacaagactggatatactgcactcatccaaatgaaacaacactgcagtgtgttaacaaatcctacttgttttcctttataaaattcctacaactaccttttcttaaaaaaaaaaactaggttatagcatcgattactaaatgaagtacaatcccatggaaatactacctgtggcaaacgaagccatgaaaaagagattggcatagaagtagttgaaggagaaactccatttgtcggatttctcagatgcctgatattgttgagcctgatattgctcatgcaaaagaaaagagcatttaaacaagattcattatgaaatggaggcgttgatcttcctttctaagttattcaagttaccttcatctccatgaaaggaagagcaatgtagattaggacaacctcacaaaccataccaacaggaaagcatactatgaaggtgctgtacctgcaaagaaatcagtacggaagtaacagcaacatatttttaagagaattcgctgatcagataacgagtttcatttgaagtttatgctacatattatgatttgtttacgactagaaccaacctaagccaaaagagccaggaaggtgtaaatccaaatgactccttcatgccatggaaagaatatctggtaacctgcaaggaattaataattcacttcactctccgaagtgaagaaaatttcataatatttgttcaactaagctcaacacaggaactttcaaagttttttttgggaatacgcaaggagcacattttttccattaagagaaataaaggttatttacaatgaaatgaagagcagcaggggactgaaacaggactcaaagtacaaaatcaaaggtttatctctcacggtctgttttggctaccgaagtcccttctgaggatcagagcagggatggctgaattcgcttggcgccagagtgccgtctctgccgccattcccttcacgatgtccacccaggtcctttgttgctgattgaaaacccggccgttgcattctttccaaatcgtccatgccactagcgtgaccaccgtgtcaaaaccccgacgcaatggctctcgaatgatcattcggctgctgcatagccattggtgaaatgagagttcatttactgacagacactcaggatgtccaattgcccccaacgtccaccaccatagctattagctgcctggactccagacaaccaacaagaagaagcgccgactgttttctctgatgaagcttctttgcagattggcgaacaagcatgaaattgtcatggatgcaccgttttttgatgaacgagctctggttctgtgcgaccaaggagttcagaatgggggctagccggcgggagaggatcttcgtaaatagtttcgcaacgctatgcaccagactgatggggtgaaaatccttcaatttcctggcgtcttgtgttttaggcaacaacgtgaggagagccgtgttcacctttccaaaactggacccgtccatgcgatggagctgctgcaacgctgccataacatcctcgcagatgatcaactagcaggtttggtagaattgtcctgtgaaaccatccggccccggcgctttgtcacgcgatgtatcttttacagcaacccacacttcctcatctgagaacggggcttccaactggggtagaggtttccccctctcgactagaaaatcaaggatgagagcaaaggatcttgaaggagaggagtcgagcaaatgcaagaaccagcacggccttctcgtcaggtgaggttgctacctgaccgttgtgttctagttgttggatgaagttgcgccgtcgatgggacgtcgcatgctggtgaaagaagcgtgtacatgttggcatcaccttcctgcagccacgaaatccgagagtgctgacgggccatcgttcgctccaaggaggccagcgcaaggtatttcaactttaagctcttgtgaaagtatctctccgaaggggacagggcaaacattcctctactctatcaaatctgccaatcagttctcttgccatttccatttgcaatttcatatttccgacctttttgtcgctccaactccttagttttttggccgttgttctcagcttgctgtcaagcctgctgatcgggtcggcaatgtggcaaggcaatgaccaggcatcttgtataacctcatggaatttaatccttcaagcgtgcaccaaaaactctcaaagtggaaccgacctcctctagggtgcgaaagggaaggtggatagaaaaagcgggcaatgatccgagaccgtggacgggagagctttaaggaagcattggggaaatacatcctcctagtcggttgtgtagaacaccctgtcaaggcgttccagcgttgggttcaaccaaccattcgaccaggtgaaggagcgaccattcgggtgaagctcatggagagatagatcattgatggccctgcgaaaatgacccatcaaacgcctgtttaagtttgcattgctcttgtcctgatcttggtaaatcaggttaaagtctccgaccaccacccacggtcccgaatggctgcttcggattgatcgtaactctagtaggaaccgcagtttgtcggcctcgagttaccagtaaggaaatagagtgcgagctaccatcaataaaagaaagatgtgcagtaagggagaattctcccatcgtggggctgtcacaactgacgaccgagctgtcccacgcaaatagagaaagtctgatagattagcacttaggaattaattgtgtagcatcaagttcagacacacgaccgaacaacgagcatctacaatcaccgaccgaacagcatcccggtgtgcgcggtcgtttaaacccatgcacattccagacaaggaagttgaagttgaaactcgtcatgggacgcgattgatgcgacctgacaacgaagctctcaagcggcctgcaccacggacgccggcgccatcagcgcgctagctggcctgcgggccccggcaagctgatgtctaagagatggtcgatactgagctcattgtcaaagatctccgtatactgctggagtgcattattggtcggctgtggaggaagaggcggtacatcgtctgcatcaacctcaagctttttcgccaaaaccacctggcaccttgacattaatattgttggagctccatggagtgcttgaaccacctgccgctcactccggcgaggcgtgaagggggtagcaggcatgaccgatgcaggcggcgttggcagcggcgggagaagtggggcagggatcgccttctaatcttggtgcgcctagagaaggtgatcaatggatccggttgcggagagcccggcggggttggcgtcgcagcgacttgatcagggggcgcctcggtggttggcacgtgaacaccaccatgctgggccggctccagtgcgacttgtcatccgagcaggccgcctccaaccgctggcccaaaggaaggaacgaccacttcatgctgggctggttcagaggcctcagccgcttggtccagtagggtgttgggctgtcccgagcccaaatcatcctggactggtgaactgggcctgactgggctaggcacaaccactggagaaaggcgatctggcccggcccagaccgcatctcccttggaagccttagcctcgactagggatggcaattgtgcccatttgcccgtttacctgtgggtaaaaaccctattagggttgggtttgttctccattttatacccgtgggtatcttattgggtcaaaagttatgcccgatgggtaaatgggcatgggtataggtaatcactacccatgcccgctttgcccgtttacccgcgaaatctaacttacatgtaggctaggagcaaaatccactagaatatataagccacgttctttgttttctacggtttcccttttattccccttattatttctctccccttactctatcgccgccagaggagagacccgacaccgaggcggagaatatttgatgttttaagttcgattcgaacttagaagcttgtagactttttgttccactgcttttgttgtggcgggtaaacaggcacgcccgcgggcataaggcgcccgcgggcaatgggaataggcaaccatccttacccgtcatgtagtaatgggtatacccacgggcacaaataatctcacgggcatgggtatgggtaggcactacccgtgcccgtcacgcccgattgccatccctagcctcgacgccatcccagcgcgtagcctcatcccacatcggaacatgtgcaccggatgggggcacatgctccgcctgccagcacagctcaaaagaagcatctcgacaggggctagctttgcaggggctttgaagcgaatcagaagacggttgtgatctgaacaggggccccacagaagaggccaccgcatcaacatcggtgactgagttgagggaagagacaaggattttggtggtgtttggatcagggactaaactagtccctgtcatatcggatgaatttgaagtattaaatatagactacttataaaactaattacataaatgagagctaattcgcgtgacaaattttttaagcctaagggcatctccaatgtttataatcataagtagcattaaggtgggtcccactattcttatggttattaccacaatgtttgaagtaagagtaaactttaagatgggtcccacaatgtactattctagtacttcttttatcagccatgcaaatttttcatcctcacattcattttaccctattattttattgcttgtggtcaagccataagcttaaagctttcttttgcatttaatgccttatggctttgtttcacaatgtatatggtcactataaaaccttatggcctcttcttatagccacattgtggctgccctaattaatccataattagcgtatgtttactgtagcatcacataggctaattatggattaattaggctcaatagattcgtctcgcgaattagtctagggttatagaataggtttttattaatagtctacgttaaatatttataattagtgtccaaacatctgatgtgataggactaacaagttttagtcccatctaaacagggtctttgtctcccaaactctctcctctgtcgggggaagggacagctgcacaggaggcagctgacgcgaccaggaattttctttcaagaatttcaacaactactgtcatttcaagaagcagaactataataaaattgcatccgaaattcatgatcttccaagtgagtaatttggtgaaaggttttagggagtagcgtatacctcagtgatgcaccagcatatgatcaaggaggtaacaaggatatgagagtgtgtctgcaaaacatgtggacagtgattcaccgatattgtttataaacaaaacaatcctctgattgattagaagataaaatacatggaataggaaactaggatgcagaagaaaagagcactattttgtccttatccatgatgtaattaattgcaacagcttcattacttaagcaatttcagcagcttcggtttatccaatgcctactagagccattatgaccataaatgaaagtatgggatatgctcttatagctgcaacattacctaacatcaatgttttgtcattctaagaagtgctttctaatccagaacttgtttttaagatataaaccttcttataacttggagtaaggtcctgatattacctcagggaagctccacaagatgccccagatcatgaacaaccttccagtaacttgtagaacagtagaaggcactggagacctcaccaaacctttttaacaactcagatacagtaataagcaataatttttttgggggaaataattgagtctaacaggacacttcctttctctctttaggaagaagttaacaagacgattttctcaaaactgaaacttctcttgatttatttaaattccaggctattgtttttgaaacgagccacacaagacagtgcgagtttcatgtattgataaagcaggagaaaaatacaatctatagtcctagaagaccacagacaaaaaaagaaaatacaaccacaccgcgcgtctacaacaaaacccactgcatgagcaaaactgaaggtcttcgagacgacaccttcaagaagggtacgacaccaaaagtgccgctgtcgcctgtcccggagggccaggacaaggttttcacctgaagaaagtaattgggagagacaagaaaagcggcaacaccccaagaggaaaaaacggcacccacaggcgtcgttgttgccggctcgaaggcagagctttcgcccaaaatttgtctctcccaagaactgaactcctacacgctccgcagccaccaccagcgaaaaccttcgacgcatggccaccgcaccggcaccacgccgccagtcaatcgccatggggaagctcgaacctcgacacacaccggctccatccacgcagttgggttggatggggagagggtgagagagaagaatggatgccctctcccccacactagcccgcacgacgtggccaacttttgccgacaaagtcgccgtcgcaagaggacatatgtctaggaaggtgcacgtcgagaggaccgcggctccccctgacagagtaaccgccggctccgccacgaatccgttgtccatgtcacctcggaccaccagaccgttacaccggcgccatgccaccctccgcaccgtgctgttgacccctccgccacagtgcacccgccgtccaaaatgacgcggcactagaacgtccaccgaagcacgatgctctcgccccaaatccggtggaggggatcggatcttgcccgggggaagccagacgcccagctgtcgcgcggcgttggctgcccaccgcagcttgggctccgccgccgccatcaccaccaagctccaccgccgccaccactcagccccgccaccagcccccaccccgccgccagcaccgccaccgtgccctgccaccatctcccaccccgcctccagcatcaccggatctcgcgcgcgtcgcgccatgcacgccgtcgccggtcccgccgaccagccgctgccgccgcctacgcgtctccgtcggctgctgttgccgccctctcgactccgtcggtcgccgtcgccgccctcgcttctccgtcggtcgccgtcgccactgccttccgccgcaaacctcctcggcgtcggccacctccgcctgccggccgcagccatccggggggactggatctgccgccagagtggccggatccgtcgtcccccccaccaacggtcgcggtcgccgcctcccacgccgcctcctgccaggagcggcatgcccctcccgatctggccgcgacagggccagatccacctccggcggagccggatccgccgcatttggcccagatggcgccggacactgtcgccgccgtccgcttcgctcgggtcccgccggtgccccagccgcgcttctcgagagagggagaaggccccgccgccgccatccttgccgccgcacggctttgccggcggctgctcgggcggcggcgaggcggaggggaggaggagaagtttgtggcggcgcgcgcggtgtcgccgcccgtgtcgccctagggcgagtgacgcgggcgttgtactgtcaatttttttgacgctgctctgagatggatatgtaatgtttccaggctattgttggtatcataatgatttcaagtgaatgaaaaagaggctagaggatacatattacactgcacaaatgtgaaagtatagaattttattgtgcgcataccctacgttgtgcagataccagaaattaccatctaccactatctaattcagtatgaaaaatgtatatactttcagtttcagatatgctgtagttttgataaatgtatattctgaacagcatatcttttgttgtgcacacaccagaaactaccatctaccacgatctaattcagtatgaaaaactaagaaacaatatcaaggtagcccttaggcctaatgtgtttgcatgactaacaatttccaccatgaagagcccccagattcttattaggcttttaggctcaatcacgtatcatttttaatcccttctttttgcagtaaaaggttcaaaatgaaatttaatgtggtaccccttgttgaaaatacaacgtattggaaagaaaataagacttattttctttataaagagacaaagtatatctcacctacaatggaatgaagaatctgcgctaccagcatcaccatcaccaggcaaacagcagaacataaaaagtttagcacctctcaatctccatgagcaatgaaacaaaatggttgtacaactgcattcaaatttacagttttactacaataaaggcaacaagagaaaaaaagaaacaaacctccatgattgcagcagtctgcgcgaacagcagatgctgctctacggcagcatacacggcctcatatccgttcttcagcaatgccaatatcatgaaccacgacacctgaaccctgcatgatccaaatcaaagagccttgatcaaaacaacaccctgtacaatccaaaagaattggccagcaaacaaagatgttactccctccgttattttatcttttttttctagtcaaacttttttttagatttgaccaagtttatataaaaatttagtaacatctatcacactaaattagtttcattaaatacaatattgaatatattttaatagtatgtttgttttgtgttgaaaatgttactatatttttctctaagcttgatcaaacttaaaaatgtttgactaaaaaaagtcaaaactaacggatggagtagaagtgagatcgatattcatgcataagtcaggctgtgtttagttcacatcaaaattgaaagtttggttgaaattggaacgatgtgacgaaaaaattaaaagtttgtttgtgtaggaaagttttgatgtgatagaaaaactgaaagtttaaaaaaatattttggaactaaacatggcgtcaacaagttaccatccgatgaagacaatccagttgtagagagagaggtagagcctccgcacccctgacgcattccctgccattgcaggaaatatgcgagatggaagaaaacgtcgagatggctgatggctttgaccgggatactctactcctccaagatgtacaagcatcacactatcgcaacatcagaagcaccaagatacaagtttgagcatcttaccggttggggattatgtatttatggggctatgggatttgattaataaccacataatttggatcaaatcagattagcagcggacagttggcagttaatgctactaaaactgccagctaccccgccaatttcgtccatgtgatcaaaacatttcgggtgtgtttggataatgggaaatgtggggtgggattgagattgagaaatgaatgaagggttagtattaaatagaagagggagaatgaatggttaagatttaaagatgtcttttagtgggtgggaaattatttccctatcccattagccaaatagggccttcgtcacaacaaacaagaacagaacataataaatactagttggcaccccgcacaaatcaatgctttaaatgattagatgtaactctgtgtatatacaaaatagattataatgcggctttttatatagcttctgttataacaatacaattcatgttttattttttgaaacatcattgtgtattgttatgatatatgaaagttattttcatgtacaatttggatatcgtcacaataaggttgtgtagcacttatctgcttcatctcaagcatgtttcaaaaatgagtttggattaatgatatctaattattgtatgttatccaattgtttataacaaaacaaagctcacatcttatataataattggagttgtattttttttttgaaaaagagtagtattatctttgaggatttggatgtgcacactggataacaatgtcacgcgcgattatgagctaaagggaggtgaatggatgaataatcaatgattaaattagatggatgagtagctagcttcttgatccaacggttgataactctatactaatgcgatccaatagcttaaaattattgatgatgtggctacttgcatgtctttctttataggagtaaatgtttcttagtgggtactaactctatatatatatatatatatagaaagataggatatcatctgttgtttctcattgtgccttttcttttctcattttcattttcaccggtgtaaatgtaagccatattatactcataactaggtggcaggaaaagttcgttaacaagcttgattcaaaggtcatgttctttctttttgacggaagaaggtagagctggctctactttatagccatttcatctatagaaatgaggtggtacaaagttaaaaaagaaaaagaacaaatagaaaggaggagaaaataaattacaaaaattacaagtggcatttacatattaaggatctaattgtaggagttgacaccaagactcaatcttagacttggtaattcctttagctcgatgagtccatagttcgagggagctctgtatttgctgcagcaagaggtgtagcgaagtgtgaagcttgtcgaaaaccctgctgttgcgtgctttccataaggtgtatgcacaaaccgcgaaccagactggtccaataccgtgagttgacaagtttacctggtttgccttgattatttctttccataaggtgtatataaggtcatgttcttttaatcagtcctcggaaaagaagttcctttactatattctcaagaacagataaaaacatgtatagatatgttcgaaaaggaaaaagtataaagaagcagctcaatagcatgtatgaatcgaggtccagttaacatcaacaaccatcgtaagtggtaacatacatagacatgtactacttctgaagaacagttcacattaacaactccccaacatcgaactgctaatactgtttatctaattcatgtgttaagtgttaaaaaatggcttcaacttagaccttgtttggtaggactccaaactccaactctcaactccaatggaatagaaagtgtctggctagattggttagctccactccaccacatcccttgttgtcattttaccgaacacctggtaggcgtcgcagctgctgctcagcccatgctccaccgatgccgccgcctgtcccaccgtcggcggtctgctcgccggtcgccgctgccgccgaccccgcacgcgtgccgaccgcgcgccgccgccgccacagcacgcgcgccggccgcgcgccgccgccgccacagcacgcgcgccggccgcgcgccgccgccgccacagcacgcgcgccggccgcgcgccgccgaccctgcgccaccgctcgcgcgcagccgccgccgccgctgctcagcccgcgccccgtcgccgctgcttgaggccgatgcgtcgccgcccgccccgcagccagccgccgccactgccaccgcacgagcgctgccgccgcgccacccacccgccgctgccgacgccgacgccgacgccgccgccgccgccgccggcctcgaccgaggaaggaggatgaggagagagaacgggaggagatggggtaggaactaggaaggggtagttcaatggcattttggtgtaaatacactgaaattttaaagggtagtgggtcttttggggtggagtagagttgtagagcagcaaaaacccagctccacccccatagtacaattttgtggagcagctctgccaactccgctcctaaaaatagagaatctggactgtttggcacagctccggctctagataagttgtagttgggagctgagctagagcttggctctgattatggaaaacatgtgcgtttccctccttcaaaactatccagcagacaagcaacaccagagtgtcgaaagcgcccttgtagctggtccgaagtccttgccgcgtttcagccggcagttggaagccaattccagcccaacccttgatcatagggcaggaaacaaaaagatgctcacagtcctcatcgctgctcatgcaaagtgagcaaactcgctggtgcaatcatccgcgcttactcaggttgtcagccgtcagacaacggcctttctccgccaactacataaaaaacttaactttgacggcgctctcgtatgccaaataagtttaccacaacacgccaaaatgagcttagctttaacgtgaaccaattgaggctttaacagttgactagaatcccagattcctcagccaattgatgtacacgcatcagaagctcttaaatactatcagcatcttgatagtgactagctcggatcgggattggagtcaagttagtcactgtccaaattgatttggcattgcagtggagatagaattcaacatcttggtagtgacttgctcggattgggattgtagcaatcaatttgtagccacagttcaaattgatttggcattcagtggagatttaactggacagatggttgagcagcgcacagttgaacttattgccactgcaactgctcgccaaactgccaatatgattcatgtgaatatgtgatcagaaaattgatttggcattgcagtggagatagatttcaacatcttggtaatgacttgctcggattgggattgtagcaatcaatttgtagccacagttcaaattgatttggcattcaatggagattgaactggacagatggttgagcagcgcacggttgaacttaggccctgtttagttccaaagtttttttttccaaactttcaacttttccatcacatcaaaacttttctacacacataaacttctaacttttccgtcacatgacacatcgtcccaatttcaatcaaacttccaatttcagtgtgaacaaacacagcctattcccactgcaactgctcgccaaactgccgatatgattcatgtgaatatgtgatcaggaaatttcattgcaacagcgaaaagatagcacgtgattacaagtatacaacttctctttctcattcagcttcgttttttccctgttcttcttcacctgtacatggagtacaattttttggcatcatctaagcatcatttttcggcattgatatggagtacaatttttttcttcagataggaaaaatgcttatgtttggtacaacacaccattagcaagtcattcttttctttaccaagggaaaagataatccgtgtattttagcatttccattctagtagtaacctttacttctttattcaggaaatggtagcaacctgagccgtagcttcgataagaaatcagattccatagctcttgagtagttatgtggtttttgcctttgacaaggccttcttccgctgcgcgatcatatcatatggtgaaacaagtatggaaccactgcattcacgaaatgaaacagcaaggcagtgtgccgtcaaatcctagtttgacaacaaccaactacttcgtccgtttcatattataagactttctagcattgcttatatatatatatatatagagagagagagagagatatatgtgtgtttagatttattaacatctatgtaaatgtgggtaatgctagaaagtcttataacctgaaacagaggtagtgtttctttgacaatctgtaaaggcttaaacatttcagcatttggatgatccacgatatcagtgtgacaatgtcagatgcaattggctcctttcactgatccacccctactttcatgaaataatatccagaaacagttacagggcaccaatatgaatcaaatggtgatagcaaccttcttcatccttgaaaagcagaaaatctacacatcattttttggcatcgatatggagtgcaattttatttacatatggaaaagccaaagtttggtacaacacaccattaacaaatcatgaaaatagtactcatgtccatttttatttaccaagggaaaagatagtctgtgtagttcggcatttccattctaatacatttttacttctttgttcaagaagtggtagcaacctgagctgtagctgcgagcagaaaccagattagatagctcttgagtagttatgtggtttttgattttgccaaggccttcttccgctggacgatcaaatagtggaacaagtgcgggtatactgcactcatccaaatgaaacaacaaggcactgacagtgagttagcaaatcctacttgatttcctttcagaaaatcctacagctaactttctttaagaaaaactactaggttatataatcaattactaaatgaagtataattgaagggaaatactacctggggcatacaaagccatgaaaaagacagaggcatagaagtatttgatggagaaattccatttgttgggcatcctaaggcagtatttctcagatgcctgatattgctcatccaaaagaaaatagtttctaaacaagattgttatcaaatggaggcggagctcttcctttctactaagttattcaaattaccttcatgaaaggaacaacaatgtagactaggccaacctcactaaccataccaataggaaagcatactatgaaggtgctgtacctgcaaagaaatcagtatgaaaataataagtacttatttttaagagaattcacagataatgagtttcatttgaagtttgcgctacatattatgatctgtttacagctagaaccaacctaagccataagagccaggaaggtgtaaatccaaatgactccttcatgccattgaaagaatatctggtaacctgcaaggaataagtttttttttctacaaagtcatgctctgtagtgaagaaattttcataatctttgttcagctaagctcaaaacaggaactttcaaagcttggcattttctttcaggaaaacaactactatcattttaagaagcagaattataataaaattgcatccaaaattcatggtcttccaagtgagtaatttggtcaaaagttttagggagtaacatacctcagtgatgcaccagcttatgagcaaggaggtaacaaaaatatgagtgtgtatctgcaaaacatgtggacagtgattcaccgatattgtttataaacaaaacaattacttgatgagaagttaaaatacaggaaataggaaactaggatgctgcggaaggaaaggacactattttatccttctccacaatgtgattgcatcagcttcattacttatgcaatttctgccgctttggtttgaccaatgcctactcagagtcattacgaaagtatgggatatgttctaatagctgaaacattacctaacatatagtatgttttgtcattttaagaagtgctttctaatccagaacttgttttgaagatagaaactatctaataacttgggagtaaggtcctgatattacctcagggaagctccgcaagatgccccagatcatgaacaaccttgcagtaatttgtggaagagtagaagacactggagacctcaccaacccttctcaacaattaaggttacagtaataagaaaatattttttgggggggaactaattgagtctaacaggacacttcctttctctccttaggaagaagctaacaagatgattttctcaacattgaaacttctctagatgtattcaaattccagactattgctactatcataatgatttcaaatgattgaaaaagaggctagaggctacatattacaccacacaaatgtgaaagttagaatgtttaaaaatatatatcattattttaatggaaaatcgtagaaatattgttcagttgtcaaaaatcatagaaatagaagcatgacggtcttgggttgtttgatagggaccttctaggggaggccgacaagcccatatcagacacatgtggaccggaaagtctgtcagcctaactccacatagtcccatcaaccagctacaaaacgacaggacctgccacgccacctatcgatcagctgcagactgacctggccaccacaaaacatatcggcaaccgcaggtctacatggcacatgcatggaggcctgtcgtccactgggaagccgattggtccacatgagggcctgtgcatttaaaccgtgtatgcagctagtttcaactccctgaggccatccccaaccctccatgtcatatcgtgtccatagcattaaggccatgtttgattcagcttaggattattataatctggattattaggaataagctaaaacaaacatatagctcattatgatagattattacaatctataagccatattactataatctagtaatccactctaaaggtgcttttttagattattgggtggctaacaactaaaaaacaacttataatccagggaaacaaacagctcgcagcttattctatggcggcttattataattcagcttatagtaatatggttcaataatctagattacaataatcttaagctgaaacaatcaggacctaaatacattgtcacataagcaaaaatttgatgtggcaagagagttaatgaggaaagaggtaaaaagatgaagaaaccatttctcatgcaaaaaaccatctctacacaagaatcaagaatgaaaacaagaggataggtggataaaaggagagagaagagcgatgattggatgagaatttaatttgaagacaccatctattggatatatagtttctatacatagtatctatatgacatggtaagtatggaaactacttaatagtttctgggttggggatggcctgacacatgcttgaatcaggtaggctagatacttcctccgtgccaaaatgtaagtattattgaggttgtcacaggtataacgaaagtaggtgagaataattatagaaagtgtgtgattggttgagaagagaaagtagatgaaacataatggttgtgattggttgagatgaggaggtaggtggggaaatagttttattttgggacaaggcactgtgcaagaaatagctacatttaggatggaggtagtagcattttaatccatgagtgcatttaatccgagtgtgctagcagaccgctccaccacgtcacttttttgaattggcatagggcctgcattatttttggaaggtcgcctactcccgacgagggagtatcgatcagctgtgggacgacgaatctttgctgttcttcggtgggacgacaagctacaatttccaccatgcagagccaccagattcatgtaaactataaagtgtttacatgacttggatttttctcacgccagctaagcctgtcggcctcccccagttcgacaagtcacctattgagcaactataattcaatagggttctatttttgtgacttccaccaatcgagcaatatttctgtgattttcctttaaaataatattatttttaaattatgcatgttttaataaaaaaaatatgaaagtctatatacattcatcaaaactacagcatatcttttgttgtgcacataccagtaattaccatctaccacgatctaattcattatgaaaaaccaaaaaacaacatcaaggtaacccttagacctaaagtgtttgcatgattaacaatttccactctgaagagcccccagattcttatgtatcttttaggctcaatcacatatcatttttaatcccttcgtttgcagtaaaaagtcaaaaatgaaatttaatgtggtaccccatgttgaagttttgtcatcgacatattatatgtttttctgcaaaaaaaaagacaatgtattgggaagaaaataagacttattttctttataaagagaaaggatatctcacctacaatggaatgaagaatctgcactaccagtatcaccatcaccaggcaaacagcaaaacaaaaaaagtttagcacctctcaatctccatgagcaatgaaacaaaaaagttgtacagctgcatccaaatttacagttttactactataaaggcaacaagagaaaaaacaaacctccatgatggcagcagtctgcgcgaacagcagatgctgctctacagcagcgtagacggcctcatatctcttctccaacaatgccaatatcatggaccacgacacctgaaccctgcaagatccaaatcaaagagccttgatcaaaacaacaccctgtacaatccaagaattgaccagcaaacaaagatgctggaagtgagatcgatattcatgcacaactcaacaaacagcaggcaatagaactgaccatccgatgaagacaatccagttgtagacagagaggtagagcctccgcaagactgacgccatcccctgccattgcagagatatgtgagatggaggaagacatcgagattgctaatggctttgaccaggatactctactccaccaatcgatgtacaagcatcacactatcacagcatcagaagcaccaaaatacaagtttgagcatcttacagcagcttcttcgggcatggttggggattatggggctatgggatttgattaataaccatataatttggatcaaataagattagcagcacacagttggcagttaatgctactgcaactgccagctaccctgccaattccgtccttgtgatcaagatactttgtcacaacaaagaagggcagaacataataaatcatcagccgttgtttcttattgtgccttttcttttctcattttcattttcacctgtgtaaatgtaagccatattatactcataactaggtggcaggaaaagttcgttatctgagaggccacaagcttgattcaaaggtcatgtttttttaatcagtcttcagaaaagaagttcctttactatattctcaagaacagataaaacatatatagatttgttcgaaaaggaaatggttgagcagcacacagttgaacttattgccactgaaactgcctgccaaactgccgatatgattcatgtgaacatgtgatcaggaaatttcattgcaacagcgaaaagatagcacgtgattacaagtatacaacttctctttctcattcagcttcgttcttttcctgttcttcttcacctgtacatgtaagccatttcataagtatgctttatgcgtgaaagacatgtatagatgcctaagagctaactcaaacagctgaacagcttatactggatacacatcgatggcctgttaacatcaacacagttatcagttatgagaattaggaagaggagcaccatcgacaatttttcaagtgataggacaattgccaaatgtcgacaatgagttcaacaaacgggacagaaggccttcatccccagccggagaaacacaccgaaaacaacacagatccactaatttcatgcagaaattgattcacggagccttcatctgcatgttcatgcttgcactgtactggaataaatatttccctctaaaaacctccacgaattaactagattcagtagacgaaccaactgaagattcagtagtaagaacggtaccctcttaccccaccacatcggagccgccggccgcggccatcctcgccagtggcctggcctccgaatgcgtttcgaactcgtcggccggagactacgggcaagagctcctcgtcctcccgccacaatccactccgcgcgtcggtagccatggatggactacggagccattggctcgaacaggagaggaggagggagggggtgggggcagcacggctgcgcgagcgagagtctctcgccggcgcgccatggaggatactggctcgggaagccagagacggagaagaggaggggattgcgacggcgagcggcggcggcggcggcggcgggtctgccaacccatgaggctgacgtgtgggccccaccgcgccatggcccacctgtcagtaataccgacaatgggctccacgagacgttcgatcacagatgtgcggcacagatgacaaatttgactccacaccaatatgggctgtgggccgcgtgcgactggaagcccaagttatgggcctaaattctgtatgggccaggaatgctactgccgtatttgggcctaatgctgacgataggtagggtaattaggggcttgtttactttgatgtcaaaaaaaaccttaccaaaatttggcattgttgctaaaattttggcaacttaccaaaattttggcaggatttcttatgtagttaccaaaatttggtagcaaactaaatgtaaccattttttttttgtaactttactaaaatttggtaaggttgaaaatagcatctaagtgaacaggccctaggtttcttttgtacggagtatttattattttcttttcaaaaaggtgttcttttaagaaaattacttcaccgggtattttgagtgcacaaatagaacatgtatgctatgataaaaataaaagtggcattgtttgcatactccttccatcctaaaattgagcatcacggtactagagtagacccattaacaatagttgtgtctaatgtagtactattagattaatatatttaaagacggaggaaatactttattagtattacttatgagagcatagggggcacaatgctccaacagtttttcaaacaaaagatatgcttcactgcccttatctgctatcgacatcagccgtaccgtgttgaccgaaagtcattgatttttaccaattttggatcggttttcagtaaactagcgaggaacaattttcactttaaaaacgaaaaggtaaaccctgtctatacattggaaggccattctcattcaacagccaactatggcttaacaatctgcaaaaaaaaaaaaaaaaaaaaaaaaaaaaaaggctttacacatttgagcaatcggatgggtccatggataagagtaggaagaaatcaagaatgatcagacgcaattggctcctttcactgacagttactgcacatcaatgtaaatcaaatggtgacacttcttcttcatccttgaaaagccgaacatctaaacatcatttttcggcattgatatagagtagtacaattttttttctccggccgggagtacatatttttccttcagatgggaaaaaaaaaagcttatgtttggtacaacacaccattagcaagtcattcttttttaccaagggaaaagataatccgtgtattttagcatttccattctagtagtaacctttacttctttattcaggaaatggtagcaacctgagccgtagcttcgataagaaatcagattccatagctcttgagtagttattgttaaagggtatatgtgtcttttcatctcttgtatacattatatgtggtccttgaccctaagtcaatagtacacagcaaattccccaaatttatctatcactggtatcagagctcatgggctgaaccctatgtcacaccctgaagtttccccccttttcttgctttaaaaattggttaaataaattgcccgaagaaattatcttaattaacctagagctaaatccctagttaataaatgcaattaataatcggaaatagcgtggtggaatttttcttgagttccccatgctccaatgcattaataagatttttagtggaattttcagagccttggaaataattttaaccaattaaaaatcaccaaagtgcaattttaaatcccaggaaaaatcctttcttctttttctttttcttttccttcttttttctctattgggccgtcggcccactccctcccgcgttcagcctccttcctttgggccggcccgtttccctttcccctctctccgggacgctgacaggtgtcgtccccttcctccagccgcccgccccacgacggcaaccgccgccgaaaccgtccgcgccgccgccttctccgctccacgccgcgcccccactccgcgtccccacgtcgccgccctccccgccattcccgcccgcacgcgcgcccgcaaatgggcgggattcgatttgaatcccccccactctctctctctcccccacgtcaccggccaaatcgagggggtttcccggccatgtccgcccctctcgagcccctataaagcttccccgtatctccctctcccttttccccttttcgccgcgctctcccgtgcctcctaccgccgccgcgccgctcgccactagagccgccgcttgccgccacctccagtcgcgcgccgcagccgctagagccgccgccgcgccaagccgccgccgccattagcattgccgccgcgtgagccacctcggccgccgctcggtttccgctaaaccccaccggagcccggttctcctcgcacaccggtgagctatccattctccttcgtctccggccaacaatggtggccgccgtggtcactctctctactcctaatccttctcaactccctccgtaggtgccgccgccgcccgtccgcccctcctcatcgccaggtcgtcgccgccaccttcatcctccgctccggccgccatactcgccggtgaggatcccctcctcctccctcttcccctctctctcgtttgcgccgcctctctccacgcgctcgccatcgccttcggtcgatgccgccgtcctgtaccccgtccgccgtcgcttcccgcgccgccgattgccgtcgccggcgaccgtgcgcgtcgccgccggttgccatggccggccggccggttttgaagccgagccgagccgtgcctagccgccgctgtgccgtccgatcggcctcccggccgatctggaccgtcggtcccgtggaccggccgtggaccacccgcgtggtcccggtccacggtagaccggccaccttgagccactgcccgtggggcccacatgccggcgcccccttcctctcccctttgagccgctgacccgtgggccccgcctgtcggcgccgccccccccccccccttggatgacgtcagccctgggtattattgcgcaataattaattaaggactttttctttattagtaaaaacacagtttatcttctaaaattcataagtaattcatccgagctccgtttaagtccattcaagtctcagtaaatcaagaaaaatgcaaagaatccattaaaaatggttttgtttcctgtttcagtagtcttatagcatgttttgcttgtgtgctttgtttgtcgcgtaggtttcggccgtttcgtcgatccgtggtttctcgaagacgttgctgaggtctcatcagttcgagagcaaggcaagtcatgcaatacgtttgatcatattgtacccaatttaccaatatcccgcatttctattaaatgttgcattcttttacaatgtaatgtgggatgggtcctattcctcagccacatattggttaccttatgccattgataacttgggtatcaaaatgactagatgttggcttaggaaatgcttagccatgcttagttcaactaggacacaaatggggatcacattattacatagactctgactattggcataactttagattggtgccaccgcaagggtgtcagttaattaaaatattctgaatggcgggctgtgagtgtatggttttgctggtcgcacccatggcagttaaggaccggttcacgggaaaccctgggagacttaccgtgcttaccacaagcgggagtaggtaactgcttgatctgaagtatagctcgaccctttcctaggcaccggtggcgagggtaggcgtgatggagttgggtcggccgaggtgttcggttgtccagctgccggattcaccgcggcgcaagaggggaccgcccactgccttttgaggggtgggggtgaaatcttagcgtggtgtggatggttaggggagggttatgtggagggtcttgtcacgatttccccctttgcagtatcatggtgatacttcggggcatggcgacatgtgtggaatcgtgtcttgtgggtacagttgtacacctctggccagagtaaaactattcgaatagccgtgcccgcagttatgggcgatcaaccagattcaccgtgattagtctcacccctagtttagcttaatgaactggtgtagttcaggtggttggttgggcctgttgcaacgtggtgtagcgttggacagtgattggttaatattgattaattactacaactgttttactgctttcaactactgctttgaaatgcctgctttatgcaaaagaacccctagcttcctttggttatatcctgcatcatacctcatcttccggtatgacttgctgagtacagtgggtagtactcagtcttgctctcttttcccccataccagagttgaagttcttctcagttggagccgtctcagagaggttggtttcgtcgctgccgtcaaggtttgcctgtggagtggagttgcccgctgctgaagtcaagcttcccggtttagctcgcttttatctttcccgctgcatttgtaatcttttatatttttgtaagacgtgggtctgtatgtcaacaattgtcgtttatgtaccctggctggtcctggatagggatttaatgcacattcagcttagaaattctggttcgagaatttctgggtgtgacaccctagccctcgatccccgtcgtccgccggcgctccggcttgccggcggcggctccctatcgggcaaatcttcttcacgtcctcctcatccggatcagcagcgggattcacagcaagtcagtgtgattcgtccatcacgcgtgagtgtatcgctcattgcagccgctcgtcacgcggttcctccgctcagccgttgttgctgctcttccactactgctgccgctgtgtgctgctggtgctaattcaggagacaatacatcaagtcttgcaagcaagtctctgtccagtcaatttgtcaaattttcttctgctggtcttgatggcaacatccgacccctttcttggaggtggagctttgctctccacggacattaagctaaatggtcaaaattatcaagaatgggaactttcagctcgtatgcttttgaggtcgattggtcaagcatctcacctcacagatgatcctcctgatgagaaaacggatgcaactaaaattaaggcgtggaaaacagcagatgatcgtgttatgggattcatattcatgagtgtagaggtgcctattcggatgagtttcagggatcactcaaccgctaaagagatgtgggactacctcaaacagaggtacactcaagaaagcggagctttgcgtttttccttgctgcagaatttgcacaacttacaacaacaagatcagtccattgaagaattttataatgcctttactcggttgtctggacagcttgaggcacagactccaaaaggtgcttcaggttgtgcacaatgcaaggcgagagagaagcatgatcaagaaaatctagtgtatcaatttgtcatgagactttcctctcaatttgagtccattcgagttcagttgcttggacgtcctacacgtcctactatggcggaggctcttgcagatctaatcgctgaggagacacgtctttgttccttggacactactcctactcctgtggttactcacaatgtcatggcagcacctcagcgtgttggagctcctatgggcgggatccctgaattcagttccatcgccaaaagtgatcgtatttgctctcattgcaagaaggttggacatatttccgatgattgcttctatcttcatccagagaagttggctgattatcgagctaggcgtgcagcggtcccccgtcctcgtgcgacggctagtgctcctgttttcttggatatcactgctgctggtccttctagtaccagtgctggtggcagtgcctctagcgccgtctcatgtgctcctcagtcattggttgcaagaccgtcttaccaagccagtgattggtcatggccatcaccatagttggtccccaaggcctctgtcacgccccgaactagtaccgaccggaactagcccgtgacgctccaaattaacctgttaatcgataccagtcccaggaaacagtgctggtatcacaggaagacggatcatcacagcaatagaggtctctttattatagagtagaggtacagtcatgttgggctgcggacagatcccgagctcacaactgcattacaaaagggaaacggaagccaggacttggaccaaacaacacaggcgcgacttgggaactaggcagaaaccctaaaactcatcgtagtcggcttgctcctggaagaactcctcattagcaggttccgcttcatcttcttcagcaactgggggagggattatttatatagagcaagggtgagtacgggagtactcagcaagccatgggaaataagtgtttaatataggtttcaaggaaaggctgttgtttttgcaattgattttatttgaactcttttctgaaaacaactaagtgagtgcttctcaaacgacacggatgagacagtgcgtctcgtccggtcggagtatgtgcaatgtatcagtctttagaattgaaacaaggttggcacccggccaacaacttttcaaacggccacccgggccaacaactttcaaacggccacccgggcctagctgatcccatcagctgcagatctttcaaacatcgaacccctttccacaacagcaatttcacaagcaagagtcaaacaagactacgctaggaatcacctcacatccgcccatgaccgtgggcacggctgttcgaacagtttgttaacctctgcagagggggtacactttacccacacgacattactaacccggatcacccagcccgtggggattagccacgtcgggagacctccaagctttcatgacaaggcatttccaaagccaacacaggtttatcatatgccgacgagaggggtcccagaccaacaggttaggtcccagaccatactgtgccaggaagcccaggggtcctccccgacaccaccccggcgaatccacatgtctctcggcatcaaggctcccttgataagctagttactcagccaggggtgtcccattccacccatgtggtcgtacttgtcttatgtttggatgaaattccaaggaaacggtccttaagtgcaagagcgggaaaccgtacacccggtacgttccccggtccgcggttttggaaattcatttagttcgcaagcaccgacccaggtgtcgggttttccaagtcttttgtaaaacccaagttttacccaagttgttattcagattttaagtttggaggcgtccgtcgatacttgcacaggatgcacgaatatcgagacgcaactagatggttacaaggggacatgacataacaattaacaaggaaggatcaaatgcaacaaattaggtaggtccgccaatctgccttgcagacgggacaacagattaagtgcgatcctatcaatgcataatatttttcaagtaacataattaaatttcaaatataggctcaagatgttcaaaggtggcttgccttgctcgagatctggagcttgatcctcgaaatcctcgcactgcgggtcttcgggctccgaaactacacgcgaaacgggacaactcaacaaacggcgaaaataaagccctattaatgacctctaagcatgccattagatagatctcgagatttgatgaattttggaagttgaacggagtcaaacggatttacggttgggaagatattgaatttctaagattattggatttttggtctaaaggaaaaggatttaattaaatcctttttgaaaaaaaagaaaagaaaagaaaagagggagggaaaatagacttttcctcgggcggctagggcgcggcccaagggaaatggagcggaccggcccaaggcggcccaagcgcgcgcgcgggggaggggaggagggagagggccggtggaccgggctcaccacgcgtggtcccaggtgggagccgcttgtcggtgacacggttcaccgtgcggagcgagcacgcggcgcacgcgcgtgggcggggaagggatgtggtgcacgcgcgtggttcgcggtggaatggatgcggcgggcccacgcgcagcctcacggctcgcggtggaacgcgcgcatgggaggggctgaccggggtcggcccgacccgattttggccgagctggcgccgacgtggcgcctacgtggctgccacgcgggctggcgggaggaagacgaaggcgccggccgcgaatggacggcgggcggcggcggtttctccggggcgtcttgcgacgatgaggggtgacggggcgtacaccgggatgacgagggagaatgagagggagcgagccaacggcttggattcgccggagggagtccgtcggcggcggattgcggcggcggtaaccggcggagagcaaaaggggaaaacggcgacgaggtcacgaggggccaattcccggtggtgagagcatctacgcggctacgggaatccgttgctagcgtcggattgagcggagctacgccgagcgaggccggcgacgagcgggtgctacggagcacgggcggcgacggcggcgagcacacggcgagcggcggcaatggtcggggcggcgccggcttgctacggggaggctactcgtgctactaccgaaaactaagggggagagatggagcgaggagggagaacgaagggaggcactaccgagatgaggaggggcgctgtgacgagaggccgacggctcgggagtaatctctccggcctcgggccggggaagaggaaggagacgagcgcccggagtccccttccgcgtcctcgctcgtgccggctcctccgacgcgcgcaacgacgaacggcgacggcgaaacagaggggcggcaacaatggagtggaggcgatgggacaacgagagaagaagagagggagggcgcccggggctttaaagggcggcaatgtcggtttggaaaccgactttgggcggtcaaggcgcgagctggcgctcggcgctcgcgtccaaatcggcgacagggcggagggaggatgacgccggcgggaggaaaaaggggaaaatgagggagagaaagggggcttgcctccttgccgctttgggaaaaggaggaggggagcgggggcgtcgcggcagagggaggagggctctgcctccgtcccttggcggcttgcgcgcggagtggcggggctgaggcgatgacgacggcgatgacggcggggcggtgtggagcggagcggcgacacgggcgacaggcgcgggcaggcgctgacgacggcggcgaccaagcggtcggccaccacggcacgcgcgcgcggcttgcaacgggagacgcggcggtttgagtggcgcggctcgggcacgcgcgctggctgcggggccgagcggctgcaggcgcggcagggcagcggggccgggcggcgcagacggcgcaggcgcgacgcgggcgacgaccacgcgggcgcgtgcgcgaacaacggcgcgcgggggccgggttcgcgggcgggcagctcgccagggatgggcacaaggagagcgagggggagggggcgctcgcgcacgcgcgggcagagcgaggggaagggagcgcgctcggcgcgagcggtcacgcgcacgcgcgcgggcagagcggaggaggagggagagagagagggagagagagagagagagcgccgggagggaggggggaggtgggccgagagagattcggcccatcgaccccgggggaggcaaaatagacttttgtggagggatttgatttggaaggatttggattcgggattgaactcgacgatagatcggggatttgagatctgagatggcatggacactagacaacaagcaaggaaacaatttcgcaattagggtttttaagagataatttttccgctaggcgccacgacggaacgggcgctacagcctctaagtgtgaggtcatcttcgcctaccacttttgctgccatctcctacttgttgcttttgcttgctgtttggagaaaaaggttgttgctgctatagtatatatctgtccttcagttcagttcaagtcttctgttatccgtcaaatctatccaagtcaatttcatatcttcaatttgtctaagtgtatgagtcttttatatcatcaccaacaacaacagcagctcccaccggagctggattgtctcaacctactccaaatctttgaagagccgaagaacaatttgtgaaggcttcatggtaccaagggctgaagaacagtttgtgaaagcctcgaggtccacttcattgaggaggggatgcatctttcctacttaatcatcaagacttacatgcttcgacaatatctttaagcttatattttggttttagtttagttgtaccttccaaatgtattgttgtatacacattgcatttgagtgggggtgttaaagggtatatgtgtcttttcatctcttgtatacattatatgtagtccttgaccctaagtcaatagtacacagtaaattccccaaatttatctatcactgtaagagttatgtggtttttgcctttgacaaggccttcttccgctgggcgatcatatggtgaaacaagtatggaaccactgcattcatgaaatgaaacagcaaggcagtgtgccgtcaaatcctagtttttttttaaaaaaaaaagatacttgattatatcatcaattactaaatgaagtacaattgcaggaaataaaatactacctgggacataaaaagccatgaaaaagacattggcatagaagtagttgaaggagaaattccatttgttgggcatcctaaggcagtatttctcagacgcctgatattgctcatgcaaaagaaaagagcatttgaacaagattgttatcaaatgcaaccggagctcttcctttctaagttattcaaagttaccttcatgaaaggaagaacagtgtaggctaggcaaatctcactaaccacaccaacaggaaagcatgctatgaaggtgctgtacctgcgaagaaatcagtacgaaaataataagaattacttttaagagaattcaatgatcagataatgagtttcatttgaagtttatgctacatattagtatggtttgtttacaaccagaaccaacctaagccataagagccaggaaggtgtaaatccaaatgactccttcatgccatagaaagaatatctggtaacctgcaaggaatcagtaattcacttcattctctgaagtgaagaaaatttcataatacttgttcaactaagctcaacacaggaacttccaaaagcttgggattttctttcaggaacttcaacaactactgtcatttcaagaagcagaattattccttatcatcttataataaaatttcatctgaaactcatcgtcttccaagcgagtaatttggtgaaaagttttagggagtaacatatacctcaatgatgcaccagcatatgagcaaggaggtaacaaaaatataagactgtgtctgcaaaacatatgtggacagtgattcaccgatattgttcataaacaaaacaattacttgattatagaagttaaaatataggaagtaggaaagtaggacgcagaaggaaagagcactgttttatccttttccacgatgtagttgcatcagctttattacttatgccatttctgccgctttggtttgtccaatgcttactcagaggattatgatcataaatgaaagtatggatatttctaatagctgcaacatcacctaacatctacttcccccttttcatattataaaactttctagcattgcccacattcatatagatgttaatgaatctagacatattgcccacattcatatagatgttaatgaatctagacacatgtgggcagtgctagaaagtcttataacctgaaaagatagtatgttttattattttaagaagtgctttctagtccaggacttgtttttaagataaaaactatctaataacttggagtaaggtcctgatattacctcagggaagctccacaagatgccccaggtaatgaacaaccttccagtaatttgtgggagagtagaagacactggagacctcaccaacccttttcaacaattcagattacagtgataagcaatattttttggggtaaataattgtgtctaataggacatttcctttctctcctaggaagaagctaacaatatgatcttctcaaagttgaggcttctcttgattttattcaaattctagattattgcttgtatcataatgatctcaaatgattgaaaaggaggctagaggtaagctgagctacatattatactgcacaaatgtgaaagtagacacattcaccaaaattacagcatatcttttatcgtgcacataccagaacttaccatctaccacgatctaattcagcatgaacaactaaaacacaacatcaaggtagtaaaccttaggccgcctaacaatgaagagctaccagatggtaattagccttttaggctcaatcagaaatcctttttagtccctttcttttgtagtacaattttaaaaataataataatagaatgcggtagcccatgttgaagttttgtcatctaggcattgaacatatcagtatgctctacaatccagattaagggttggaagcctgtttccataaagtttgcacaggacagacataccaagcaggaaactacacttctcagttggcaaagatgacaaaaaacaacattcagagaagggggaaaaaacaagtctcttttcaacgaaggaaaagaaaaaaagatttctcacctacaatggaatgaagaatctgtaccaccagcaacaacatcatcaggcaaacaacagaacacaaaaaaattttagcacacctctcaatctccaattctccctgataaataaaggtaaagaactaggaaaaaccaggacctccaagatggcagcagtctgcgtgaacagcagaggtcgctcgatggcagcatagacggcctcatgtcccttatccagcaatgccaaggtcatgtagcacaacacctgagccctgcattgatccaaatcaaattcagaaccccgataaaaaacaacaccctggctgtccagcccatgaaatggccagcaaacaaagatgctagagggcaatgttttcactctcgcggcagtgtgttattgtagacgcgtggtgtggttgtttttctttcctgactatagatttgtatttttctcctgctatatcaatatatgaaactcaaaataaaaaatcgatatccatccagaaactcaacaaacagtaggcagttgaactgaccatccgatgaaggcgacccaattgtagatagagaggtagagcctccgcaccattgaaccatccgctgccattgcagagctgcgagagatggaggaggaagaagacttcgagatggtgcttggcttttaacatgatggattcatggctaatggctttgaccaggataatctcaatatctcatccatccaccagtcgacgtgcagtcaaatcgcactactaccacaccatcaggaattcaggacatataaatttgtgcatgatctgaccacccaaaagaacacactgagaacgaagagatcttcaactaagatcaacgcaagatttgtgtgcatatcacccgcatgttgcacgcagattctgcaagattcgagacgcgggcttacccagatccgatgggaggcccctcgacctgcttcatgagaggagcaggagatgtggtggcggtcgccggccatggaaaccgccaatttttttaaaaatatatatatacttttttttcacaccagttttacataataaatatacatgtttgaaaataatagcaaaaaaaaagagaatgcggtctggtgaattaattgatggaataattgttaattaattgctaataatggtaattaaacaaaaataatgataagttaattaatcctacaaggttgcgtactcaccgcacgaactcgtgatgacatcacaaacacgttacgagtttgcacactcatcacgtgaactcgtggcaaattcgcaccaccccactgtgataatggtatatttctgctaattcattttaaacatgtatatttccataaaatcaagtgaaaaaaatgtatatttttaatttttttttatggagacaacaagatcagactggtgattctgtgccgtgcactgttgtttgggggtttctcatagccgtttggatgatttttttttaggattgaggctcttgtttttttcacaagaattttagttcaccttaattgcaaaccagtaaatatgtcattttatagcactcaatgcaggtgtgcaactcagaagatataacacagcccaacaagccaacattcgacttgggatggttcgccacaagggagaagattgtttcccgagaggatacgacatgttggtcatcctagtcgcttctagcttgaatgttatgaaaggagcatctatactccttataaaaaggaatagtgatggtggtggttctgccaccaccccactaccaactctaactttttttaagaaaaataaatgacatgtggggttagagggtcacatatcgactactcccatcaactctttattttttgtgggaaggaaaaaaaatattgtgagcttaaaaaaagtccatatgtgagtaataaatatgtacaacaaattaaacaaattaagagatggtaataacatgttaatgataattttctttaattaaaattccattacaatacacgagcaatatgctggtaacaatagagttttcaaccggaaaggcaaggactggacattgctcatcgtggctattcgcgaggaggctaggctctaggtaaaagctagagcgaggatgacactctctaatttaccttttgtaatctaaggtaattgttgaccattgtggctaggcatgatgtaacataagttaatcttcttttaagagcattgcttcggtccttctttttgtaccgcaaggtactagtactgtgaggtactaaaatcctgtccgttggtgatgcccgatcgaatggtcacgattgcatggtacctcgaggtcctagcttggtcgtggggtgggtagctctagttagcaacggtggaagggtataatcgtattttcgcgtttgcaaggatgtttggatcggaggaaggtttagtcgagttggggaagggccgcagagtagcaaaaccctaggcttgttcccgacggcggcgcgtggcggaaaatacgacggcggcggcggcatccattttttggctgcgccgcatctattagccttgagtctcgaccccgacgtcttcccctgttgtttttccctttgcggcgatgacacctacgaccacggtgacgactcatgcagcggcagtgcttccgagatgattgcagatggggtcggccttgctgcgtgcctgcaaccggtgcggtggatggggtcgccctcctccttgagtttttctcccgtgtcgtgcggcggccccacctagcgtgagatgcagaagggttagcgcacgggatagagaagggatagcgagatagagatggatagcggaccacacgcgaaagcgcctcatgcccatcgtacccctcagcaatcaacagctggatgaagaccggtaccagaaagaaggacggaagaaaatctcgctatggtgatattttaggcctgatgctgccggtcacttgagcaatttttctttttgtattatactattttctttttaaaaaaatgatttgtctaatgatttcacctagtattttgagtgcacaactagaggaacatttacgataaaaatatactaaatgacattgtctgcatacttctttattgtgagagcacaggggccaaaatgctccaagaacagatctacagttcttcagacaatttgtttttttgccaggtcggccaaaggctggccgaccaatttcattaagagtggggatgaatcttcagacaacatatatgatcctcctttgcttctgctgctatacatcggaaggccattatcattcaacagccaactagtactatatggcttagacaatctgtgaaaatgatacacatttcagcagttggatggatcgatggataagagtaaggaagaaatcaagaatgactcatctaaaaaataataatcaagaatgatcggatgcagttgtctccattcattgatctggccccatttcatcacatccaatatggtaaatcaaatggtgacagtagccttcttcatccttgaaaagcagaacatctaaatatcatttttcagcatccatatggactatggagtacaattttatttacagatggaaacgcccatatttggtacaacacaccattagcaagccatgagaatggtacttgcatacattctaatttaccaagggaaaagataatccttgtataattgtattttagcatttccattctagtaacctttgcttctttgttccagaaatggtagcatcctgagccatggttgtgatcagaaatcagaaatcaaatttcgcgagtaatcgccatgactgtccgcggggtttagccctgctttcatttctcgttcttggttggttggggtccttccctggctaccgtggcattgtaatgccgttgtaacattttactgtattttcccccaaaatcttaatgaaattggtcggctaacctttggccgacccagcaaaaaataactcttgagtagttatgtggtttttgcctttgacaaggctttcttccgctgggcaaccatatggcgcaacaagtatggaaatactgcattcatgaaatgaaacaaggtagtatgccatcaaatcttacttagtttcctttcagaaaatcctattgaaaaaaacctagtacatgatcgtagcatcaattaataaatgaagtacaattgcatggaatactacctggaacgtacaaagccatcaaaaaagtagagaaatagaagtagtcgaaggagaaattccatttgttgggcatcccaatgcagtatttctcagatgcctgacattgatcatccaaaacaaaagagcatttaaacaagattgttgtcacttatcaaatggaggtagagctcttcctttctaagttattcaggttaccttcatgaaagggaaggcaatatagattaggccaacctcactaaccataccaacaggatagcatactataaaggtgctgtacctgcgaagaaatcagtatgaaaacagtgaagcaattttttttaagataatttactaataagataatgagcaatttttcgaagcttatgctaatacatattgtgatatgtttacaactagaaccaacctaagccataagagccaggaaggtgtaaatccaaatgattcctttatgccaaagaaggaatatctgatgacctgcaaggaattatagtaaattttccacgaagttatgctctgaaatgaagaaaaaaaaatcataatctatgttcgactaaggcaacaacttcaataactaccgtcatttcaagaagcagagttgttgtttaactactgtcatttcaaaaagaagaattgttgtttatcatcttataataaaattgcatctgaaattcatggtctaccaagcgagtaatttggtgactagttttgggggcaacacatacctcggtgatggaccagcttatgatcaagggggtaacaagaatatgagaatgcgtctgcaaaacaaatgcacacagtaactcaccaatattgtctacaaacaatggttacttgattagaagtttaaatacagaaaatagaaaacttggggtgcagaacggaagagaactatcttatccttcacgatgtaatggcatcaattactcgtgcaatttctgcaacttaggtttgtccagtgcttactcagagtcattatgatcataaatgaaagtataaaattagttctaatagcagaaacattacctaacatacttttttttttcattttagcaagtgttttctaatccaaaacttattttcaagacaaaaactatcaaataacttgagtaaggtctgatattacctcaggaaagctccacaagatgccccaggtaatgaacaaccttccagtaatttgtggaagagtagaagacactggagacctcaccaatccttttcaacaattcataatacagtgataagcaatattgttgtaggaaatagttcaatctaacaggaactacattagtattttctacattccagattgagggttagccagaaagtctgttaacataaagtttgaacaagacagccatacctagcaggtaactacaattcacagttgacaaggataacaaaaagaacatattaggaagaagaaaatgacttcttctcttttttttttacaaagaaaaaagggggggggggacttcgtacctagaatggaatgaagaatctgcactaccagcaataccatcaccagccaagcagcaaaacacaaaaaagtttagcacctctcaatctccatgtggaatgaaataaataaattgcagagctgcattcacagttttgcaatgataataaagctaaaagtgaggaaaaccagacctccatgatggcagcagtctgtgcaaacagcagatgccgctcgatagcagcatagacggcctcatgcccgtcatccaacaacgccaagatcatggacaatgacacctgagccctgcatgatccaaaaccaaagaaccctgatcagaacaacaccctgagtgtccaatccaagaaataccagcagacaaagatgctagaagtgaccatccgatgaagacaacccagttgtagacagagaagtagagcctccggagcactgaaccatccgctgccattgcagagctgcgagatggaggaggaagacgtcgaggagatgggtttggctttaacgtcatggctaatggctttgaccaggataatctaatcaacaaatccgatgtgcatgcaaatcacactatcatagcatcagaagcactaaaatattagagtcctgattgacaggcagcagcttcctcagacatggatgggattaagggaataaggctaaccactgttccaattgattaataagcatcagatcgggggatcaaatcggataaataaatagttggcagcacaaagtgacagtcattgctactgcaactgtccgccacccaaccaattcatccatgtgatcaacacatttcgccacaacaaagaagggaagaagacagatacatcagctgcttcattttcccttttttctcttttcatcttcacctgtgtaaatgtaagccatgtcatattaataaatcataactaggtggtagaaagagtttgttatccaagagatcacaagcttgattcaaaggtcatgttttttttatcaggcttcagaaaagaagtatctttactttattcctaagaacaggtaacacgtgtatagattcctcaaagagcatgactgacgcatctcaaaaacatgtaatgtatgcatcgaggtccagttaacatcaacaaccaatagcaatcagccatcgtggatagcaagaatgtagctacgaggaacagggagagggagagatcagcaactctccgaattccaattgataatactgtttcaacaagctcatgtgttgagttagtgccacaaattgcctcaacgaactggaaacaaggcagctgatgtaacaggggtaatatctgcgcatgatctgaatctgaacacaccgggaaactacccgagaccaactgaatccgcgcatgatccatgccatcagccacattttcgcacgcagattttgcgagattcgctgcaggggacttacccagatccgcgtcggcgtcgcgtccccgatcccgaactgcccccatccacgccactcgctgcgcctcggatcccatcagatggattcaaagccacagcagcgccacgacctgctcgaggacgacatggccatggactacagattactgaagagaagcgtcggatagtacgggggaggcgtgtgcggcggcgggttaatcaactgcgcatgaaattattttttgggggatttttcatagcgttttcgatggtttttgtaaggttgaaatttggctccttttttttcaaaagaaatttagctaactacttcaaatcatacggccttatcgtttgcctttatgtttatgtttactcgaaccgcttattagcaatttaaaaataattatgcataaaaacttttatattcgtgctcttagtgattcaaaagcaaatgttgtaaaataagctgtgaagagaaaatcacaaaatcaatttatttataagcataagtgaaacaatgggactcataattgcaaaccagtaaatatgcaaatatgccaattctctatagcacgcagtgcaaagtgtgcaacatacagcataacaggctaacagcaaacgcaaaaagagtgcaatttgaaacaagctggtaaattttggatcaatcattcaataatttaaccaggtaaaatctagaattcttggtagaagactacagttacaacaaatgatgggcagtgtaatagtagttctttccaacatgtcctcatctacagacttctactaaaagagtagcaaatgtgagctatttaggcagatccttaagccacaagtgacaaattcaagaaagctcttgagcatcaccattatgcagccttagcctttgccaatgccttcttccgttgggcaagcatgtaggtgaacatgtgaggcgatcctgcaacgcagtgttcttgtcagaacctatcaaatcccagttactaagaaacaacaattgcaattataaaaataatttcaatcactgaataaaggacgactgcaaggcaggaggggataccgggcacgtagacggcgagagaaagaatggatgcataggagaaatcaaaggagaagttccatttgttgggcatcctaaggcaatatttctctgttgcctgcatagcagtcacaggaaaggagcagttaaatacgcattacgcattatgcaatgagcctgaacaacatggagatcttcatttctgaagttcattcttgttaccttcatgtaaggcaaggcaatgtagattaaaccgacctcactgctgataccagtaggatacaataccataaaggtgctatacctgtacaaaatcagcaccaggtttaagaaaagaagttatgaaagaaaaagaaaagcattctctctaaatttatgctaaataatgatgtatcttctttactaacctcagccataagagccaggaaggggcaaatccgaatgtctccttcatgccaaagaaggaatatctaatgatctacaaggaaccacaaatatttccatcacgttatgctatcaaatgcacaatattttaaatattggtgtgaataagcttagcccaggagaaatcaaaattataatttggaaaatgtcgtgtctctttaagaagtgagtcttcaaaatatacctcagtgatggaccagcttatgaccaaggaagtaacaaggatatgtgaatgtgtctgcaagacaaatgtacaaagggatcaatcaatatatatgtcatgaaaccatgtgttaagctacactacaagcatacaactaacagaaaactagggatgcaaaagtaaagacactgcatttgcatatcagtaccagtagttatgccatttagtaacttgtacaatcatcaccattatttacttgatccacaaccagacataaaacagacaaactacctagtgtccagccctcatataaaaatcaaattatatgatccgtattttctatttagacaatgctttaaacccaaaattatgtcatgtttcaatgtctcggcgaaacagtaaatgcttaggagaagtagcatgaacgtagcatgtcaacacttattagtgatagtcgatgatacctctggaaagctccacaggatgccccaggtaagaaacaaccttgatccaatttgtggaagagttgcagagactggagacctcaccaaacctttaaaacaaagtcagcatgttatacaggtgataaaaatgagaagtgtcataaaagtgaatttataaggtacaattgtttctctaatctaacaggacacttcctgtaaattgaaatatgtctttggcatgctttctaacgagaaagtctattactctatttccatggagtttgcgtgctgcacgctatagataggaaccgtacaattccaaatgatgaccaggatagtgaaaataacataagtagaagagaagaacaacttcttacctacaagcccatgaagaatctgagccaccagcaacgccatcgccaaacaaacacaaaaatgctcagtacctcacaaaacacaatttgcaaagaaatgaaatatacatcggtcggcattcttcgccatcccggcgaaaaaaacaaagaaatgaaataaacatggaatgttcgttcattctatgttcaccgcggactcgttcagccgctccgtgcaaagaatataaatgcttccttatctagggaactacaaggaatataacacaaagtactgctagggcagcagaaatttttcttttctttttagcagaattatcgggggagaggatccccaccatcaggcagcagaaacataacaatgaagttgaattaattgcagtatattttgctataacactggtaatatttctctcaggctaaatgtttggttgatttttagaacgcaaaaggggattaatttttttttccctctgtgccattgctcaacaggtagcaaccctaattgggtagacggaaaattcaaaatgaagtcagagctgcccaaattatacaagctcgagctaaaacctactccctccattaaaaaaaaaaagacaaaccctggattttcgtgtccaacgtttgaccgtccgtcttatttaaaaaaattatgaaaaaaatttaaaaaataagtcacgcataagtattaatcatgttttattatcgaacaacaataaaaatactaattataaaaaatttcatataagactgacacagtcgaacgttggacacggaaacccaggtatgtcttttttttttttggacggagggagtacagttttactcgattaaaattcagaaataagtcagagcgcacagactagcagaaaaaccagacctccaagaaggcggcggtctgcgcgaactgcagcggccgctcgacggcggcgtagacggcctcatggccgctctccagcagcgtcgtgaccgcgtagtacagcacctgcgccctgcaagatccaagaaacccccccaaatcaagccaagaaaacgagagatccaaacaccagcaggcggcggcggcgcgaggcggcggagtaccatccgaagaagacggcccagttgtagacggagaggtagagccgccgcaccgccgacccgacgcccgtcatcgccgagcactcagcagcagctagcaaggaggaggaggaaccgaggaacgcgaggcctggacaaagatggacaaggacagtggcttggctttaatgggcgcgtggactgaatctactacgctgttgattactgctcgcattcgcatcagcagatcagatcagaggatgcaatcgcaatcagtaggctgcttgctccgatttgagaattccggtggatgggaggctggccaaccgaccaaccactgatcaaactgaattcgcaatgaatcggagtggatgtgggggtggcggtggcagttatggcagctgcagctgactgagccggctctcccgccaatatcatccatgtgatctgctgcaaattcagttcagtactgcaactttcaattttatcttcagaagagttcagacacgcaggttcagtaaaaaaaaatctctcatttctctctctgttctcaatcacaagtattatgctgttaacctgatggcctgtcaaaagaaaagaaattgtgtgtctgtgtgtgtatatcagcatctacaactaccagaattaatcagtgatacataggaagcacatcaagaaacagaataaagatgataattttgttcagctgttacatgagttgttttcaatagctttccaagtgatagaactgctcagccaactcaactgtctatcagaatatcagttagttcgactaactgaaaatgaaatagcctttacagaatgctcctctgtacttcacaatcatattatccaagacaatgttgcatgacctgcctacccaaacaaacaaacgaactctatagattacttgcattcttttcagctgtatgttgtattagattacaagaatggactttaaagaacaccataacttgactgaatacagaagatgaacaatcaattccaagctacaatgcagcagagaggatccccagttcggtgcagagtggctccagcccttcctcttccagcaaggaaagagcggcaagtccatagtaagaatggtagatatccgggaattgatcgtacaaaaactttgtaaaacctccatactgttgcaatggtaaacaagggcatacatgatcagtaaagatgcaacttgatcaatgtgagaaattaagctgattagagaggaagtcattacaggtgattggcaatagagcaaaaaacttcgcaaagcaccatgatcaatgaagcggtatgcaccgatgatctttaggacacctccaatcctgcagagtgttgattggcagcaagacagattacccaagtttgctatttgattgtcaggcaattagtatatataactctgaatggtgtatttaccaaaatgcatagcatgtgtcactggatttgttccttcttccttgaaaacctccgtctgccgcttgtctctatatgataatagtgaaaacagttaagattccctactagtaaagtcgtcctagtccttattaatcatttctaactaaatccgtttatgattcacattttttttactctacataagggagattttaaaaacaactggatggtgtggtgtcattgagcaagctgcacttctccatcatgaataaatgaaaattgaatggttgatgcatatatctactaaattagaaacatttaaaacgggttggtgtactgcatatagtgtctgtccagttttggaaatatatgttagtcctataaatcacatcaaagggcagattttgatggtaatagcagatatatatggttgagcagaatttaacctgaagacaccactccaggagcaagcgtacatcaattgatgatggttcttgtaaatttgatgccaaatcaacttgaatgaaacccatcaggcacaaagctgcaacagcacagaatgtccctccacctgactcactaacacaaagacaaacaatgagtacccataaccgactccaaaaaaataaaacaaaaatttagctgaattattgcattctgaaactctgaagaaaactgccacatgaaatgacaaactcagtaggacaagaagcacatcaaaggttaaaagaagctgtaccatgagattctgaaccaggaaccaagccaaagccaccatcgtatgactgcatgtggtagaaacaagaattaaggattttaaatagcatggtgcaaaacactggtgtctcaaaaccaagtgcatcaggaattgttgtaagccaacctggcaactaagaatgtattgcttggccttttccttgtccattcctgtccaatcttttagcatcgagcagattgcagctgagaagacaacacaagtgtgtcaagttatttcaaacaaagataaaattgaaagcatactaaatataaatgacagtgcaacccacctgcacagtatacaaagcgtaggtctgtttccgcaccaatatgagtaggcatgaagctaaaaaaaaaatgcttctcaagttggccaataagataatgcatttaagcggtgcgtggagtttagttgtttgcagaatggaaccatggaagccatcttagtgaaatcaatgaaatgctcacaggcaagcaagattgcattgcacatgcacaaacacctctatcacatgcatgcagttaggatcacagcacattaattaacattctgattgaacaagcttgaagactgaccaacaatacagagatataccagaaaggaggtatttaccaatatcaagtttgtcgaacgacatggcatgactaaattcatgcagagaaaacatatgcaaatggaaaggtagcaatcaacacatacaaaaaataatcaaggaggtgggccaactatggggtattatgaaatcttaagacagaatgtgagttggctgaaactcttttggtggtacagttaaaactaaacacaggtagcagatgtaaatgcatagatatttttggaggataattacaagaataattagcatggagaccaaaactaaaatgcataccttccatctggctgttggaggtttctcattgaggacaaaagaaccttgttatcaatgtttgctaaatcataacctacaatcttcaggatagcaagggcagaataagtgcttgcaagatgactaccattgtggcaagggtcctgaggaagggcatgaattcatatttcaaactgtcagaatgtaaaaattaaatgacaaattgatatgtgtgaaaaaaaaaagggttgacttgagaattagccacatctaccttcatgttagttgagggaaactgagttgttctagagccacagaatccataaaattgtcctaaaaacatataaattgtcatataatgaatatattgcatctgaaaaatatgaattagctatcttgagagctttattacataagtactgaggaaaactcaccattatctaattcattgtctgtcttaggatgtacttgaaaagacaaaatccatttggctatttgatccttgttaacctaaagaaagtataaaagggcaaacaagtacacaactcatcaaattactactcagtcaactcagtatattacttcttcctgaagagtcaactcagtcaaggcacaaagtgaacttaaattcccacaataaatatttcagctagcaaccaggcatggttacttgttttaatacataatacatacaggtacaattttcatgataagactggtaaaaaaatatttgcatgaggctataagtttttttagaagttactagtaatttgagaatggagatatcaggaggctatcatgtttttgttgtttacatgagcaaggcatcaagtatgatgaacttaaatcataaccaactaggcggctcctaactgtgcagagcattaaggcaactgcccatggacaagacaaagacgaatggaatttagaccgaattaagggacgtggaccaattcgttgctacagaaacatcacatgggcccctttcctcttagtttggctagaaatcgaaagcgaatgtagttatgtgatattgtgatctagttgccggacagatgcaaattgcctaaccgcaataatctctaactgctttgagtagactggttactggtcagtgaccacttatgggctaaagtgcttaaaccttgcagctagtagttgttctttacaggaattccaaaaaaaaaaaaattgaaaagacccttccacacttggcattctgctatccacaaactttggatccctgtgtttgtcacaataaagatcaattgcaactcccattatggatacagcaactaatttatctctgaatatactaccaatagccatccttgaggtttcaaaatacttcatggtaccataagtgcaccaaatctgctgattgattttattcctacagatgcaactttgcttccactaaatgcaagcaaagcgaccacacaaggtaaagtaaagatccaagctttgcacacgggcacatctagtctagactagagttcaacaaataactaaaaaaaaacgaatttacgcgtaattcaggaaacggatcgagaggataaccgctagggcagatcaggcggagagcggggatcttacactgtcgagctcacgaaggagagataggccggcgacggcgaagtaggcgagggtgaggtggttgacctcctgcgaggcgtagtccgcggggagctccgacgccatagcctccagaaacagcacgtgccgctcgcgcgcgaactccggctgctccggctccgccatcgccggccctcgctcgctcgccggggaaccctcgtctctcgtgccggagagaataaccgagccgctagtgcggatctggcggaggaggagagctcggcacggcgacggcggcggcggcggcgggcgctgctggtgctgggaatttgggatgcggacgggtggagggaagaggaggtttttttttccttacttaatatagggtgagaggttgacaggtgggcccaagggtgtatatataatatattgttttactccaaggtccttgatgtaaaactttgtaagatttgttggcaggagttgagcattacacaaggacttaaatacaaacaaatattcatggagatgcattgcacattagagcaggtacaatagcatgctataagccatctataacctcatatcgagaagaaaagagaagagagagaagaaagcgggttacatatttgtagccagctgcaacacggactctaagacgttatatgtgaatgagaggtaggactgaatattaatgatgtagtatatttttatagctaactattatattaattggctattagattagctataaatgaattggagccaatagttggctaacaatcaaataagcatacgagaatgactaattttcgtcttaccctcttcttattctagaccagcttctcaacaatgtgttcgtggaaaataatatataaattttcgcataataacttgttaaatatctgattgattttgtaggagagccataaaaagatcaaactatttatttaatccatcaattttaactatctcaaataaacatgaattattgttatttatgatgcaggtaaaatgaaccctgaattttccacacgagcatctgctgaatgctgatagttatgtactccaccttcctactggtaacagtctccattgatggattcttgatccgaactgatcgtgatggatcggccattgctggcattccgaaatctcacaattcacaagaaaaaaatgtctcgctattcagggaattttttgcatcacagattcagagtttcagacagcacggaagattttgcaggcggcgttggtgcccgttgggcgacctacctcccaactgcaatccttaactccttccctgacgcagcctccatgcatcgtaccgacatctttctctgaagaaccatgtccatacaccacctcaagtttttttactgacatgactggccctatcaattactagtaaccactgctttcagagtgttattgcaagttcttaagcagatgatcaacacaaatgatggtgtattatgataagaatggtgatcctaattcctaattcctagtagcatttcctgcacgaagttcctgcttttatgttgttcttttttaggtcttgcttagttccaaagttttttttttacaaactttcaacttgtcatcacatcaaatctttcatacacataacttttctatcacatcgtaccaatttcaaccaaattttcaaactttagtgtgaactaggcgtggaggaggtaattacagagtctcaccgatggtacaaagagcgtgtgcttcaggaatgcgtgccacactctttgcacattttggtcagcacatgtatccatgtggaagaatatatgcctagttgtgaacttgtgattgaacaatcaatttagactaaacgaacgatcatgctattgtgatcaggaagatatccaaatctgttaaagaaaacaagagatttacgcaaatctcagtcatgactagcacgatctagatacgcaaaaccccaaatttcgacaaaaccgaaagcaatcggtgatcaaacggtgtgtttttgcacactgaattttacttttgggggtccatggaccgggtccatacaatcaagagggccggatacgtcgcataactccggtgggtccaacggcccagcggcccgtgggccccacaccttcttgcccccgcgggatcaaatacacctcctccggccactccccgatccccacctcgtctccaccgcacgagcagcagcagcagcagcggcggccgcagcgcgagctctctctctctctctcgcggtgggcggcgggatgaaggtgtccgtcgtgtcccggagcggccgggaggtggtcaggggcggcgtcgagctcaaggactcggtatgtcgtctccattcgttccgttttttttttttgagctcgtcaggttcttgattgagaaatttggtgcggattatgggttttggtgttgcagccttgtaggggggagggtttggagttttggttcttgggtggggggggggggttaagatctcgtggaaaggtttgaggttgaggtttgattcgtgggttcttgttttcttttcttttgcaggctaaggtcgcggatctgcaggatgccatctatgccaagagtaagtgcaatgatcccgtcaaaatttcccgttttatggttgtgtttgttgatgtgttaaaggagtagtacttgtagtggctctcctgcacttcgttatcttctcattctttggaagggtttggtcgtatttacatgttgaaaaagataggaatatatgcatatgagtgggtttgcattcaattcaagctaaaggcctttttaaggcaaatatgtttttttatgtagttagactacgactgccttttttaatacatcctacagttctaaattttggaagcgtcgattgagtttggccagtatgtccaaatctgacattttgggagttaattagtatggtcatcaggagtaatcactgttgcacttatttaattcattaaaagagagttaaagaaaggattttctgcacttccattaatccaagagcgtttcaccccggggtactgttgatgctttgactcaaacttgcgagtgttagccatcagagaagtctgatttatggtgtatatcagtacatggaccatgttggtttgggagttgcagataataattgatatttaggctagtatttataagctgaaaaggtaaacaactgactgaatattatgttcgtaccgaacctagtgcttggaacatgaaaacagtacatcgatataataattgtgttcgcccttggttcattttgattggttgactagagcttgccactttgccagtactggcaaggattcttttggttgctgcagcctacaggttgttaggatctgcttaggtaggatggagttggctatcaacctctactcgctcacaagctttgtgtgtgcactttttaatattcgtttacctttgcagagtgaaagaaatcttaaaaaggatagattacatggaatgatggaaacaggaaacgtggttgaactaacttggcaatatactattgactgtatgccaaaatgattttaggaagacctgtatgttgaaaatagcttccaatctttcataaacaaagggcgatagttagttgatatactgtagccagctaatattcgttatgttgaaaactgcctaatttgaaatatgcacacatggtttactgaaataaacaacaaatgtaatactaaaagttcacactttttactaagactgtctctgtcatatgtacggcacaagcattgagtataatatgctattgttgaagaaattggaagtgtttttactgtctgcatttgttttctgtatcatgttcaaatttgcttgtgataaagcctatcttgagtgtttcatgatatttggtgctgtgccttaccctgatgaaggggtcatgctgattcgagcaactagttgtcttatttctgtaaaaccatttctatttcagccctgtctgctgatggttcttcctttttgagccttgaatcaggaagctaattcccctgtcattttgtgtgctcctgtcagtcactcttaagtcaccacctagtgtccgttttaactcacaacctatgctgatgtagcattatcaatgacagacaacgtaatttactgcttgaatttatcaaactttagctaagctggctatcaagaacctctattctatgtcattatggtatttattgtcacaattataagcaccatcttcttgcttgtgccagactggcgcatttgcatgttagtctattaagttgccataatgttatcctgaggtgatgttcacaaggaatttattattcatgttggaccctcaagagtaaagaagaggtcctgcaatgtggtagagatgtagtagagcgagaagatacatcatgatatatggttataagtactgtttaaaatcttcctaagtagttttatttcctatcactgccctcaagtgcatgttagtacaccaaacatgcaccgtaatagatgaaccaaagtgtggaatccaagtacatctagtgattactgaccagtgcaagattgcaaatgcaaactaatcttattctaactgaaagattgcagcattagttgctaatgtagatcataatctttgatcttacatatacagaaaactcagtttgattactttgggtgaatcatgaatgggctagcgggatgtttaaaaaaaaactattttattataccttgcttctcttagaatgcatgctttcaatgtgttctatgagttgctaacctcttggttttacaccatgcagctaagaagtattaccctgctaggcagcggctcaccctccctatccaacctggaaaatcaggaaagccagttgtccttagtgcaaaggccagcctatcagaatactgcgaaaagggttctggatccctgacagtggtctttaaggatttaggcccacaggtcttctacagcacgctgttcttctttgaatacttgggtcctcttcttatctaccccatgttctattacttgcctgtctacaaatatttcggatacgagggagagcgggtcatgcatcctgtccagacttacgccatgtactattggtgtttccactacttcaagaggatcatggagacgttctttgttcaccgcttcagccacgcgacttctcctgtatcaaatgtcttcaggaactgtgcctactactggacctttggagcttacattgcttactactgcaaccacccgctttacacccctgtgagtgaattgcagatgaagattgggtttggatttgggattctctgccaaattgcaaacttttattgccatatcctgctgaggaacctcagaagtccgagtggtaacggtggctatcagattcctcgtggcttcctgttcaacatagtgacatgcgcaaactataccactgagatctaccaatggcttgggttcaacattgccacacagactgtggcaggttacatcttccttgttgtggcagcgagtatcatgaccaactgggcacttggaaagcaccgccgtctaaagaaggcaagcacggtttcttttttctcctgcgctgaagtgctgaacaatgttatcattgcacagatttactgatatttcttattttgcagttgttcgatggcaaggaagggaggccgaagtatcctcggcgatgggtgattcttccaccattcctgtaaggagttggtgtcagcacgatggccacatgggattgaatctttggtctggtctcagtgttcggaagttgaagccttcagtgtaccacttctattctatgatctaaaatatctagtccacaatggaatccctcttagctattgttgaacttctctttgagtttgcattggccctgttgtaatggttaaatacaatacaagtttcatctgatatcagcttattgacttcttgtccatttgtccaagcagtagtaatgcgatcataatttcattttgacgcctggaattgctgtcctattctgtccttctcagctgaagcctgccattttcatgcttgacattgttgcctgttgtcctctgaaaaaccttaccagaagtcgtcgatttgattacaaagtatatactagcttcgtggtgtacattggtgctgtttcctttttcttgcttccctgggtgacagtcacatactcacatgcatattttgtaccaagaactttactcgtgagtttgtcatcagttatcactgttctggacgtgtttttaaggacatgtttggaacaaaggaacggagaacacatgaacaggaaaaacataggaacaagaaagagcgtaaagtggaaaaattacggaattgaaaacacatgtaactgtaaaatatgtggtgatgaaacatgagtgtttggatctaatcctaagcaaattcctaaaaaatcccatgttccaaactgggcctaaggaatcctgtacaaaattctcctatgtggacttcttgcagatcacctttttttttcttgcaaaaagactgaccgcattttgttttactctgaccgttagtctccatgagactatgactactgtaatttggccaaagaataatgagcagcagaatccaagttcatagtaacaactcaaacaattccttctcaaaatcatgttctgacctcatttttgtcgaaatgaagttgtgtaatcgaactgtgagctggagctcggccaatcaagtactacgatctcatccgagattcgttcagtgacctgcaaatattttaaagaggccgtatgtttcatatgaaatgtacgaagacctacagtcccagtagccggtttgaccacaagagttcatgctgaccatcactttcgtatgctctattttgttcaaaaattaagtaaactaaatcaatatggtgtcttgttgtcgccgatgatctgtagttgcatggtcagctagtacaagccacaagttgcagagcacagtaggtagtactagcaactggtaaccagtcaattgcaatgcttccagatagaatcatccggtcaattccaacttgttttggtagatttttctgcaccatttgaataaaaatagtcagtttcatctcaacaaatttacagccatttggtcgctacatgacagctggtcaattgcatttgatggagatctgtgagcacacgaatttagcagcagaattatcaactgggagatctgtttgtaactaaggaattttacctgaatttatcaaattcatgcaacaatcagggaaaaaaaagaggaaaaaaatccatatttcaaacgaggcttggaatctatcatgtattcagcaaatccaaagttgactttttactccaaagttggtagttgactttgtagttagtgctcaaaagatttaagtatttttactctgaagatgatgcagcatgcaggtctcaaattagtcatgataaagtgagacaattcttcatggcattgcagcgcagcaatcctagtgatgactagaagcaatcatgggcgatagcattctggaggcagtaattaagtaaagattaagccagtcactttcattaacaatgaacatgtggtggaagaaaaggctggtcttgattttgatatcttgattagcgatgcgatgtgtactagtaatactctgttgttataactactggcctagaaggctagaacaagtcagcacaaggtcgcacatctttactctttcctatcacttatgttttcatctaaaattattttccttttgcaggtcttttttttattttctctctatttatacgatggagaagttccatacgtcaaagataactagcaaaaggaataaaatgatatgatttccactgaagatggcatgccaagtttgattggagctgcatgtactaccctgagcattgagcaggtcaacatagaccaagagaaaattcatagatatcacaaatacatcttttcaataaatgaatcttttattaatatcaagataattataccaaggtgatacaaatacaaccattttaaaatcgctcttggcctttgcaatgtttgaatagctaggatacaatctaaattttacaatgtatttttggtaaacatagcaaacacactaatgactatcagtccacggacacttatgtggctgcttaaaaaactcctgaccacgattattcttctctcaaatattcactgagatcttacaaaatatccatgaagaggacaacttcacaatttcacacacacaaaagagatccatggagtggtcaaattcataccaacttttttttcctagggtccaccacaatacaaacaagcacacagtgtgtttgaggttggtctggcaaaaaggagtacagaattaaggaggatttggaggctttcgaaacaaaagccaaaaatacttaaaaagttcaggcaataatgaccatgctggacgaaaacgcggttctatgtactgtctccatactttgcattgattctataatttataaaattgctggtgcacttaatatctgacaaggacagccatctcatcttttcctgtaaccttttgccagttcattcatatgtgaattctcagctgcaactcgatcacgataggaaagagatgcaattccagccattttattaaaaccttgccaatgaaagaagaaaaaaatcatgtatttttataaacatatcagaaaagaaaaaaatatttttaagcaagaaaaatacaaacacatgtatatcttcatccattaatgaaatattccaataccaaaaaagctcagtgaaaatctgcgtgctattaattttacatatggacaataataaccagataaaccacaaactcaactctgagtgtgtgtggacacgcgtgtggtgtatctgcgtgtgcgcgtccaacttgtactcgaaaaaaataaccagcttaccataaaacaaaaatactttttttcttattaaaagaaaaaagaaaaagagaggagatcaaactgataactgccaaaagagaatggaagttttcaactaccagcacccgccattcaggcaggcagctacggaccggaatttatcagaaaaccccctcaaatttcccattcctcgcacttgcgatcctttcctcttcctcctcccgttcttattcggggaattcgcgtttcctccaactttccatttcaccaactccctccttgcggcaaaagcaccaccaaaccctcgaatcggacaccaaatccctttttttctgggttgcgtcggctgcaggcgtcatctgaaatcgaaggttcgtttgcagaaataaaaggaggtttctttgcggccggttttgtgggttcttgatggcagcggcgtgcgtttaatctgtttgtggaaaggcgtgagtcggtttatgtttcggtttttttttggataagctggagctggagggtttgtgaggcttcatctcggatctcaggtggtctctcgcatacgtttctgtttggtttctttgtttttttttctttttttttttgtttgggggagaaaaggagatggtttgttcatcgttttgtttggattagtaaaagggagtgtttaacgacgtccgttttgatgatttgcgaatggttttgtgatgccaatctcactctttgccccatccggccttgattgatttctttcctccgttaatccgtacatgcagtttcctccggattcatccggccttggatttattccttttcgtcggattaatccgtaaagtttgtttccaaaaagatttatctgaaccccacgccctacgtaggttctcctatgtgattctgtttaatttgaaattttaattacctgtccatggtcattttcttttcttattttctcaataaaatactgaaaacaatgtctgttgctttatagtatgtgagatttccctgtgcttgttcaccatgtttccttagaagcttcctttgtcttctttattttgcgcagtgtggaaacatttccacacggtttaaatacgttgtccgtgggaatcagtgtttttcttcactgaagtgcctgcccctgtgaagatttcattttcttgtcacctaattattgattaggaattgaaattctaactaacaaggatatgtatggatatatggtttaattggtgtcttaagaaatggtttagttgctgttggtgggtgtttgtctgcatgttttcagaaagaggtgcttgtgtcagcatcatttctgtttctttgtctgaaaggcagcaaagggccttctcaacttgttttctattagctttgttcattgattatggtttatgtgtttcctcatgattaacatctgcctttggctagccgattttatggatacttggttggagaacatcttttttctgtattaaatttgtttggctgcacttttccagagttccagtttgctattcaggcaataatttatttgtacttgaaatgatattatgcgtgttattcgctaagttgttaatcggtggtcagtctgttcatgacaggtttaaagaaaagttgaggaattgttccttattctgcaaaggtggtgcttataaggaaccactcctcctacctttgttgacgggctaacaccaaatggcccagctgttgcaccatcaggactccgcgttttatgggaaggaactccatgggcgccgatggagcattcttcagttctttggcttccgtcgccgcctgcgatccactaagatgatctctgacaagaaacagagtcagggaaaaggcagtggtggtaagtttactgcttcatttttttgttacctgctagttgctataggaccttgaatactatggtgcaacagagtgtagttgaataatacaactgtgcaaattcatgtggttggaaaggttttttgcttgaaaaaaaaacacacacaagacaccaaggagaaacgctggacactaaagaggaacttggtgtcaattaattaagaagaaatgcgagcgtgcactagagtcgaacacgggacttcggggttgaatccgcatacctctgccactgcgctagcaagcgcttctcttccatttgatatttaggcgaattatgtaacttatgagaaatattaccataaaaaacccattggatatgagaggaggggctctcatataagaaattattaagaggagtgaggctcgaacccggaccggctagcccactaccttgtggtgctagccggaataccccaggggccttctcatgagcaatattactaaaacagtgtgaaatttactatttgactcttagtggtagtacagtagatacttaattccttgttatgtaaaacttaccaaaacagtgttctgctttgattatgatttttattataaattattctccttgcacgattataatttgcattagatgaaaaaataattgtaggaagtagacgccgaggttcatatgttccactgaaagatgaagacactagtgtcatggacgatgacaaacacactgaggtacatacaagttgcttcatcctgttcaagcaagcattcaaacacttcttttttttacattttggttataatttcttaaacttcttggttgtgtatatccctcgtggatatagaggccggattaatgaaaatccattatctaaaaaaaattccttaaacttcttcagactacagtgcatactatgagcatctagtttcagtagtttattacaatatttctagaacttttttggatcagaaattatttataagcataatatacgtataggaaatttccacgacattacataatccacataggaaatttccataagtattacttcctccgtttcaggttataagactttctagcatgtgcctagattcattaacatctatatgaatgtgg

SEQ ID NO: 8688 - DNA, 31601 bp, Oryza sativa
gttggtgttacagtatagtcctagagactatttggcgcgcggtgattttacctatatgaggtattttttggtgattgatgtttttatgctacaagaggaaattcgtctcaaggtggagattgttaaatatgtgatccgtattttggacccacaatatattcggattagtttcctagtaggagtcctatgaggtgtctttctattatcccctatatatataccctggttagtcgtacaggaaggggtgacgttcccattgtgattcccctaagtttgtaatcatctcctctacagtgatcattgccggtcggcgcccgtggttttttcccgcatatgttttccacgtaaaaattcgtgtctctgttgtgcatctattttcataacacatggctagcatctgactcgggttgatttctttcttatttgatataggaatggaagccatgaggaataaaagcataacagtcgtaggatcacaagtcactcgggtgtatcatcgaggaaggtagcagtgaaacagcacctgcagtaaagagaaccaaccacccatattactgcttgcaaacacacagtcttcaactagtgatatttacgatttaccgtaggaaatagaagccaggtccggaatggtaacgatgcaacggcatcaatttcaagcaatcctattgtaagtgcttcgatttaataattcacattatactacttttactacaaaatagttatcttaattccatgaataataaaaccagtttattcatgctttgatttaataattcacattttacagcttttactaaaagttagatactttaattattgctctttcggatgaacgaacaaattaattgcaacaatatgtcattttgagctctacctcatgcacaagttgtatttttctactggactagtaagcctgcccgtgtaatccacatagctaaaagaagtctgacattatatttattaataaataaattattaaaaactacattatctttaatgagtaagtttatctcaaagaggcaaaaaaaatgatgtaacatccatcaagttgtgactgaattcgtacttctttttttttttacgtcgggcgtgttatactatttagaaaaattcagtgaaattgaaataggctcctctaagcctaaaataatgatgaatatgctatagttaaagataacaaattaacaatggttaagaacatttcaaactggatgatccagtcaaataatatgagaagggtactaatgagagaagtgcacaaatttattctatgacaatttatataggtacaaataattttcctcctgtttggcctcccccaactgaatcatcatctacaccttgtccgctgaccacagaaagcagatactcttttctgtatgcctatgaagatatggtcagttggtcagaaacttacaatgctcaaaagaatttctatcactacctaaatcaatgaaagttggtcacaaactcaaacaatgaaagtcacgaataatgcttatatataagaggtcaaaaagacaaggtaaatggaatttgttccctatcagtctatatattaggcaatgaaataattgtacactggagcataaatacatacttgcaaggcctttaatttttatcaccatgaaaaacctgcaacgcaacaaccctttcttcttctttttttttaactacttcctgagcccttcaattatgaaatggcattatgatagtggctataaatagaggctaaaagagatcacctctgctgaggtacgtttcagtttgaaggatgcatagactatatatgcgagagaactatacgtgcatgttgcagagatcccttttctgatgtccaaactatatggatggaaatggaagtcatcaaagttttaaaaaaacaatattttgctgaagatgagaccatggaagtatgagttttatagttactatgattattatgcttcttcaatatttcttatattgtgaggtagcagtactaacggatagggatggaagtgggccaatccacgaatccacttataagcaaaattagacgggttacctactaatttgacctataaatgggttatggatcaacccccttgcatttctaggtacgacgataaactagaccacaaagcaaaaacccacgagtaaccacttatttgatatattaggtgataccacgcgctttgctgtgggatttattgataagtatatgttaaatatcgccgaaatgatgaaagttgaaatgttgagaaaataatatgagaaagatgatttgacatatacttgttgatctctataatataatattgtagatgatgtgtcatgcttacatgtgatttaaaataggctagaatagtactaattgcgaagatcgatgtggcatgcttacatgagattttaaatgggctagaatagtcattactagtgagtgatgatgtgacatgcttatatgttgagctttagcttctaataattgttagtgggtatcaactatatagaatgtatagataagtaggtttgtaggttgacccgcttgggtccctactaacggaagtccttcagaaaataaaatgcaattttcagattcgcctgctagctgttcacctatatattctgtccaaagatgcaacagagatagcatccttgttccagaatatctaatctattttgtatttgagagggtgcaaaaatggtactacagtttagcaagatacttcccattttgatccattatccaaaaaaaaaaagcatcccattttgatgagtgtgattgagagagttaaaaacaaagtggagttctgatgagaagtatatatgggattggaagctgttgggattcaattgacgactcaatcaacggaagaccatagcaagggagaaaataaacaggccgggagaagcaaatcacagaacattgaaacgaaaccagacaaataatcaacgcccattcgaaattcgccaggattttagaagcgatgggagctgaaatattttttatgtgtaatgaacacagcgccacatcatatgatgcgtgcccctctgttctcctgttctttgttagttttaaaaaacacaccttgtcatctgtgatgggccaagactctcagctgtgacgggttagaacctcgtcacatataagtggtcactaatgactctgagtcatctgtgactggcgaagacccgtgagaggaaagagttagctttgatgggccgcaaccaaaacccatcacaggtaaccttcgtttgtgatggctaatcattttaacctatcattggtggcctttatctatgatggacacacctttcactactaaaaaacgatttttcgtgacgtcgtcctataattttcattggcggtcatatgcaaaaattgccactaaaaatgtgaccaggggtgagggactacggattgccagcgaaaatcggttttcgctggcggccacgctaagacgcccgtcataaaaaatagctctattttcgctggcagcggctctaaaaggcccaccataaaaatccgggttttcgctggtgctcaattttcgctggatgcagataacagcaccgtcagtgaaataaaatttgacgctataaaagcaccgcccccacaccagtgaaaacccagttctctccgccacgtccttatcctatctcctcctcctccatccactccctctctccctccaatcctcgctccctccaaatccataggcacgggcaacggaggagtgcgctcgtgaaggcggtggcgaggcacgggcggggagggctgattcgccaccgctgggccgcgggaagggcagatccgccgccggaccacggggagggcggcaccgaccttgatgccgtcgaccgtgctgcccgactccctcctcttcgacctcaacgccgtcgaccgtgctgcccgtctccctcctctccgaccgtgctgctagatgtgaattttttttgtgcatgttgttccagatgatgcacatgttttcagctgtgtaaatgatgtttgatctgtggacatatttcattttcaaatttcctctgcgcaccagtgggcatattcatttttgcttttcaaatttcctcttcactagcagctagggcagctgcatgggtttgatttttgcttgcggtcgatttaacacagctgccagcgaaaatgaattatcactggcggtcggtgtaagacaaccgccagcaaaaatggatctttgttgacggctggcttaagacgaccgccagcgaaaatgaattatcgctggcggtcggtgtaagacaaccgccagcaaaaatggatctttgttggctgctggcttaagacgaccgccagcataaatgaattatcactggcggtcgataaccgccagcaaagatcttgatctacactggcctttgctttgtggtggctccaaattctgccagcgaaaacctaaaatggcaaccacgaaagatggttttcgtagaagtgttttgaccaacttttatttgtgatgggacataattgggatccgtcagatacaagaaaaatagggaaaaaattaaaaaaaaaagctatctggttagctagtcacaaactttcatctgggaatccaaaataaaaaattcataataatcacattcacattcatctaggcacaaaacaaaatcacagtcacattcacattcatcttggcacaaaatagaatcataaaaaaaaaatatagacactggaatggaaagcttatgctgttgatggacttcactgcggtggtgcatctcttgccatgcttgacgctggaggaggagtgggtcgatggccatcatcgtagccgccaccgcggcctctgaactcgaggagttcagatcttgtgctcacgagaggtggcagcgactgcatccaaaggggaagggggagaagaatctgtcatgtagctatggtagagctcatccggctgttcttctggtagagctcgagtggatctggaaggagtagaaactagtggagatctgctcgttgttcaccaccaccagatttggctatcggtggttggatccgcccaaaaggcggttcggggtgttcagatcccaaggccggcccagcactagctgcggaggcagagaatgggtctatgatgctgtggagttgtgcccctccaaagctcgtcactatccacgccagaggagaggtcaacagctgcacaaccacggacgcttccatcaccggtccccatggtggatggccaaatctagctaccatgaactctgggaaaagcttgatcccacaatggtcggcccgagagtggagatggaggtggcagccggcactccgtggcaaaaaaatgcagcctctagtgcgtggttaaagacgtatgtagaggcgtccgtcgagctagggttgcaagcgcttggtgaatcaaaagagagatgatgttggggaatcaaggttaggcacagtcagcaggagcaaatagataagattgaacttgttaatagtgatgggtaaataaaaataaaaagttgtttgaggggaatcaaggtttggtagtattttcaatccgttagagataatagtgctcatatgtgataggtaataattcaacatccgtcacagatgaatcttcacctatgaaccgaaagatagcatcaatgtcaggtctacacattaactcgtcaaagataacgtaacacctatgacgggatgtatcatccagcctcatctacaataggttttattttagcccgtcaatgataaagtcctgtgtgacggggcaatctggttcgtcacagatgggctgtcataaatgagtggacgcgctgtcctttaattttgatcactgtatatgataaaactgtaaggctgcaaccatcctttcctcttaactatttcctgagcaaaaacaaaattttggcccttccactatgaaatcacacaatgacagtggatataaatagaggctaaaagagatccctgtgtgttgagactacgtataagagaacgatatgcatcttgcagcctccatcgtatatcaagttaacaactgcgataaatcatcatatgtgatccgaacccatcttgattctctttcttatatcatctatgaattaatggaaatggaagtcatcaggaaccaaagcataacaccgttgctatccatgccaaccagaaattctctccagtggagccatcatctaggacgccgccgaaacaccgggccacttttcacggtcgacaagtcaggctgctacggtgatcagcgttggaggaggttaatctggtttacgatcatgctgtcgtcgctaattctctcctgtagcactactacagaaagcgtttttgcatacgggcggaatcaattttcacatgcggttggccggcccgcatgcgtgaaatggtctgcaaagatcaccatttgcgtatgcggccgtcgcagccgcatgcgaagatcgatcttcgcatgcggtcacttaagacggccgcatgcgaaaatagatcttcgcatgcggtccatctaagaagccgcatgcgaagatatattttcccatgcggtcaacctaacaagaccgcatgcgaagatctattttcgcatgcgggcgtcttaagtagaccgcatgcgaaattcaatttccgaatagctaaaataatatttattctagccttttagtgagatgtgtctcgtaattaatattaaattattgagggatttattatcgtatttcggagtagtaagcatataagataagacaagtgccgcagtaacaaacatgtaatacataaccattaattcaatcgtaatttacatacgaaatatataatacaagtggcacagttttttcatcatatgtataagtagtgtacatgttattgcatatgttctttctcccactctctgagaggtttaaatttgtcgtccattgcgagttcactctggctgtcgtagaagagacctcttgcgtcccagtcagcctgcgatatatgtccataatccgtaaatggtgggagcttcttctgaacataatcccgatttagatcggacttccactgtcgccatcgatctcccatctttttaagtgcgtaatctctccccctgacctctgatctaggagggaatacaaaatacttctgcaactcattccagagaagtgtctttatgttgtcgtctaccgtttcccacaactttacattaatgggacaacacgtcctgactagagtgccacaggcgttgctgaacttggaccgcactatcggtggctcgacgggcttcccatcctgatcgagagcaatcacgttgtaagtttccttgggtaatttattcttgcttctctcaccacgtctttttttcccactcccgcctgcacttgtagatgtctccgtacgttcaggtgcagacgtagcggtatccatctcaacttcttgctctgtcctgttcctcccggctttacgtttcgagcggcgtcggactaccatctgcacagaattggtaactctatacaccattaggttcatgtcacatcatagttagggaataatacatggctaacgattttcagcacttacgccctgttcgataggtatgtagtccggatcatcatcgtggggggcgacttgtgttatttccattggaaacgggtcacttggtgtgcgccacgtttcttcactacaaaagtctagctgcttattgctaccggaattttgaggagcgttaccttcttgaggcgctattggtgagttcgatggaaccttttcgttcgacatcttccaacttgacgtaaaaaaatttgacataagtcccaattttactaagtcccaatttaacgcaatgtcacataagtctcaatttgacataagtcccaatttaacataagtcccaaatatacataaatctcaatttaacataagtcccaattatacataaatctcaatttaacataggtcacaatttaacttattttcacataagtcccaataacttaatttcacataagtcccaatttaacataattctcaatttaacataagtcccaatttaaacataagtcacaatttaacataggtcccaatttagcatcagtcacaattaaacggaaatctccatttgacataggtgccaatttaacaaaagtcccaattatacataaatcccaatttaacataagtctcaatttaaacatcaatctccatttaacaatctacaattaaaccttctcaaaattaaacaatcaacaattgcacatatcacaatccacgatgcacaattaaacaatccacaatccacaattgcacatttcactttttttttaaagtaaatgttaccgagcgacagcgagggggtagaagtcctggcagcggcgtcggcgacggcgagggacggggacgacctggcggcggcgatggcgacggcgaggggggagaggtccgtgcggcggcgacggcgacgacgaggaggtagaggtcctggcggcggcatcggcgacggcgaggggcagggcgacttcggggaggagccggcggtggcggggacgacttggcggcggggacgacttggcggcggcgacggcgacggcgaggggggagaggtccgtgcggcggcgacggccacctggcggcggcgacggcgacggcgaggggggagaggtcctggcggcggcagcggcgacggcgtggggcggggcgactttggggaggagccggcggtggcggggactacttggcggcggtgacgacggcgacggcgacttgggaaattttggcagcctggcggctagggtttcgcgggcgccaggacttagaaaattttggctccccgcgctccctatatataggcgcagatcatcgcatgcgggcggcttaagggaccgcatggaaaaaatatctttccatgcggtcgacatatgccggccgcatgcgaaaattatctttccatgcgggctattaagccagccgcatgcgaaaaagatatttccgtgcgggccataaagccggccgcatgcgaaaaagatctttccatccggttggcttaagtcgtccgcatggaaagatctttttaccaaaaaaactcatatttttttatttcctctaagtaaactgtacatatatatttttttcccaatatttcgccacaattatacattccaaatgtttttggcactaagaaaactcatgaaaattgctcaaaactcgtaaccaaatgttacatgctaatgattacaacataagggggacctaaattcatgcacgtacatttggaacacaatgagaactaaaggttacgaaataactatgacttaataaccttggcaacaccatctgctcgaacgtacgacatattcacttcatcgattgttcgctcaaccttcttaattcgcataggaagatcagtaaacaatggtacatcgtcgaactggttgtaatcattggggtcttcgatgttgtcgatgccgacgatctgttgctttccggatatgacaatagtttttctttcatctgaagggtccttcacataaaacacttgagccacacgctctgctaaaacccatggatcatccttgtggcctattttactgtgatcgactatcgttagcccgtagtcatcaacggaaacccctgttgtgtctttaacccattcacaacggagcacagggatctggatgtttaggccatagtccagttcccatatttcttgaatggtcccataatacgacctcttttctccactcgtgtcaatcgcttcgacacggatcccactgttttatgcggtgcttttcatgtctttcgtagtcgtactcaaggtaaatccaatgatgtcgtaaccttgccatgaattgacaatacttgaaggcccacatgccagtctttgtagagtaagttcctccacagaatcaccaactggtaggtttagatctttcaaccccagaggaaagcgacgcttgtgctctcttgatacccaatcattggaccgccctgggaagcaggctttgatttcttctaggtgtcgctcaatgaatggctcaacgatagcgagctgttgaagaacgctgttgtgtgctgcggacacctttttgtaatcattatcgaagaactgcttcctaccaacaataccccttccagacaatctaccttcatgtcaatgaacaggaatgccaatggcattagcatcctttatgtagtccatacaacactcgactgtctcttcagttgtgtatccctctatcattgatccttccgggtgagcgcgattgcgtacatagcctttgaggatcgacatgtaacgctcataggcccacatctgatgtaagtataatggaccaagttcaataatctgagggacgatgtgaacgatcaaatgctccatcatatctaaaaatgatggtgggaaatacatctcaagctggcatacagtctcgacggcaaatgtctgaagcggacctaattccagaggatcaaataccttctgcgaaattcgattgaaaaagtcatggactggtttgttataaccacctttgtatggactggtttgactgcccttatagcaattggtaggaataccgttagcagcctatgacagtcatgcgcattgtatcccgaaatggtcaaatccttcatggatactagcttcctgatgttcgatgcgaaaccagtaggcactctaaccccttgtaaacatttacagaaggcttttttctcttcaagtgtcaacgagtaacaagcaggaggaatctcggtcttcccatttggcagcactactgggtgaaggtcatgccgtatggacaaatctacaaggtcattacgtgacttcaatccatccttcgttttactcgggatgtccagcaatgtgccaacggtgctatcaaacacgttcttctcgaggtgcataacatcaattgcatgtcgaatctctaggtccttccagtaatctaagtatttaaagaaaattgagtgcttcttgaaaggcgacgcagtaccgttgtcaccatcagctttcttccactttactgtcttcttctttccctttccatatacaaccttaatcttctttgttatctcatacatgtatgtaccacctcttgctactggggcagtgtcattctccactgtattatcgaacaatctagccatcttacggtacctatgtctttgtggtaggaaccgtcgatgtcgcatgtacactgtcttcaaagacgacgtcaggtatttgtacgaagttttctccagacatatcagacatccagtcttccctttaatctgcccagataatgaaaagtttgcaggtaggtcattgatggtaacgaatatgatcgcacgtagattgaagtgctcccacttaaactcatcccatagtcgtaacccctctttccaaagctcctccatgtcctccatcaaaggcttaaggaaaacatctatgtcgattccaggttggtttggaccttgtatgaggatagtgagaagaatgtactttcgtttctgacatatccatgttggaagattatacattgtgagaaggactggccatgtgctgtgcgagctgcttaagtcaccaaacgggttcattccatcagtgctcaacgcaaaccttacattcctaggatccttagcaaattctgggtgttttgcatcaaatgtcttccactggcaagcgtcggcaggatgtcgaatcataccatctattttccagctctcttgaggccatctcatcaactcagcatcagtcgggtttgagtacagacgcttcaggcggtccttaattggtaggtaccacgtcaccattgaaggaatcttcccgcgcttacccttatcagaatctggatcagtacactctgaatctacgggcccattccccgttttataccgacttgtgccacacgttgggcaacattccaagtccgcgtattctttacggtataatatacagtggttcttacaagcatgaatcttttctacaccaagagataaaggacatatgagtttcttcgcttgatacatgttcgatggtacaaagttaggcttaggaagcaacacacgcaataaactcttcagatcattaaaacttgtgtccgaccatccatgtttagccttcaatctcagaagttcaagcactgaacgcaagactgtgaaatccttatcacatcccttcgtttcatcgtaaagaagatccttcgatgccttctctaatgcctgccaattctccaatcctcgtgacctgcccgctagcacctctggttcaacatggcgtagcatatcctctaaatcaaaaccaccatcgaaatcatcactatcggtggaaacatcgacatccattctttcacgcgacatgtcttcgattataaaattctctgcctcatttatctcaaaacttaactcttcatcgtcatcttccggattggcgaattccccatgataggtccaaaccttgtagttggcggtaaatccgtactccattatgtgacccaatatttcaccaggatctaccaacaatttctgattcttgcaatgacggcacggacaaaagatctttgtcatattctccctcaaagcatgcgccttagcctgatcaataaatttagatgcttccttaataaatatcggttgcgttctccgcatctcatacatccatgacgaccgatccatctaattatataaaggcaaaaaagttacagataaaaaaatagaccgcaggtatttcatacaaaagtttaaatgcatttgtctcccaaaaaaaattacaacaatacatgtaactagtatgtacaagtgattacatgcaaaatttgcccatcaaaacaaatattttgaagctagattttgcaaaaaatagttagaacaaaccttgtcaaaatattaaaaaaactccactttccaccaacgaaatataacaaaaatggagccaaatgaaggaggatagagagttcttcacctttcgtatagagttcaagcaaaaatttcgagttgaaaacctccccccctaattggtgcttgctttaggagagagaaagcttcgttttcaaatggtcaagctcgggcctggaggagcatatatggccgatcatcgcatgcggctaatcgacccgcccctgggggggcggtttttgcaggcgccgccacaagcggcccgcatggaacctaccgaccccctcgtacagaaaaacgaattttgtagtagtgtcgtctgcacttcatctcatataccaaattcgcacctagatcttggatttgagaatcaccatacggcctgcttggagttcaggagattcctaacttctattgttacaaaacgaatcgatgagggataaaccctgtgtatatatgctgtagaagaaccggcacgtgctcaaactctgttctgagttcaatcaaaatgacagatgcttgaaatctgaaactgtaattctgaagaaattcaaagaaacaaaaatatcagcagtagtcataaatattagtctgtactatggagtttggaccttgacaaaatgggtttgtttattgcattgttgatcaaagagattagactataacatagaatacgtattgaccatggatatcccaaccaatcaaaacatatcgaatacaatacaaacttatcaaaactgtcctggcctatctttttcgggtatcatatccattcaatgtttcatataagagtttcattgtccatcagaaagcaccagtgatacgtactaaactctatactaaactaaatgttttggtaccttgagatatatagtatcttaccaaattttacattagaaaatatggtaactgatcctgatacgatctcaaggactatcaaagtactcttacttgtaagataacatgcctattcaatgccaatcagaatatatattggacgcaacaaccgacatatgtgagcatatgaatgctcagagatggacaagaaagtgcaggctctcgctaccagaaaagagcaacatctatatgtcgtgcaaggacacaagcacatacagtgtgggaatcgaaggcatcagaactacaggacagtataacatagtgcgagacatctttgctttaaaacttcgcgatattctctcgcgtcgccctccccaccggcgacacaagaggcgacgccgccgccgtcttcttcctcctccccccctccttctctgcctcgccgccacctgagcgggtgccggcaaagccgcgcggccgcggggacggcggcggcggggcttttgcccagcacgcgctcggcggcccggggagctggccgggcggcgacggtagcaaaccgtccggatctgcacccgcccggccggatccggcggggtggcgcttggtggcggggcggagtggtggcggcggcggctggaggtgcgtggtggtggtggacagggccggcggcggcggaaacccccgcccagatccgcgccgttttggccggatctggtggggctaacgccgggcgacggcgggcggcgaggaaacaggcgtgctggcggtggggaagaggtggcggcggcgacggttgcgcgggtggcgcagctgggcgaggtcgcggcgcggccgggcgcgtgtgagcgtcgccaggcggcgattgaggccgttgcccggaggccagtgaggatggcgatggtggccagaggtggatcccccccccccgagggcggatccggtgcggggcaagctcgcggcggtggcggcaccgcggagctcgcggtgacgtcggcggtggcaacggcgcgtgagcacggggcgccggcgacggtggcaatggtatggatttcatggcgacgatggcagcagcggcttgtcggcggcgaaagcacggtggctggttgacggcattggcggctgtcggctactatggcattgcggccctcgcggcgaaggcagcggcacggaactcgtggcgacggttacggtagcggctggacaacggtgatggggctgtggctggccgacagcgaggtggtgtcggcagcagcggctgtggtggtggtgggaggtggcatggtggcctcggtcggctagctgagggtgtggcatacggttgtatctggccagcgcgggagagtacggaggtggggtcggagattggcttggcgcagagaggcgcagccgatggcagcggaggccgactcggtgcaagaggcgcgggcggcggagatggaggccgatggagggaggccggattggcgcgagaggcgcgtcccgtggaggaggccggtttggcgcgagaggcgtggccggcggtggaggaggcgaccctggtgcgaggaggagatgccggtgggtgtggcgctatcttcggcgcacgaagcctagccggcggggggcaccagtgcagggttccccatgtcggcagaggctgagtggtggtggagcatcggtgcgttagccctggattcgcaagcgtgagcggcgggtgaaaacccagcctggccttggtcgggccgacaacaatggttttccccctcctgatggcgttgtcgtgctgtctcacccctcaagggcggttgctgggcataagcccagtcctggctcttttgagccccgacggacggcggcggtggttttccatcgcttttcttcttgaagatgtcgttttggcaccccctagctgtagggcgatctcgtctatgttcctttattggtctagcggcggccggtccgatgctagcctcctcctggtcatgtgtgttggcgctgtcggtgtgtgggaggcggtatattttttctttttcctggttatgaccctccagggttgtaatcttgtaattttttactgctttatcaatagaacttcacaccgtacttcacaccgtctcgtgcgagtcgttcaaaaaaaaaagaactacaggacagtcattccggctaaatttgttttgtgcgtcatctgcgggatgtccaagagcttcctttgttttaatcgtgtccgtagattagtcgttggattatacgaaaattgatacaattctcgtctcaataaatttagtagatttatctatgcatttccacaatttataggacacctctgagtatttgtcatcagtatcaaagtaaattgaaaaggagcactttcatgaattttattaggagtcaatatatgttttaattaggattgaaacttcatgtatcagtggataagtcgagatgatacaatcacagtgaacaaaacaaaaatttgcaataacataagatcattaaataattgattctgtagttagtataattatcgtttattaatatttcttctattgtcaagtagtagtagcgccaaagaaatcattttttaagaaaatataatgcaattttcacgttcacctactttcagaatatttctctatttgtatagtaccttctaagttccattctttgctaatcccttctgtacttgagacggagaaaagatagtactgtaacgtttaggatgttacttgccactttgatgtttgtgaatttagacagctaagaacgaagttgagtactgatgagaagaatgaatgcatgtatgactattttttttaacttatactccctcgtatttattttaatgtatgacgcgttgacttttttatcaacgtttgaccaatcatcttatttaaaatttttgtacaaatatagaaacattcatgtcatactgaaaaacatttaatgataaatcaagtcataataaaataaataataattacataatttttttaataagacaaatggtcaaacgttggtcaaaaaaccaacggcatcttacattaaaatacggagggagtacttttttatatggttttgaagttattaggattcaaatgatgactgcatatcagaagattttagcaagtggaaactaaactggatttacaggtggccaagcatcccttgacggggaagcaagagggacataagactggaatcaaagtacacaaataattaaggcccgttcaacctagaattttagaaataatgggagctcaaataatgttttatgtcaaatgagcacaactatttagaaaaggtagtgagtgtatcattaggaatcaagagtaagaaaactagtacatgatgcaactacatatcatgtattattaggagaatcaagactaagaaaactagtacatgatgcacagtgcatcattgatcactgcaaaatcactgtccatcagaagactatatcaattcagactcaatcatcttttattttgaggaaatcaaaatcatctttgaaggtgaacaagattatgtcttttgacccatgccggccagcatccccacccacatttccatggatcaaatgcaacttaggttgtgagcattttgcacgttttgacattctcttatgcgttagtttcttcatataacattttgatttttttttgcttgcataaacacataaacgcataaatgcatgtcgtttatactacctccatcccaaattatatatcattttgaatttttgcgtgcaacatttgaccgtttgtcttatttaaaaagttagtgtaaatataaaaaaggataagtcatacgtaaagtactttttgataataaagcaagtcacaaacaaaataaataataattccataattatttgaataagacgaatgatcaaactgttacagacaaaaactcaaacgacaattattttgagatggacgtagtactaccaaaaaataaaaaagaagaatagagcacatgacatgaccgccatatatacatgaccctttcttcctttttttttatctcatatcaaacataggtattggtttcttttttccttttcattatgaagaagagccagccaaccatttcttgtttttaattttctgagaaaaacacatggtccttgcatattgataaataacattgggatataaatagaagccagatcacccgtgttcagatagagttgaaggatcgaggagaggatgatgcatgctgcagagcttccattaatcaagcacggcaatcattaaacatctcacttggttgatttctctcacctactatatgaatgaaagtcatcaggaacactactactgcttctggagcagatcaaggctgatgaagtcaatgaagaagtctgtgactttactcagtcataatgtcatcagaaacactactataagctcatgtccagattcataatattaaaaatatcccatccatccaaaatcccttatattttaggatggaggaggtatattgtccaatcgtgtacatgctttttgcgagaagaacgtcaacattgtctaactcttattcgagtacaatcaaattcagcaagaccactacactgtgcactgcggcttcaactctgaatgctaattattcgaaactgcaatactggagaaatcgacgggaaaaaccaggtgaaatcttgtttaaatcatcaatatgggtccaggactccaggcctcagaaaaaaaaaagagtttgtttattgcattattgagaaaatccacttttgaagttcataagtaatatcgggcaaagtcatcaaaatgctcaacatctccctcttctcacaagcatgtccattccatggtaatggtacatatatgtgtttttcagcgagagtataactccatatactctgtacataatacacacttacacctgattgtgttcttcacataagcataaaaatatattgttggaggcatggataattctaaaatgattgggaactagtgccacgatcttatttcacctcattatttgcctcaagctttttcttatgctcaaatagttagtcgcaatgacaacaaagtagtgaggtcaaaggttaatttaccagtcatcgataaatgaaggcgtaaagagatttcatgttctgtggtggagctgaagaaggagaggatgatgctgatgattccatgcatatatagatcgagcatggtaaccatcaaattcatcgtattcaactcatcttgatttctttcccctatgataatatgaatggaagatattaggagccaaagaattaccaatgacttgatgatgttgtaaaatcaaagtgagtttgattcttattctgtgataaacaattggcatttaatatttggaaattattggcaaagtggttttggagatgattggattttataggtgactgacagggattgctgtttgtcgggaccggtcagaccgggtatgggttgccggtcagaccggagtgtatcgagcggtcagaccggcctgcccacagtctgaccggggcgactctgtgttagttacaatttcgggttgttttattggatatccatgattgttttatgattatggcttctagatggatactatacgcactacaacaaaaacctcgtatagaggcactttcgtagaggcgttttgtaaattgcttctaatatcataagttttattgtgtagagacactttatagaggcactttaacaatttcctagaaaaacttttgctctagagatattttcagctcagtttattagattttatctcgtagaggcattctttcggtactgtaaaatatgcctaatatgtaaaggtattttcttgagacattttaaactatttagagacactttttagaatgataatatgtactaaaagactaaatataagtaactaaatgcgcaaacatattagtaatgacaaggagttgagttggttagttgtcacgctctgaagttcccctccttgctttaaaatttgttaaataaatcgcccgaagaaattgtttaaattaacctggcgttgaatccaaattaataaatgcaaaaaaaaataatcgaaatcggcatgtggaatttttcttcgattctacgtgtcaaaatatgctaacaggatctttagtggaattttcagagccttggaaataattttaaccaattaaaataagcaaagtacaatatttaatccgtgggaaaatcctttttttcccttttctcttttctttttccctcctttttccttctcttgggccgccggcccatttcttcccgcgccggcccgctcctccctcccactcccgaagttcacccggcctccctctccctctcgggcgctgacaggtggggcccacctgtcagccctttccccaacctctagccgctcccccaagccggcaaccgccaccgcgcccacgccgcccgccttcctcgcgcctccgtgcccccactcaccgccctctcccgtgctgtccattgcgcccgcgccgctcaccccgccgtccgccgctcgccaccgcctccggtcgccgctcgccgctactagggccgccgccgcaccaagccaccaccgccgtcaggttcgcaagcctgagggccgcctcgtccacccctcgtccatcgcaatccgtcgccggagatcgccgtccacctcgcgccggtgagcaccaccattgccgccgccttaggccatggtttccgctcacagtaaaccttctctctttctctaatccccctcgttgggctccttaggcccacccggagttcgttctccactcgtcgccgtctcccggtcgctcgtcgccgccgttcgccgtcgcctttcccccggctggccgaacccctcggtgagaactccctcctctttccttcctctcacgcgcgccgctgctccccacatgcgcgtcgccgcaatgcaccgccgcccgcgccgccggccgcccgcgtcgtcggccactgctgtcttctcgccggtcgccgccgtcggtgccgcttgccgtcgccgcatcgcctaactggcctgccggtttgaagccaagccgagccaaccggccgcctccccctccccttgagccactgccaggtggggcccacccaccagccggtgccacctcctcccccttgagccgctgacatgcggggcccgcttgccggcgccgacccccttatcgatgacgtcagccctgggaatattgcgcaataatcgaataaggacttttctttaatagtaaaaacacagataatcttccaaaaatcatatctaattcatccgagctccgtttaagtccattcaagtctcagtaaattcataaaaatgcaaagaatccattaaaaatggttttgtttcctggttcagtagactaatagcatgttttgcatgtgtgctttgtttgtcacgtagatttcggccgttccgtcgatccgcggtttctcgaagacgttgttgtggtctcatcagtgtgagagcaaggcaagtcatgcattacaattgatcatattgtacccaatttagaaatgtctctcatttctattaaatgttgcattgttttacaatatcatgttggatgggtcctactactcagccatatattgtttaccttatgccattgataacttgggtattaaaatgcttagattttggtttagggaatgcttagccatgcttagttcaactagtacacgaagggggaatcacattaatgcatagactttgattattggcaatagctttggattagtgccactgcaatggtgttagtgaattaaaatacactacattgtgggctgtgggtgcatggttttgctagtcgtgcccatggcgattaaggaccggttcgcgggatgccctataagaacttatcgtacttaccacaagccagcgtgggcaatggctgggcttgtagtgtagctttcctctagccgacgtacccaggtgagggtgggcgtgatggagttggttcagccggggtgtccagttgatcggcttccggattcaccgcggcacgagaggggggctgcccgttgcctgctggggacgggggtgaaccctgaggtgtggtgcgatcggttagagagggttatgcgaagggtcctgtcacggcctctttccggtatgtcgtggtggcatgtcggcgcacaggaacgtgtcgtgggactgtgtcttgtgggtacagttgtaaacctctgatcagagtaaaactattcgaatagccgtgcccgcggttatgggcggtcaaccagattcaccgtgattagtctcacccctagttagctaatgaactggtgtagttcaggtggtttgttgggcctgttgcaacgtggtgtggcgttggacagtgattggttaatattgattaattactacaactgttttactgctttcaactactgcttttaaatgcccgctttatgcaaaagaacctttagcctcctttggatacatcttgcatcataccttctcttccggtatgacttgctgagtacagtgggtagtactcagtcttgctctcttttcccccacaccagagttgaagttcttctcagttggggatgtctcgaagaagttggtttcgtcgctgccgtcaaggatgcctgaggaatggagtcgcccgctgcagtagtcaagtcttcaggcttagctcgcttttatcttttccgctgcatttgtaatcttttatgtttttgtaagacgtggatctgtatgtcaacaattgtcgtttgtgtaccctggctggtcctggacaggggtttaatgcatattcagcttagaaattctggttcgtgaatttctaggcgtgacattagtgcattgaagataaaattatttgttcaagaaatcttgagttcaaggcttgacaaatgcaagaagaccattttattatctttttgactggtttcataagtctgtggtacaatttaatgtctctagaaaatgcctctaccatcttatagacattttacaaaatgtctcttcgtttgtagagacaattcaccataacacaattattagacattttttaaaatgtctctacagtattgtaaaggcatttgaaaagtgcctctacagtaatagaaaaatgtctctacaaagcatttttttagtgaagtatgtaatactgttgtttgctaacaatgagtcaggttggagatagcttggtctcggaatatggtttctttgtttgattcatgtgtaggtgacttgatgcctcgggagagtattggcggtgatggatcgggagttgacttggagataaggtgacgtccgtgacggtcagatatcatgcgggatacttaggctagagtgcaatgcatgtggttggtgaatattccatatggcatacgatggagatattgtgtgcgtatgggatgcgaagtcgaatttggaaggagttcaaatttggtatgattggagtttgtaaagttggtttcttgtacgagaaggtttcctaggtggattaggacttctagtatgagtttggttcgtggctttaggctgcctaccccatgtataaatagagagggagcgtgaggcttcccggtatcgcttttgagagcattgagttgatagtttagttagggtttcgagtttagtcgagattttcgtaaggagtgctgttgttgcactttgtaaacatagagagaagtaataaagttgtcatctactttgacagatcttcaatctatgttttctcgggtgcggcggtccaaccggcaacacaccaccggtcagactgatggcataggctcagtcagaccggtggagtaacggcggtcagaccggcgatggctacaggcgacattggctaatctcggtggttataccggagcaacaactgcggttagaccgacggcttccaggcggtcagaccggctcggctacttcggtcagaccgcgatccgtcgaattgagagtaacttttatttccactaaaagttttggtttttgggtacaccaaccatttatccctctctggttggcttagttcttgtgtttcaatcctacatatgtgtgctgaaaattaagaaaacaattacgtgatcttctggtagacaaaacgactaaagtttacatggaggcgtacaatggatgacaaaattgttgtttgttagagtttttatttttatttctttttttgttctgtgaggaagcagggtacacctgaaaagcatattatatgaaaaatatcttattgatgctgatgttgatcagttcccggaacataaatttattgatgcccacgagcatggattaggatcgcactggagaaggaaatacagaggtgggagaaggaaatgcagaggtactacagtattttgcattagcttagattttaatgcgttcaacagtaaaactggtaactgttagagcactgtgctaatgaagatcattatagtgcaaggctcagatctccaaagacaacactaatacagagtacctcatatgtgccaatagagagccccttatatgtgcataggtgccaatttaaaagtatctttacccatccgcataggtgccggttgtagaatcagcacctatagagattatagatgccggttctacagctaaaataggcaattatactctttgaacaaataaaaaaacccgagaacccacccacaaattcaaagcaatatcacctcgttggggccaccatcatcacagattcgattacagaatcaatctcataaaacattcatcacataatcaaacacaagaagagggaaaatctagaggaaaaatttgcaaaaggaaatctcttaaaacattcatcacaaattcaatcacatgaagagggaaaatcacttggaccggcggctagaggccaaggcgcgcagccgccgccatcactgcttgtcgtgggcagctcttgttcagtaaccgatagggacctccagaatcagtcggattcgtggcccccaaactccaaccgacgaatctagcgaccgaggaggaggagggggacgcgcgccactttgcctgctgccgcttggagagaacaggaggaggacgcaccacccgtgacgaccgagtggtggcggcctcagcgtgcccactgcgcgcaaccgctcattgccatcgcgcccgctactgccacgcccgctccaatcgccacctgcccctgctgcgctcaatacatgatgaagagagggaaagaagaggtggcaatcgccactattcgcaaagggggccgccgctgctgcaaggagaggaggaggcatggcgtgggagtcgagaggcgataaggacggctgggcttggccatgtggtcgcatggataataatgatgcgcggcatcgacaggagtgtcaatttttaaacacatataatatatattattatagctgatggtttttcctctgtaaacgctatctatagtgtttaaggtgttggttcgatatatatatatatatatatatatatatatatatatgtttttttttgtcatgtaaaggtaggaaaatgaaccatcacctatgagccgtcctttataagaggtttataagaggttttagtagtgcatgcatcccacgaggatatataggatggtgcaaattactgtaattaaacatggttgcgtatggagattgccgatcgatctagaaattaagatgcgatctgttttgtggagtaaccgtaatggctgaactatacaatgagggtgaaatagtattaaaaaaaattatgtaagcgtgaagtgagcgtagtttaactggttaggtttcttgtggtggaaccaacgcacctggattcaaattctagatttaacatgagtgctcgcatttaattattctttctgtggcagtgtgcacacgttgtaagcgtctgcatttgtacactgtgtttctaacaaaaaaaaaagggtaagaaagagcacatgacattatgtcacaccatacatgaccctcttgtttttcttcatttttcaaaatacagtacaaacgcatatgctcataacacgtgcgtgttcacccctatgaatacacacgcacattactctacccctgtaaacatctccggaagatttggccggcctatgatttcttgagcaaaatacttgggcattccattatggcaaataacatgagcctacaaccaatcacccccatgttgaggtggagtggaaattaaaggatcgaggagaggatgttgtatcttgcagcttcctcgatcgagctcaggaatcatcatcacatctgacgatcactttgtttttctttcctatgtcatatatgaatggaagtcatcaggatcaaaagcctaacattgttttgttctcacctcacacaactattgcttcctgaacggacgcaaccccgaggtggccgcgggcagagtgaaccacgtattctggcagacaagtcagttacctacgccgtagcacttggaagagcttgggtttagcagcaattaatcatcgcgcgttcgtcgctgtcgtctttgatttgtttcatcttctcatggaattcatcctccttcatgtaatccaagttatgcgcgaagatgtattggagatgtaataataaaattaagtctctaacttctcgaatattagtaagagcgaaaccctccgcgtatttatatgttgttgcagaaaattaaaacatcaacatgtccaatcccggttttgggttcaatcaaacttatcatgatgtactgattgtattatgtaccgagggttcaaatatgaaacatcgattttaaactataatactggagaaattgacatgaaaattcaagttaagtcataaatattggtctggtactagtcaaaatgagtgtttagtgcattattcatcaaagtgcttagtgtattattcattgtatccctacggtccatcaggtataaaagccccgcaggcatccactgtccattaagctagaaaagttggacttgctaaggtttgatactaaatgtaggatcttaaagggtttttgtcaccccaaaagctagccaatgagatgagaggctccccacctatatatattagatcatttgacctttcacaaccaatgtaagactattaaaaaaaacaaccaatacaaaatgactatgcatggaactgataagaaatattgtatgaaatcatcaaaacagtcctagccttattcgttcgatgttttttttaacgataatatttccattcaatgctgattaccatataaattgaaggcgacagatgtgagcacatgaatcgtgggagttggacaagaaagtggaacatctttctgtcatacatggaaacaaacacacatatagcttgggcatggaaggcatcagaaagaactatacagtctgtggacttggcctggtgagccatctgcgggatccggcgacggcacaacagcatttagcttgcagggattagttgttgagttatatggaaattgatgcgaatatcagcatatttgataggttttatatgtgtacgagtattttgacaactataataagatatccatgtgcatttgccataattgtcactagtacaaaaaggatttttgcggacaccccaaaaggggttttctcgtgcacggtagggctagccgcacgcacaaaatggtctgtgaaagtagctatttctgtgtgcgggtggcgcacccgcacgagaaaatttaattttcgtatgcgggtgcttatgttgcccgtactaaaaaaataaaaatccaaaaaaaactaaaaaaaatcacgaaaccctaaccctgaagtagccacgccctcctcgtggttgcagtcattgcacaaagccgccgttgtcgtcgtcgcggtcaacattgtcctcgttgtcgtgggggcgtaaggggctaggggcggccgggtccgcccgctcccattgccgtgccgccatcgctcctcaccacagctagatccaccgcggccgcatatccccaccaccagatccgccgctgtcgcccatccccaccaccagatccaccgccgccatgtgtggtgagagcagccgtcatcggatccacgcgggtgacagccgccgcgccttcacaccgatggattttctgccgccacacggccacgcgggggagggcggccatcgtcggatccccgccatcgcgcacctccaccaccctgccccgcggcctgagccctccattgtcgccgctgctcgccgccgtcaccaccgtgccatcgccggagctgctgctgagagggaggagtggggagaggagtaggggagtggggagagatagagccaggagaggagaggatcgagtggagtgggtgatggagagagagaggagttgagattaaagaatggaagtgggaatcttttcgggtctttttgcatgcggatgagttaagtgccccgcacgaaaaatatccttattttcacgtgtggatattttaagcaggccatctgaaaaaaaaatggatttttgcatatggatgtctcaaggagctgtacagaaaaatgagggtcgatttttgcaaacgtggaaatttatggtccgtttgtaatctattgggggtgctcacttcatgtctggtgagtttggtttttctatttgtgatgatatcaattatatggccatggactagataaagccaaatttaacacagaagatgaagatgaatatggtctatgatgtgatagctagaaaggaatctaatttttcttggtaaaacgactatgatgatatgatagaaggtggagcactattgtaagtggagtcaggatgaagaaattgcggagatagagaagtctcttgtttacggtgagcttggtgaaggtttgtcggggcggctccatgtgagcggagaaaaaggaaccaactcaagtctgggtgcagagagatttacacatggagcaaattcgggttggtgtggcatatttgtcaaggtggagtttgttagagtttgtatcgaatatatgcacgtagtcagttactgttaaggattggagttgcattagatgtaggaataaagtaaaagtcagactatatatcctaggatctctcttaaataggtcggtggtccttttgtaaccgcatatggcaactttacatagcaagagggagaggctgttagaggcgactggccgtgagtcattgtaactataatacgctatcatatactggatcggggaggagcgctcgtaatcagtatcctgatgatataggcttcggctgaaccttgttaacagatatcatatgtcattgtcattatcgtgtttggatctcctatgacgttttgtcctcgtttgatttccgatttgattttggggccggttttataacagaagtaaatcgcagaggaggaaaaaaagattccaagttgaaagccgatcaaccaggattatttgccattcatgtaaacgcaaaggccatcatcatcgatcgatcaataaatagaggtgaaaagaaatcacatgttctgtggtggccagctgatggagttgaaggagaggatgatgctgattcttccatgcataggtcaagcatggcaaccatcaatttatttcccctaacctatgatgatatgaatggtagacatcagcaaggaaagagtaacatggtcgattgatgttacggaaagaagaacaatttccggattttatggtagacagctacgtctaaaatttttatggaggtggcaatcaaaacagattatgtcctgaagagtgaaccacacaactgcgacttaggcccgttcgaactatgaagatcatgtaaagacagaatccatggacgcatgattaagtgatcgttcaaattattatgaattttaaaaatatatctatttaatattttagagcaacttctacgttgaacgtgtctgccatactgtgtatgataaaaaatatttttcgttagagtttttgtgattcgatcctacaagtggtatcagagccttgttttcttctttggatttttatcgatctagagtttttgccatggctactcccgctaggttttcaactaagcctcatgtttctgatggaacggatttttctcattggtgtagtaggttgcaatcttacattatggctgaagattatgatatttggataaaagtttctcatgcttatgtaattcctgaagctattaatactgctgctgaaaaaactgcttttgaacaaaattgcaaagctcgcaacattcttttgagtggtatttctcgttcggattatgatcgtgttgctcatcttcaaactgctcatgagatttgggttgctttaagtaattttcatcaaggaacaaataacattaaagagcttcgtcgagatctttttaaaaatgagtacattaaatttgagatgaaacctggagaagctttggatgactatctttctaggtttaataaaattttgagttatcttagatctgttgattcttcttatgatgctaattatccataatctgagatttctcgtcactttttgaatggtctcgacatgtctatttgggagatgaaagttatatctatttaggagtctattaacatgtctactttgactttggattcactttatacaaaattgaaaacacatgagatgaatgttctttctcgcaaagttgattctaaatcgagtgctttagtttcttcttcttcctcttttgatattgatgcctcttcatctaagtcgtcttttcttgctgtttttaatgccacaaccgatgatcaactcgaacaaatcgaggaggaggatttggctttggttgctaacagaattgctcgagctatgaataatgccaggaacaggaaaagaggtagtccaaatcgttgctctgaatgtggttcaattgatcatcttcgttcgcattgtcctaagcttgggagaggcaaaagagaagacaaagatggtgagaagaccaacaataacaagcccaacaacaacaagtcgaagggttcttaccaagggaggaagatggagaatcttaggaaggctattcaacaagtttgcgccgcctttgagccactaagtgatgtagatggtgaaagtggagatgatgataagggaaagaacgtctccgatgtttgcttcatggcgtgtggtgaatctgacacagagtatgaagacaatgaggtgagtgcttttgaggaagctattaacattttgagtgcaaaaaataagaagtgtgagaagatgtatagaaaataggagtttatcattgaatctcttaaatctgaaattgataggttaaaatctcttatttctaatgatgatgattgtgaaaattgtgaggttttaatgaatgagatttcaaaaattagagttgttaatgctgcacatgatttgaaaaatagatcttctcttgcttgtagttttgctttgcacacacgcactttggatgagttgtttttaactaaaaagttgttgcaaaaatatcaaattgcttttcatgctagttagtttgatgtttaacatgatttctgctaaaaagttaaaataacctcatgatgttttggattgctcaacatgtaatttgaataagatgaaactaaaagatgctttaggtcgtgttgagtacatggaagatgttgtgaaaaacaatgaagtgctttcttgccctaaatgtcgtaaaagcaaaggtgtcatggtagattgtgaaaattgtgctaatttggaaaaagaggtttcgtatttgaaaaattctttgctatgattttctgatggtaaaaagaacctcaacatgattttggatcaatcaaaggttagcacacataactgtggtttaggttttaatccttatgctcataattctagacatcctcctgttgtgttaggtgttagtgctagaagtagtgagattttggttaaacctgatactaacaaaactgtgtttaaatctgctggtatcatgtctactatgaatgcatcttcttcaaaatccaatgttatacatgcaaaatctcctgttgttgctcatgttgctaaatctactaatgctaccaatgtgcctaatcatcgtgaaaaatatacttgttctttttgtggaaaagatggacatattgttggtttttgtttcagat

SEQ ID NO: 8689 - DNA, 5219 bp, Oryza sativa
agacaccaaccacaactagcagcttgcctacttggtcagtggagaaaatcttcaacccgccgaccacggttcgattcccaccagctctcccttttagacctattactttgcctctatctctccgttttagacctattattactttgcctctatctctccattttagacctattattactttgcctctatcaggctagattgctcagaaatctcaaatcctattgctactttgcctcagaataagtctactttgcctcccacatctcaaatcctattattactttgcctctcctaggctaaattgctccgcaattttttttatccgccctactttgcctcccacatctcaaatcctattattactttggctctggctagattgttgtgcaatttttttctctctgccactagcacgttagtaattctgaaatcttataatgaaccagtttttaatttgaaaattaagcataattatttttttccttttgtcatctgcaaaatacgacatattagagtccgcaccatctatcgtccacgcatgagccgtgaaaacgattcgtctccacgcaagtccatgttcgattttagaaattatatcaggctcttaccatgcatccgatggctgaaaaatcaaaagttttgcccctctttcttcaatagatatttagtgattctgaaatcttataatgaaccagtttttaatttgaaaaataaacataattattttttttcctttcttcatttgcaaataacactatattacagtccgcaccatctatcgtccacgcatgagccatgaaaacgagtcatctccacgcaagcccatgttcgattttagaaattatatcatgctcttgccatgcaagagttgagagagagcgtgttacgataatatgagtatatcaatatgcaatagcgtttcttatcaatcctaattatcattaatccagtgaacaatttatctatcttagaacattattatatacatgtcaactgtgtatttatatcatttaatctgtcaatatacccgtagcgaagcacgggcattttgctataataataacaaagggattttggctggaaaaacaggaacccggaggctatgggccaaagtactgctaggaacttatgggccactttctctggtggaacctgagcccgtgctagtgttgcaccaaaaatgtctctcttctacagatgtggacaataagcacttggatcatctatgcaaccatttggatcccaagatagaaaatacaaaaagaaatttaaataattcaccgagtcttctcgctgctttgcatttgttgtggccttgtggggggttcttcatgcacacctaagtactctgaaactaattatctgcactcatctcaataaacatgttccttaaccgttctatcattaatcaccaaaactcatttagggggctagatgcactttcactattctcaacttgctttgcttgtatatcaagtgtgattgagtctcttgtctagtttttatcttgcttaattgctcgagtcttttgctatatgttgactagattgtcctagagcagtcggacaatatgagcccctttacaactttccgtttttcactctgaccggacaatccaccacattgccaaactctccgactgctcctatagttagactgtccaacctaatgtcagactatccggttaagctttattccactgcaaatttttgaatttccaggaatgcctattcactcttcctctagctctaggcgatgtatcccatcctcaaggccatttcaaggacaacatcgatggcagagatatcgatggcggtgaggtcggaggtggctagatctggtggcctctaacctccgaatggctggatccgatgaggaggagcgggtgttgcccggatgtgatatgcatcctggtccaattaggatgaggcatgtgtggcccatgaaagttgtgtgtgcatgtttggtaccacatttgctagtttagtaagggtgaaaccaagttataagggcatatttagtaccataagagtttttgtgaggcttttgtgacccataagagttgtgtgtgcatatttagtaccatattgctaatttagcaagggtagaacaaacttatattttcttttgtaccagtagtgatgagtcagtccattattgttgggtttttaaataaaccagcactgatattctaggtttttttaggacacgcgtgagttgggggtgggctcgaaacccttatcggtgcttggtttagtctaatcgacacaaataggggtggttatgatggctattctgtagtacactagtacataaatgcccttatgtgcctgttggaaactggttgtaggtgccgctgaatgatcgattaatcctatatatacatgcgatggtgaaaattgcagtgtagccaaatgattaatcctatatgtacatgcaggatgaagaaacacgtggatgaatacaaaactcataatttcaacattgggcagaagaacaattgtgagttgatgaagttaaaatatcgatcatgtaataaataattttagtctaaaaaatcatgacacattgatcaaatccatcaattgggctagggttgaaaagtatggaaggaatgggcttttggcccaaaaccaaggaatagttataattaactttttcaattatagtgtatagcaattttaatgttttaatttgttgctaaactcctaatagttgtaccattgaagaaatgcttttacccgttgcaacactcgtgtattttttctaagttaactttaaatgagtactatcacaaactctgaagttgttaccaggttcaaaattccggaataatactttcaaaaagtcatgaatttaggcccgccctatatgaaactatttcgccgaaattttcaggaatgttttttttttgtgaatttagccaaagtagtttttcaaatttaacaaaacttgttcaaaattcaaattattctgaaatttccacaattagtgaaatttcggttcaagcagagtctccagatatagaaagctccaaacagaaaaatctgaacctagcttggtcgttatcagcttataaccgccagtaatggtagctagtagtagcagctactcaaagaagcattgccgacgtgatgaagaccgtacgtgcgcgatccggtgatctctcacctcttcggcggcggcggagcgcactgtattgccgccgccggcgaccactccgtcgtctacgacttcgagctcgtcgtgtaggaggttggcgtcgagctcctcgccaatgcgctcgcagaggttgtgcagcacgcagcagacggccagcatgttggctagctccggcagcttcacctcggcacgccgcaggcactgccaccgcgccctgagccgccggaacgcgcccaccgccgccgcgcgcgcgtcggccacgtgcgcattgagcctgtcctgcgcccacgtctggttgggctgcgtgtacggcaccagcatccagctcgtcagcgggtagctcgcgccgccgacgagccacagcggctgttgccacccgagcttgtcgtggccgagcagaagcccagcctcgcaccgggcgtacagcgccgacttcgcgaggacggcggcgtcggagagcgagccggggtggccgatgcagacgtcggtgaaggcgccctcgtcgtccacgacggcctgcatggcgacggagtaggtggccttgttgttccggtcggtaaggcggtggtcgtagtactcgccggcgtgctccctcggcacgacgatgcggacactggtggagaaaccatctttcgtcggtcggactaattccacaatagtctcggttgcaacaaacaccgggactaaagatccccggttaaaaagggtaacgggcatcaccaaccgggactaaagatctttagtcctggtttaaatgctgtcagggcctgtcaggccctcccgggatatttagtcccggttggtatcgtaacattagtcggactaaagatcccagcgatctttagccccggttcataacaccaaccgggactaaaatcccacccctatatatatatatatgtcttcgtcctcctccagcccgagtaagcttcaaaatttcttcaaaaaagaggggaggtcatgccaaaatttctattgaatttattttggtgattatatataaatcggaggtgcctaaaaggttagcaacttcatcctccaatgttttatttttttcatattacatttggatcatgttttgcacacttttttgtcttcaaaattttattgttagttgatgagagagaaaatttgtgtggagaagaaagaatatatagaaatttagtttatttgttaaagaaggttttataaaatagttgagaaggaaaatatagtgaaagttaatcttgaataatagaaaacaaagtaaaatgaaaaattaaaataagtacaacacattaatattagtttaaaactttataaatagtaaatatataattattcggtgtaatatttcataattttgtatgaataatgatatgtcattattgtgttactgttgaaagagtttgtaattattttataattattgtatgactgtcattattgtacgaataattatgtgtgtacgattttttttcatgtcatgtagatggatcggcaatggatatacgctgactggcggtccaaagagtttattgacggcgtgcattattttttgagagtggccgaagctaacaggcaaaagggttttatttgttgtccatgcaataagtgtaagaatcggaaggagtattctgcatccaggactatttatttccacttgtttgagtcggggttcatgccaagctataattgttggacatcctacggagagcaaggtgttgaaatggaagaagatgaagtggaagacaacaatattccgaactttgctcagtacgctggatttgaaggaaatcaaacgggcaaggaggaaagggatgctgatggtaacaacgttgcggatgatcttggtcagatgttgcaggacagcaaggaggattgcgaaagtgaaaagggggcccataaattggacaagatgttagaggaccacagaacgtcgttgtacccaggttgcgagcaggggcacaaaaagttggataccactctggagttcttgcaatggaaggcaaaaaatggtgttagtgataaggcatttggcgatttattgaaacttgtcaagaacattcttccggagg

SEQ ID NO: 8690 - DNA, 2569 bp, Oryza sativa
agctagggacaggaccttaaaggaactaactctttttgttgatgtgttgtttgttttgcttattctgcaagttgattaagcaaacaacctagcatggttacatcacaacccaccgatgcaaaccacgcgctacacacacaagcaaggaaacacacgacaaacgactctaccctagagggtggcttaggttctgcgacgggttctccaagatcttcactcctgcttcacagctggcttcactgcttccttcgcttcgctggcggatcctgcagtcttccggagcttcggcaaacaactgacgacatcttcttcttcgcaaagctgaccatctagtacttagttgaaatccgaagaaagaaaagagtaacccttttgcaaatagcattaggggaaggagaaaaagaggaactttcgcaaataattttatttataaaatatgtccttaggttttatccatttggcttatcctacagtcgagatggctctgataccagcttgtcgcgaccgggaaaattgccttttcccgaacgctagtgtattaatccccgtcccaggaaaagccggggtacaccacacaaacatgatataaaagacacatctttattatatcgataatatttacattattacaaaggcgcatcaggcctgacaatcaaaaataaacagcagcggactagcgggcctacggctccatcttcacaggcgctcaactggggtataagccaggactccacctaagacttcttctccaaagcttctcttactgaagggggaaaagattgagcaagaatgagtacaaccacagtactcagcaagccacaccggagatgcacaattaatgcaaaggagtacaagggggtaataatatagggtttaagttttgcagtaaacagcatttaaaagtcacttagttgcccaaagccattttataaagacgatcctagcgctacacagtattattaaacaaggccgtgaaccctcacgaacctgccttaacccaaggcctacgatgattcagaccgaactggcaacccgaccctgggtcccagctcgtcccaagccaacccaggccaaccattccacattttagttgctgagcaaattttaagaattaaaacactgacttgggtacattgctcggcttgcccataaccgagggcgcggctattcgaatagattatactctaatcagaggtgtacatctttacccacaagacacatcttcctcacgtgtaaccacgtgccacataccaccacggtatacggacggaagacgtgacatagtttccaacccatcctagccatagacaagagtaccgacccaatcccacctacggccggaacctccgggacaggcaggcaggactgagcccctagcagcagggcaccaaccctgtgccatgacatctcgactaccgggccgcagctcgtgtagccttcatttgccctggagaatgtccatcgacccccgacttcatccacctccatccgtgtacttttgtttataaccagactgagccacaaactaagccttacccacaagacatgtggaagtacggtagtgctttgcaacagaggcccgagcttaatccttatagtggccggggtgctacttcccacaactggcatgcacccaaaccccaccgaaaacaggttttaggggttttgaaagaggaagagaggtgtgtgtccaattccaacataagccaaccattccatagtgtccaaatgatatgagaatttcccaagtctaaagttgtgaaaccacctaatgttgtctaattcaaacagcgaagcatctacctaaattcatactagtggaaccatgaatagagtacccactagttgaggttttgtttaatctagggtgaacaagggaataataataacaatagcaataataaggtcataacaaaggtaaataggcatggctaaataaaacagtgataacgcgggaatttaaataaagcggtaatgcattaatttaaatcaacataattttataaactgggattcaatatgctcaaggatgatgtgacttgccttgctcagagagaacggacttccgaaccttcggcgacgaccgcgaaccacgcttcgggaacctccggaacgacagaagctacgcgaagcacacaagcaaagctacaagcctataaagaagcaataacagtacataaaaagaaagcaccgggttctttaggttataacaaacattaagagacttgaacgggtcgattcggagttcgtatgaccaagatatgatcatccgaagtttaatgctgttatatggagatttgcggattattataattaagctttgcaattataaaacatgtgtaagcgctagcctgggaaaagacaggaaggctgcgccgttgacatgcggaccccacatgtcaacaaaaaggaccacggtagaccgagtacacagagacggtccacgggtcgatggaagcggatcccgtgtgtcaaccgaggcgagtggccgacaacggactccactagacaccacacggactgcacacgtggaaaccacgcggctaccgagcggacacactaacacggt

SEQ ID NO: 8691 - DNA, 8086 bp, Oryza sativa
cccctaatgctgggaaatgatcttcattaaatatacaatcagcgtatcgacccgtatgtacgtctcctgtcaatggttctaaaaatttaatgatagacggagattcaaatcctacatagattactaattttctatgaggacccattgacgtacgcttaggtggcggtatagggacgtatacaacacatccaaaattgtgcagatgggaaatatttggtgcatatccacgtgtaagctgcataggggatacaacattgtatgcagtgggtctgatttgaagtaacgccgctgcatgcaaaacagcgtgtccccaacatgtagttggtaggttgctatgcagtagcaatggcctagcgataagcttaatcctcttaattaatgattcggcgagaccattgtgagtgtggacgtgtggtacagaatgttccactttaattcccaaagccatgcaatatgcattaaataccttagaggtaaactccccggcattgtccattctaatggattgtatccggttatccaggaaattggctctcaactagattatttgggaaataagccgcgcaaaagcgtgctttctagtagaaagtaagcaaacagtgctccagcaagttgatgcatcaattaataccataaaataccggaatgatccggacattggattaattggtccacatatgtcgccctgtattcgttgcaagaatactggtgattctgcgtccacctttaaattagagggtctaacgattaatttccctgttgcacaattagtgcaaacaaaatcttcttggtttgggaaatcgttagttcgtaaattatggccatttgaagtgttgcacaatcagtgcaaacaaaatcttcttggtttgggaaatcgttagttagtaaattatggccatttgaagttaagatgattcttctcatcatccctagaccgtattctgtatgactcaggatttttaaatattgttttcagtgcaacattttcgggttttatatgagtgtagtacagtccagatttcaaggaagggagtttttcaacaacagtcttatgatttccgtctaatttcgttatgagaagaaattcgagtttattctcatctttggtttctacgtgataaccataagcacggatatctttaaagattagtagagtacgactggactttagatataatagagcatcatttataatgatcttggtaccatgtgggagaactactgttgctcgtcccactccgacgatgggtgcattgcttccggcaatagtagcgatttgaccagtctttttctttaaagtctggaaatacgtggtatctcaaaagatagtattggtggtacaacagtctaccagacacatctcctcttccattgccatagtacgtaacactgttctatcataaagaatttaaatatagtcaattcatgaccatatagcaaaaataacactttaagatagaaaaataaaaatctggagaatatattaaactaaaagagttcactcaattattaagataaccacgctctgaaggagcttacagaaactatagttctgctaggaacacaaactaaatgcacacttgaaaaatcacctaactttagtctattacatagtctaaaatttaaagtaacttataatgcaggaagctaagatacaaattggaagacttaaatgtccccatataactgatcagagtccatgagatcatctgagagcttcagctctgcgtctgctgcattcttttccatcttatcatcgatgtgcattgcaaccactgccttctcgtcgacctgcttgtcgatatgcatggcagccatcttctcttctgagtgctggatctcaacagtgaagtgtgactcatgctctgacttcttcttcctgtgcttctcttgataaagctcaatgagatgcttaggggtgcggcaaatgcgagaccagtgtcccctagtgccacacttgaagcatacctgatcttgctttccatattcaccactagtagagcccttcttagacttactgttctgatttcctttcttcttgaaagacgtcttgttaactttgccaccatttttccagaaattcttccctttgttctggttattctggtttttccccttcttaaaggagctagcatttgcttcaggtgctgctgaacttccagtggggcgagacgtatgattttcaacaagtgtctcatcttctccttgtgcttcgatgagcatggagaccagttcagaatacttctcgtatttagcctggcggtattgcctctgaatattcacatgattggcatggaaggtggacaaagttttgtctatcatgtcagcatcagtgattttctctccacatagcttaagacaagtgacattgcggtgaagaactgagttatattgctccacagatttgtaatcttggaaacgtaagtgaagccactcacgttttgtttttaggagcaaggcctttacttgatggccatagcgatccttcagtgagtcccaaaggaccttcggatcttcctcagtcatatactcattcttgagagtagtattcaaatggtgcctcaggaaatgcagtgcctgatttttctcagctgaagttggtaaattattaactcctccagctgatgttgcaatagttgggtcctgaatgcagttcaggagtttcttagcaccaagcatgattttggcatccagtgcccatgtcaggtaattcttgccgctgactgctagttcagcaaaatctctcttagcaatatcagtcattttcctacattagtcatgcaaaattcaataagtactgcaagtaggagcatgacaagtgtgcaaatagtaaattctggttatctaaatttagtactgtgtcaatatattcccataattctcccaataattttcagaattgtttcactaattatttaggtaccaaagtaattactgaattactaacccattaaatagtattctgaaaacagctaggaaaaataaaccataaacacgatgctcaggttcaaatgatgagagctcattgcctaaaaaccatgtctctaggattttatggttgattcaaaaattaactaataaatagttaatatacagaaaattgaaaatacggaataacaaaaataatctgacattctcagtaatttctataatcccgagggactattccgctaaaattccaaatccgcgtgtatcctgaaaattctaggacatatttagaagtttgccattttcgggccaaatttcgatttgagcccgactccttttataggcctaatttatactcggcccacctctatgtaccggctactcaaattttaaccggcccgtcgggaccgtcggcctgctaatggccttggcccataagcggcccaacaagagcgctgcaccttatccaatcgggtggctagggttgaaaccctagcccccaattccaccgattcgatggtggcggcgagtatcccggcggctcatgcgagtgaggcggcgaggttgacggggctcgtcgtcatggcggggtcgacagagctcgtcggcgcggcggggtcgatgacagaggcggagcggcggtgaggctacaagcagcactgacgctggcgtggttggctacgggccgtatccagcgtccggcaagcgcagctccttgctgtgcgccggcggaatttggctcggcatgtgggccggcaaggcggacggctatcagcggcgggaggccgcggcggcttcggcccccgacccagtcgtgtgcggtagcgctggaggcgtgctgtgcgtgccgtcggcgggggggatgcgggcgcggtctcctcagcgtctctgcgggcggcggtcgtcgacggcgagtgcggatggtcgattgaagacccgtcggctggcttttcaagggcgaaccgacgacggaaagccgatggcacgattctgcggccatcggtgaagggggtggctggcgacgcgtgctggcggcagcaagggcacgacggcgcatgctggcgtcatcgactcggtttcgtcatcgtcaacatcaggaggacggcggcgctggcatgaggatttgggccaattcgttcgtaatcggcaattacgttagccaggtacgcgattcttctcatgtgcatcgcgattacaccctgaacgtagcgtcgcccttcgaggcatcactagttctaaaccgtcgttcttgctgtggcttgtctgatccgttcgcgcgtctagggcgtacggtatccgtgtctttgtttgcaagaaaagaaacccagcgcaaaggctgggaacagatctaatcggactatagcgataaccgcttctcgttcgatagatcggttgtacaagggataaccccatacgcctgtcgcgcatagggtggagagctgcaaactctcctgctacgtgcgccataagggacaaatccacgtagtacaacccatcaatcgaacgattagcggagaaataaaaataacagaaaacgatctagcaagtttatcgttatccctatagaacgagattagaacagatcgatgttgacaatataccttggctgaagagcacctcgtgctgataacgtgttagaattcatgttgtcaacaatcgaacaagcacacaataacacacggacatgaaagtggaaggcaatcaactttattgatgtttctctctctgttacaagtattactttgccctcaacctcactattgtatttatacccacaataggatgtcctatatggatacatacatatatatttggtataagcccacttccttaataaggaaacagaagaatagaaggaggaggtaccgtgatcctcacgatcacggtcctacaaatccgactcctttgggagatcggtttcataacagtcagggggttacaaaccagagttaaaaaccctttctccagcagctacctattgttgagaaggccgcactcaattaatttctttaatctcacatgattatttagattcaggacttttggtttgtacagattctgatccttgcacggattgagggttggtcttctttgatgaaccatgcagagaacacgggatgttgggatataggatatccgatcttcttttaatcttctagctagtacatgttgtatcttgtagttttagtctagtaatttataatttaatttttaccaattatctcaccattgcttaaatgactggatgtttgaattgataggctgtgttcttggttaatctctttttttacacttatcacatatataattaattaattatataagtcataccacatgttgagagacaatggtgacacaatcgacttgaaatcctggctccggccattatggcacgtggaggctaagaaataagcaactcaatttacgggttccgcatggtagttgggtggtcactgccatcactactataggttctaatatcgaataattgtttgttaaaattttaaccaaacaaaagaaaatatatatacactttaaaatatactccctccatattttaatgtatgatgccgttgactttttgaccaatgtttgactatttttttattcttttttttgtaaatatgaaaatatttatgtcatgcttaaagaacatttgatgatgaatcaaattacaataaaataaataataattacataatttttttaaataagacgaatggttaaacgtttgataaaaagttaacggcattctactttaaaatacaagctagctagtccaagtccagagatagatcgatgcatgacctaattaattaactctccggtgtgtgcgtgtgttggggctggggcctgcaggcgttgccttcatgcagaagaaataattgtagtggtggtccgtccgccggccattggatatgtcgtcatcgatcgtcttcggcgtcgtcgtcgtcctttctccagctctcgctgacaggattctgtgtggagagcggccggcggagttggtagcgaatttgcaaatgcacgcggtcgcgccgaattctgtgtggatgacggcagcccgcccggtcaccctagcatacgcacccggtcttgaaaacttgagaccagtatgaaacattgaaaacccctctgcacgcatatatatatatatatatatatatatatatatatgagttgcataatatgaaccaaggtgcatatgcacctatatgcatagtttgacacatgtatctacctgattggttcccttcatggtggctgtaagggatggtacatgttatgatttttgtggtccaaaatgtcccttaagtagtactataatagttcgaatgaattgtttttgtggttttcctttttttttcaaagtaatgtcctatgtttatttaatatgttgataaaaaatatgacattatatttctgaaaaacatataatgtagattcactacaacatattgtgagataattttgtaatttttttataactttagatatgtaattgatattttattcaagaataatgtatttctatttcccccctcaacggttgtattatctttttatgggtggattttgtgttctctttggtttgcatttgcaagaattttttttctcatggttttttagtcaatgcaagttataggtttagatataaattattttgtaaatgctatttagagatgtgtcatttgcaagtttcatttttagagaaatgtcattagtatgaacattaggagaccatttgcacattttatttagagatataaaatcattttctaaatgctatttagagaaatgtcaataacagatcatctgcaaattttatatttcatacaaacgaagatatatgatatatcagtatgaacatgttcaataaatcttaatatatattactctactacaaagttaagagaaataaaaaatactaatatttatatgtacgagtacaagatagaaatttgctttgaatcaatgaaccaatgaacgtctcgtattgtaacatactagtataaaagggcaatttgggacaaactcaaagtgggcagtggcattgtgtaccttccctcatctctcccctatatagtaatagcacaaatcttagcagccatcaatggtgtaaattgttggtgcatatgaacctaggttcacatttgcttttccatatatatatatatatatatatatatatatacttaaaaaaaaatttgtgcgttacaacgagtgaaggttattttaatcttattattattatacggtttagttaaggtgaaatttactgtgggaattctcttagatatttttttttacaaaatcaggagctgcaattaaaagtccgatcgtcttaagttagtatataagtttttctttaaaagaaatttcttatatgacttttatggtatttctaaaagcgaaataacttaaaaactgactcaaacacggatctgtatttctaaaaacgaacgaacttaaaaaccgacttaaatacgaatgaggtactaaaataccgataaaaacatcttcaatgtttataatagtaaagagagatagaaataaagatacttagcacaattatttgcttaatatttgattttcttttcctaaaaaaattatactttcggtcgttctatatctgttccaagatgttttgatttctgcaataatgtcgttctatatcggaagtatgtatttgttttgatttccttttatttttttttctcgttcacttagttttcattctcttcttccgtcttccgatgcgtggacgctgcatattggcaagacctccggtgaaaactcttcattcttaattgcatctgacggttcttgttattccgatgatgtggtttaatctgctaacgagaagaaacaaccaactcaacatgaaaaaaaaaattaaacccttacttgatctatacctaataaaaaaatacgtaaggcttccggtggtttttttcgtccgtcatcccacgttgctaaaatccgttttactccgcttaatagtcggatcggacttttctaatctactccaaaacctcggttgatatacaatatttaccgctcatgtagacaccaaccacaactagcagcttgcctacttggtcagtggagaaaatcttcaacccgccgaccacggttcgattcccaccagctctcc

SEQ ID NO: 8692 - DNA, 3351 bp, Oryza sativa
tggcatgaatccttttggagagatgagcaccggtcaatagcacttggcccattacgatgtgtatctacaacctccccccttggctatgcatgaagaggaagtacataatgatgccgattattattcaaggcccaagcaacctggtaacgacatcgatgtgtacctaagaccactggtcgaagatcttaaactgttgtggaagaaggaaggtgtccccgtgtgggacgaggacaaacaggaggagtttaacgtatgagcactgctgttcgtaaccatcaacgattggcctgcacttagcaacctatccgggcagtccaacaaggggtacaaggtttgcactcactgtatggatgaaacagaaagtacgtatcttaagcactgtcggaaggttgtgtacatgggtcatcgtcgattccttgcagcaaaccacccagtacggaagaaaggcaagcactttgaacatacggtggaccaccgtacgaagccaaaacatcgcagcggtaaaacagtgtttgctatggtgaaagatcttaaagtagtgcttggaaaggggcctagcagccagcctatagagagcgaagatggtcacgcggcgatgtgaaaaaaaaactccatattttgggagttaccctattgggaattcttggacgtccgccatgcaatcgacgtgatgcacctcactaagaacctttgcgtaaaccttcttggcttcctaggtgtatatggaaagtcgaaagatacactggaagcacgtaatgatctgaaacatatggaacaacgcagcaaccttcacccggaaccaaaggagaaaggaagccattacttgagtccagccagctacactcttagcaaggcagagaaggacagtatgtttgaatgcttggagagcatcaaggtatcgtcaggatactccacgaatataaagcgaataataagcacgaaggagaagaagttcacaaacataaagtctcatgactatcacgtgttgatgacacagctgctaccagttgtaataaggggtatcctcccagacaatgtccgggcaacaataacaaagctatgtgctttcatgaacgcaatttcgcagaaggtcatcgatccggatagattagaagcccttcagaataatgtggtgcaatgtcttgtcagctttgagttgatatttccaccttcatttttcaatataatgacgcatctgctttgtcaccttgtcaaagagatcggtattctcgaccctgtgtacctacacaacatgtttcctttcgagtggtacatgggcgttctgaagaaatatattcgtaaccgtgctcgtccagaggtaagcatcgccaaggggtatggaacagaggaggtcattgaatttcgcgtagaatttattgaagaccttcgccaatcggggtacttgaatcacaccatgaagggagactacggggaaaggggactctcggaaggaaagcaataatgacggtagacaacaatttatttcgtaaagcccatttcacagttctgcaacaatcttcattggtggctccttacatcgaggagcacttggctctagttcgtgccagaaacatcggtaagtccgatgcatggattacacggcatcacattgatactttctccgcgtggctgcgacaacatctcatgggtaacgagacgattaaccaacaactggccttcctggcgaggtaaccatctggcttgatcacgacattccagggatatgaaatcaatgggtacacattctacacgagagcccaagacatgaagagcacgaaccagaacagtgttgttcgtatcgatgccatgggacacgatggtacaactggcacgtattacggtgccatcgaggacatatgggaacttgactatggacctctcaaggtccctctgttccggtgcctatgggttaggttgactggtggaggcgtaacgaatgatgacagtgggatgacaacggttgaccttaacaaggttggatactcggacgaaccttttgtccttgccaatgatgtaacccaagttttttacgtcaaggacatgtctagcaaaggaaaaaaggctaaagggcttgacgagccgaagcgccacgtggttctcccaggaaaaagaaaaatcgtcggagtagaggacaagactgacgagaattacaatcagtttgatgggcaaccccctttcacggtgacgattgaccctagcatcctcctatcaaatgaagacaccccttactcacgtagccatcacaaggaaggaacaatagtgaggagaaagtacgtgcggtcaactgtcaccgctgatgtattgccgtaattgttctgtacacgatgtaaactatgttggatgtactgaatatccatacaaatcaattgttgtatggcatatgttaaatttgtatgattattagaatttttatcaaattgaaatcatccatatgctagttatatatgattattagattttttattaattatgtataattattagaattttaatcaaattgaaatcatccatatgctagttatatatgattattagaatttttaaaggttttaaatcatgcacgtggtatttacatatgttaattataattttcaacagtttaatatcatgatatgctagttatatatgattattagattttgtattaattttaaatcatgcatgtgctatttacatatgttaattagaatttttaaccatttaatatcatgcatatgctaattataaatgattattagaatttttaacaattttaaatcattcatgtgcttattatatattatccacgtattctagtacatacaataataatttttcgaaggttttatcattaattgttcgactttaaataattgtaatgcattatttactattttagaaacacatatgcaatgaaattcaagacacagctgctattatctttagtcccagttcctaaccctaaccgggtttaaaaagaatttgaaaatagcgggaaaagatctttagtcccaattggtgagaacaaccgggagtaaagatcttttatttagtctcggttgttgttacgaaccgggagtaaagatatttttactcccggttggtctcaccaactgggactaaagatccgggggtatatatattgccggtgcgccctcgtcttctccaccaacacttagacgtttttcaatcttggctcgatctccttcgccgccaccgtgcctagggcaaccctgcgccgacaccgccgtcgtctctcgccgtcgcttggcggtcctcgccgcctctgccgcagacgccgccaccgcatctcttgggtgagagccgccgctgcctctctctctctcgatctcgatctcgatatctctctct

SEQ ID NO: 8693 - DNA, 25067 bp, Oryza sativa
  unsure (1)..(25067): unsure at all n locations
tggaaaaaaaactctatattttgggagttaccctattgggaattcttggacgtccgccacgcaatcgacgtgatgcacctcactaagaatctttgcgtaaaccttcttctcttcctaggtatatatggaaagtcgaaagatacactggaagcacgtaatgatctgaagcatatggaacaacgcggtgaccttcacccggaaccaaaggagaaatgaagccattacttgagtccagccagctacactcttagcaaggcagagaaggaaagtatgtttgaatgcttggagagtatcaaggtaccgtctggatactccacgaatataaagcgaataataagcacgaaggagaagaagttcacaaatctaaagtctcatgactgtcacgtgctgatgacacagctgctaccagttgtaataaggggtatcctcccagacaatgtctgggcaacaataacaaagctatgtgctttcatgaacgcaatttcgcagaaggtcatcgatcctgatagattagaagccctgcagaatgatgcggtgcaatgtcttgtcagttttgagttgatatttccaccttcatttttcaatataatgatgcatctgctttgtcaccttgtcaaagagatcggtattctcggtcctgtgtacctacacaacatgtttcctttcaagaggtatatgggcgttctgaaaaagtatgttcgtaaccgtgctcgtccagaggcaagcatcgccaaggggtatggaacagaggaggttattgaattctacgtagaatttatcgaagaccttcgcccaatcagggtacctgaatcacgccatgaagggagactacggggaaaggggactcaagggagactacggggaaaggggactctcggaaggaaagcaataatgacggtagacaacaatttattccgtaaagcccatttcacggttctgcaacaatcttcattggtggctccctacatcgaggaacacttggctctaattcgcgccagaaacatcagtaagtccgatgcatggattacaaggcatcacattgatactttctccacgtggctgcgacaacatctcatgggtaacaagacgattaaccaacaactggccttcctggcgagggaaccatctggcttgatcacgacattccagggatatgaaatcaatgggtacacattctacacgagggcccaagacatgaagagcacgaaccagaacagtgctgttcgtatcgatgccatgggacacgatggtacaactggcacgtattactgtgccatcgaggacatatgggaacttgactatggacctctcaaggtccctctgttccggtgccaatgggttaggttgactggtggaggcgtaacgaatgatgacagtgggatgacaacggttgaccttaacaaggttggatactcggacgaaccttttgtccttgccaatgatgtaacccaagttttttacgtcaaggacatgtctagcaaggaaaaaaggctaaagggcttgacgagccgaagcgccacgtggttctcccaggaaaaagaaaaatcgtcggagtagaggacaagactgacgagaattacaatcagtttgatgggcaaccccctttcacggtgacgattgaccctagcatcctcctatcaaatgaagacaccccttactcacgtagccatcacaaggaaggaacaatagtgaggagaaagtacgtgcggtcaactgtcaccgctgatgtattgccgtaattgttctgtacacgatgtaaactatgttggatgtactgaatatccatacaaatcaattgttgtatggcatatgttaaatttgtatgattattagaatttttatcaaattgaaatcatccatatgctagttatatatgattattagattttttattaattatgtataattattagaattttaatcaaattgaaatcatccatatgctagttatatatgattattagaatttttaaaggttttaaatcatgcacgtggtatttacatatgttaattataattttcaacagtttaatatcatgatatgctagttatatatgattattagattttgtattaattttaaatcatgcatgtgctatttacatatgttaattagaatttttaaccatttaatatcatgcatatgctaattataaatgattattagaatttttaacaattttaaatcattcatgtgcttattatatattatccacgtattctagtacatacaataataatttttcgaaggttttatcattaattgttcgactttaaataattgtaatgcattatttactattttagaaacacatatgcaatgaaattcaagacacagctgctattatctttagtcccagttcctaaccctaaccgggtttaaaaagaatttgaaaatagcgggaaaagatctttagtcccaattggtgagaacaaccgggagtaaagatcttttatttagtctcggttgttgttacgaaccgggagtaaagatatttttactcccggttggtctcaccaactgggactaaagatccgggggtatatatattgccggtgcgccctcgtcttctccaccaacacttagacgtttttcaatcttggctcgatctccttcgccgccaccgtgcctagggcaaccctgcgccgacaccgccgtcgtctctcgccgtcgcttggcggtcctcgccgcctctgccgcagacgccgccaccgcatctcttgggtgagagccgccgctgcctctctctctctcgatctcgatctcgatatctctctctctccacggccgacgaccggcttcgacgcggcggccgtcgccgccgacgccgtcgccactgccattccgccgcccccgcctcgagctcgccacgccgctgcgccacgccacgggactgctacgccacgccgccgcgacgccacgccgtcgccactgtcgccgcgatgccacggcgcggccaccgcgccgccacgccactgctgcgcgcgcccaacagtgccgaacgttaacgaacgtgattgaaacgtgaccgaacgcgaacaaacgtaacgaaacgttaacgaatgcgaatgcaaacgttaacgaacgcgaacgaacgtgaacgaaacgttaacgaacgcgaacgagcgtaacaaaacgcgaacgaacgtaacgaaacgttaatgaacgcgaacgaacgtgcacgaaacgttaacgaacgcgaacgaacgtgaacaaaacgattacggaacgcgaacgaacgtgcacgaaacacttacgaatgtgaatgcacttgtactaaaagtgtgagaacgaacgcgtttatactaatacgatttactggtaatacatatatgattatatatgtaacttggcccgtttagactaatacattttcctggtaatgttgcagagaagacgtcgttatcgtaccttaagccaaagtggtagctagccatcgaaggaattcgcgcaggcaagtgatgtaaagaagtgattgttagatatttaatataagacggttagacttagcatacatgattattacaattttaatataagattgttatcgatttaatataatattgttagacttagcatatatgagtgttagagatttaatataatattgttagacttagcatatatatatatatgactattacaattttaatataagattagtagcgatttaatatgagattagtagagatttaatataagattgttatacttagcatatatatatgattattacaattttaatatgagattagtagccatttaatataagattgttagacttagcatatatatatatatgattattacaattttaatataagattagccgcgatttaatatgagattaatagagatttaatataagattagtagcgatttaatataatattgttatacttagcatatatatatgattattacaattttaatatgagattagtatccatttaatataagattgttagacttagcatatatatatatatatgattattacaattttaatataagattagccgcgatttattatgagattagtagagatttaatataagattagtagcgatttaatataagattgttatacttagcatacatatatgattattacaattttaatatgagattagtagtgatttaatataagattgttagacttagcatacatgattattacaattttaatataagattattagagattaaatataagattgttagagatttaatataagattgttagacttagcatatatatatgattattacaattttaatatgagattagtagccatttaatataagattattagagatttaatataagattagcagagttttaatattacggtacgcaaatacatcctatatacctaacaaatattttttgtttgcacagatggctgatcgcgatgaggaacagatactatacgacacaatcgcagagggaagcagccaatactggaacgaaggagaggggaacgaggatccaaaccagtacttgaacgaggagaggaacgtggagagggatgcggaggggaacgaggaggggaacgatgaggaggaggctagtggaagtcttccctccgctggacagaagagggcacgcggacaacgaggtgccgcgaagaagatagagggtcagcacatcataactgaggtggaccaagaattttgtacgccacagcggttgggttgtgagggacaacgtgcctgtcagcatggtgtactggcacaaaacaagggcacacggggataatgacagctttgtcccggactcggagaaagagatgctgtggaccacaatgctcgagacgttcacactacccgcgggtacggagaacatagtgaaacagtggactctgtagaaaatagcataacagtttcagagcttcaagggagatctctacaagaaatacatcctgaagggactaacaccgaacttcgacgtattcccaaagctaagggatcattgggacgagttcgttgcttacaagacagggcaacaagggcaagcgatgatggccagaaacaaagacaatgccgccaagaagaagtaccatcaccacttggggtcaggcggatatagcgtcgcaatgccgaactgggaggagatggaggcaagtttgattgagaggggtatcaaaccggccaccgctaaatggccggatcgatcgaagttttggtactatgctcacggtggaacgcttaacccagttgatggctcccttgtcttcagcgatcagatacgcgaggctgccagtcgactaacggacgcagtggtagactcttctcagggcacattccgacccgacagaaagaaggatgagctgtcactcgccctatagactcccgagcatccagggcgaacatgagggaaaggcgtgattccctggaagattggatttaaggaggacatccacacgtacaggagtcggatgaggagcaagagagataccgaggcgaagattgcaaatcttgagtacagggtatcgagctacgagctcagcatgcaagaggaggtggcaaggaaggtggatgaacgtatggccgcacatcggtcccaggatccccagccgtacattcatcctgcaatggtcagcccatcaggcaatcgtagcagctgcgcctcaacggggcaggtcggatcacagagcatggacgccatgcaaacccaggacgaaaccacctgccccgttgatgagatcacgcagcggacaccatgtgagctgtatattcccttgaagaacttatcaatcaaggtatgctcgtattttaatgatttttgacttgtacattccgcaagttgctgcttaggttgattactaatagataacctctcatcacgtgaaggtggcgtcgggaatggccatcccaacggaccctttcgggacttaccactgcaggccgattccagcaggatactcgagggtcgaagttgagctggtggaagccgcgtacgaggatctcgagttggactacccaggaggagacggtgagacgcatctacgagacacaagccacgccatcatactatggcgcaagcggtacatcatccttcctgggctacaagcggcgtctcgtgcaccatctcctccggctccgccatcttctcctgcaccatctcctccggttcctccgccacgtcctcctgcaccatctcctccggctcctccgccacctcctactgcaccatctcctctggctcctccgcctccaccgtgtccgcctgcacctcccaagacaaggtctcgccaagctccaccgcctgcctgcacaagggcaacgaagaaggcgaaagttgacgccaccaaaaacaaggagccatcgtacgattgcagtcaagaggagcttgatgcttatgtggcaggagaggtgaagaggcaactcaagcctcggagtcctgaaaagaatatacctattgacccgagcgtgaagaacttcttcaagggaatgtccacaacaaacgaggcgttacagatatcggactatgaccaaacacttcagagagcctatcacaagaagtccaaaccagtccctcagcttggagaacaaccaaaccaagaggttgggccattggtgaccggcgaagattttggcataacggaattcatttcagacaccggtctaactgtggatcagttggttggaggcgcaccaatcccgaaggcggaagtggcatacaagtttgaactcggtaaaccgcttgtcaaacctgaacagctgcagtccctaccgacacagatgtacaaattccatgaacggtacatggaaatgagcgccaagggtagagagatgttcggagcgaggatcagaaaccccgacttcttgcaatgggaagatctctggatccatttcaaggatctcttcgatctgtaccagttggacgccctcgacatctctcttctgagggcatggattttgtgagtatttttgagttcgatttgtttcgttcaataattagctcctggcatatatgtaagcaataatactttcctttcatcgttgtagaatggagattcaaagggcccgacggcggagggtctacgatactgggttcatcgacccttggaaaatcaacaccgaaatgatcgacaagtacgagaaagacacagaggacaatctcatccatctcctaacgcagtagcatttcaagacgtacatactactgccgtacaacacagagtgagtttttattgtcgttcgaacaaattttgttcccatacatatagcatgtacattttcgatcatatatatctcatctcacgcatattccaaattccattgggtcctgttattcttcgacttggacgcatgcagagctatgtacgactcaatgaataaagaggagaagatttttgacaaggtcttcaaactgatagacatgtaatataatgccatctattccaaagtcacggggaatctattgctattatgttgatctcaggtaataattaattaatcatagcttgcaactgcatatgtagggcttgggatcggttccgtcaattggtccgcgggacttggaaagaaaaacttggacggaggtttcattttccagtgagtacatgcatgatccaaaattatattgaattgaatatctaattacagttaatataaatagtatattaaatctctcatcgtttctcatgtagtgtgcaaagcaggaccagggaactaacttatgcggctactacgtatgcgagtatgcccactgcctattaaaccaaatatgcacaacacgagagctcgatgtacgtatacataaaccattcaaaatttcattgctcgatttgttacgttgtttattaatttcatatattgatacgtcattatttttcgaacgatagcgtattcacatgagggataatctcccacacaaggattttatcacggctgttcaagaacaactgatgggattcatcaacgaagaagtccttaatcccgacggtgaattctactatgacggatcgacaattcataacgtcggtccttcctcttctgacataacgccggcgtcgaagtcgtagttatagctaccaagcaaatgaattgtactatatatgcatgtatatatatatttatatatgtacacatttacttttgtgttaatatatattttggtaacatatatatatgcacataaaatgttaagtgctttaaattatacatatgtgtgtgtaatatatgatttatacacacacacacacatatatatatatatatatataaaatcaaccatgcagcaaacagggccatgcaaataaaaaaaaatggtgcaccaatctttagtcccagttggtaacacaaaccgggactaaagatggtttggccggccacgtggctaatcgatctttagtcccggttggtaacacaaaccgggactaaagatcgatctttagtcccggttatttcacccgggactaaagataactatctttagtcccggattcgtagtctcggttggacaaccgggactaaaggggggttaccaaccgggactacaaacggtttctccaccagtgggaagtgcttggtgtacacggtgccgacgactccggggatcccggacaaggcctcgaacatggacgcggaggcggcgtgggagtccggccaccggacaaccctggtgaggaggacggtggtgatggcggcgcagacctggacgatgatgttgtggcaggtagagatgccgaggccgaagcggcgggacacctcgcggagtgggtcgccggtggcgaggcgccagatgcagacggtgacgcgctggggcacagggatggcggtgcgcagcgtggtgtcctccttggtgacagcggcagccaggtcgtcgcagagcttgtcgaacaccgcgcgcggcatgcggaaggctcgccggaagtccgcctccgggcacgccaccgggtccctcatgcggtcccaccattccgtgctccgctcccgcacccacacccgccggccacctggcctttccgccgtcggctcactcccctcgccgccgctgccatcgcagttggacagtgagctcgaattccttggcgccttcttcctcctcttagatgaccgggacacgacacccatggcctcgccgtcgtcggcatggaaactccgcttcccactggcatctcctccgcctgccaccacctccaccgacaccggcggctggtcagcaagaaagtcaccgtccatgaggaggaagtcgtcagcggcgagcatggatgtgtactcaaaatcagcatcatcggggatctcaaagagaggagtggagaagggctcgagctcgaggaaggcgttcatggcgatgggagaatactcaacattcaacaacgagtgattgtgtgggcaaatggccagctgatgatcaggcctttatatatacgtattgggttgtgtaaactgaggcagaatctgagacggagggaatagttgggttattgtatgtcatctaactgcttatgaaattttttttttaaaaaaaataacaagatagattaatatatgataggccactccacaaatatgcaagttaaaatttaactcttacaagttaaaaagaattaaattatgactagttaacatatattcacagtcaaatttgttattttgttgcaacttgtcgaagttaaaattagctttgtatgtttgtgaattgatttatcacatattaatctatcttgttaaatattcttaattttttatcatcattagctagatgacatgtaaataacgagtagatataagtttagtatagcttaagcccaatggctgcttggcgcgcggtatagtactatactgagaaaatagctaagatgagcagggctgtttcacatgtgggcactgcacacgcaacgcggcccacctcgtacgtctagccacgtgtctctcggtgattcgttcacagagttggttacgccttttcttgttacttttggtggggaaagggttgtttgatcgttagggcattcacagtgcaaggacgtacgtggcgctcagcccaatggtaagaaaccgaatattcgacgccacatcatcaatccatggtaagaaaccgaatattcggagctgtggacgaggatccaccatccgggccctatcaaagcccgttgtgtccatgctataggacctattgcctctgtcggatctgtgtcctaagttaccgcattcgatggatccctggcttctgagcaccgtcaacgccggatccgcggccaccggatccgcggttttccatcacaccggcctccttccgcggtttgccacccacatgcgtcctatcgccgacgcagttgctgtcatagagagctggcgcaacgaaggtggagaagctgaatgggaggagggagagggagtggtaaggaaaaggagggggagagagggagccgagagaaggcagagggttaaactgctacaaaacccctcatagatatcggttcataggtaaattcgacacctatgaacctcttcccacctccgtgtaatgagaaaaaaaatataaaaccaacacctatgtaccttttttttaaaaaaaaccgtcacctataacatattataggtaccggttaattaaaactgatacctataatatattatagatgccgattttttaaagaaccaacacccatacaaaactgagccgaccactcagtataaattcgagatcaagcctcctcattcctatcctagtgtccttgtccaatccccccttctctcgtcctcaccccctctccatcctcttatccactatgtcgccttcctctcaagcttgcggggccagctagctttagggggcgggggggggggggggggctcgatcaatatgacggctattttagagtgcagcaccgccatcgctgaagccaccgaatcgggagctcctctcctctctccttctctaagtcctcctctccatccgccacccctccttctcctcttgaccctcccctcccccctcctcctttccatccggtgacagtggcagtggtggacaaggccggcgtgaaatggtgagctgtatggaaaaatttttctgtataagagtttcttaattaataaatcaaataagatttattttttaagttaatacttagtcatattctaatattctaatagatctcctcgttttccatgccaacattatatcagctcattctatcctctcgggcacgtacagccttcatctctagccctctcccataggaactgaaccaagagcgcgctacaagacggggaacctggaggcagcagtgatgctttagaaaattattcaccaaaaaatatgttgacatcgtaccaaccatagagtaaatttagaaactagcctgcacctatgctataaacagtcacagagccaatggcatgattgtatatatatcccataaaaactaacctagaactggatgtgagatattctaatactacaaatctagctagatatacatctgtttaaatttattgtactagaatacatcataagattcgtttgtttaggcggagggagtatgtctggacgagtaagagtatttcgcggtggccgaacactttttacaagcatcaatctcattcgacaatgagacgcgccagcagctcatacagctgcccgatcgaccagcccagaaactaagctctactaatcttgtggatcacctttcgtaactctctgttggaaatatataatgcaaaatgtcacgagcacaaatataacgcatatgcccgtactagaaaatccatttttccagacgattgtacttttttccaggcgagtagtcctcttggagctaaatgaccgcccgcgaaaataacaaccgtgggggaaatcgttatccacctgcgaaaataccacttaagcggtcgacctgcgaaaatacctttatttttgcaggcggacttcttaactggtccacctgcgaaaattggcgtggcatataaatagacgtgggagagacaagattttttctaagtcttggctctcctctcctcagccgtggaggggaagggaagtggcggcgctccactgccgtgggcagttcggcggcgagggcggcgggatgtggcgacggtgacgcgcgggatcggcggatcggcgacgacaaggcgcgggggcagcaggatcccgcgacggtgacgtgcaggggcggcgggatccggtgacggcgacgcgcgggggcagcggcatccacccccggcgcggctcccctcccctccctctagatccgaccgaagacggtggtggcggcggcggttcggtacccaccccgagcggcagcagcgcacctgcagcggccacccttaccttcccttcctctccctctccctctccctcccaaaactctaaccttagatcagccggaggtgggtaggggcgcgggtgggggtggaggcgattttttttttgttcctcgagagcatcttcgcaggtgggtgactggaaagtatacgaaaatcgatttttgcaggcctttgcatacaggtggacctttcctccacctgaaaaaatgatttttgatcgcctgaaaaaacgatttttctacaagtgtgtgagcatcaacagaattttacagatcagaagtttaataaacatgccgccagatctgcaaaagttggcggagagacatgcattatcatttaaacctttttgcatacaaatttattacgagctctggtatcttgtttcacagagggttctttataaagtccaagctttgaaaatttattggaaattcatattaggtttgattgaggtaaatcaaagtttcctgagatccttataatagtttctttaatatgacttagtaaatgaataggtcaatttttttagtatttttatcactagtgtcaacttacataaaaatcgttttttcgatgtttctcttaagaatactgtcctaacataaaaaaaacataatatttcatataaagtacgataatgataaaatttatatgaaaattgtagttctcaatgagctagctttgtagtcgaattggttttattttagatcgtttagggtcccaaatgttcgttacaagctgcgagatctattttagaaaattcttgagtttgagtttttcaaacgagctggattgagatatcctttggacgaaagaagatttaagtagatgactttttcatttgttgtcattaagagctcaaattatgtgttacaagtgttttagagagttcaagttaaaaaaaaatagcatctattacataattataaattgattcataggtgggataataaagatgttacgcgaggagtgggaggtacggtcctggttcaaatcctatataccgcacgaacacatttttcagtttaatgtttgcaactaagaaaaataaaaaattcaaaaaatgtattttcgcgggcatctccggtcctcttccataggaactgaagcaagagcgtgccacaaagatcttgaaggagcactgcaagcagcagtggccgtgagaacccacgctatatatgacactatttcagtacattattgatcaagatatttcgccatcatgtccagacataggcaatcagcattgacgtactagtgatgaaaaatggaagaaggtaatcgttcgcaaggaccaacttgtattcgtaccttcgttaaacaatagttgtactctcgtaaattgtaatcaactttcttttccataaaaggtaatagtaaattttataccatatatatttagagacaaatgtcacagggtcgcatcaatttttaatattctttttcacttaattaaccctacggttacaattattgtccgtaaccatgatgttaaaataatgaagaaaatacttattgttaccccatcgcatattagttgttgttataccttatatagcatagattatgttatgagaaaaaagtccatactatccttattaaatgatgtatgtgtggtcgtgggagaatagttgagggtataaaaaaagagaaatttgaattaaaagtgattgattggataagtaaattgtgataactattttgggacaaagtttaaatcataaagagataactaatttgggatgaaaatagtacattagtttctaccaggggcggagacagccaaattaaaaagacgccagggtcaatgtaaactagtatttgcaataccgattaaaaaaaccatgaaaaccgcttggttttttcaatccgctagttttgaatccttttcttatatagagttgacgaaaaaaatcttcgaaagtttattagttttaaatatttgttctaagctacacgaaaatcattgatttttactagccaacaaaccttatgaatcagagaggggaaaaactttatcaaaaaatgataacataaatacgtcttaagacttgcatgtaatctctccatcccaaaatataaaggattttagttagatgaatcatattctactagtatgaacttagacagagaaggagggagtagcatctaataatgtatatataaaatattgagaagaatgtactgatccattacaagtttgcttcctgccaatttagtaaaaacaaaaagttaaaagatacggagtactagtgaagaagatattcatatgggctgtgaacaacagatatcggttcctaatttcgttacttgaagttgtgctgaaaggaacattgaacctaagctgcatatactttgccatgtgatttcaaagggacctgtcggcttgtgggccttgtctagttcacgtgggcaatcaggctaatgggcttgcaaaccagccggctaatcacaaagatttaacggaactgctagccgactgtcaaattttttagccattgattccgctttaagatttatgctgagatattttacgatcggatctaaatcctcttttcacaaactagtcatatcatcacatgtttatggcagatttgttcaagttatatctaagttgcattctagttacatgctagttacattctagttacactataattacattgtaactatatacagtgtaactacactataactacattgttatctctatataaattagatataaagttacatatattattttaatacatatatacaagttattattattatagtatagttctagtgaaattatatactatatttagatttgaaagttttcctctcaagaaaacactcgacagttttttagctagtcccaagatttaattagtagttgtgctcatacaagatgatcagatgggctgggtttaaatcaacaattttgccggggtcacattcaactacaccataggtatcaagtggaatttagctccggccatcggtgtcctaggaccccggtgcaacaacggtagctccgtccctggtttctacatatgttgtattctgaaatttactccgaaaaaaatttgtgaaatcacatctatctacaacatgtgtttcttttagactaacatgtgccacatgaaagcaacaattccactattcagctacatgaaaatagtccgaattaccttccgaactattagacagtatgaattaccctcgaaccacaaaaccagacattttaaacctcaaactattgatactggatgaattatcccccccactctatccagagagattttggtcctacgtagcatacacatggtgtcaacgtgtcaatccaatcagaaaaggaataaaaaaccataaccccccacttgtcatatacctcacctgtctcttttttctctctatcggctcttggcgcttgggaatgaggcgggcatgggggtggcaggcaccaatgaaatagcgttgcaggcacgacagcagccgagagggcactacgggcatgggtgggaaggacggcatgggcggtctgcacatgcgagtagggcagtggagatggcgggcagcggcacagtagggagaacattatgggcgacgaacataggtgaggaggacgctagagactgtgggatgtgaagaggcgggcagcagcaagcatggctgaaggcggcgggaaggcactcctcgaggaggaccttgtaggacgctcctcgaggagtgtggctcaagcttgctcaggggacatccgtggaggcggtgactcgtccaacattatggtctggtacatcgaagcttggggcggcagctcgtcgaagctttggggtgatgaagcacggatttacccgatgggtaacgggtggcagggaggcagcaccgatcactggtcttcagtgtcgaggtcgcactgctctaatggttgttgcaccacccaaaagccaagttcccgccgtgtcttgccccctcccaatccaagctcatccagccaatatctcttaggcatccccatcgccgcgagtagatgcatggccaccaacgaagaagcaaggaggagatggtggagaggccgccagccggccggcgctaataggagcagaataaggaggtgtgttagacgtggagagaggggagaagaagaggaaagattgacaggtggggctggaccattttattttttaggccttttaaaaacttacttttacaaatagactttaaaaaaacttatttcagtaatggaccattttcccgatcctagggtcattagcaccgaggttcaatgtttcaaggccaaattgatgtgaaaagggttcacgccaaagagactaatgctcatgatatatttcaaaaataaattatatggaaatggttaaaatataaatatttttttaccataaaagggctctcggagctagccttttggcacgtagggtctattttgtaagaaaaaaaaattatattttgacatattctatataatttttttacagataggtctctttgtcaccaacccatctacttctnccctggtccaggggcgaggagtcagtgttagtgtcatcaatgctcagacctgggacatggtgaaaggtcactggcaactaggaaaatatcattcctaaaataagattgtataggggtttatttataaaataagtttttaaaaagaaccaaaatattaaaaaattatagcttaacggggggataaggatcgattacagtcgaatgaactctactggttacaactttatcttgttcgattttcttcggaaaatggaaggagctctactggtcactgtcgaagtcgctgtatgcctcttctccgcatacagagtatctctttttctcgcaacattgtcccaattccttgcaccacacgtcacttgaatagaatttggcaagtgtatgtaaattaattaaaccggcttgtagggctttaaaaattaacttgtggaagatataaagaagtgtgaaaaaaataaataaaagaactatatagactccctccatccctagaaagtataacggaattgctagaaaacttctgtaagttttttgctcctaaaacattcagatttatggccatcggtttgtctcaagatttgtgcaagaagaaaaatattgctagaaagaaatttttacacatgtcatgcgtaagatcattccttaaaaaaatagccagccaaaccatagttaaatataatttttatataagttatatcattccttaaaaaaataaattatatcgtaattatagtatagttatgatgcagttacagtgtaataacattcagttatactgtagttactaataacatatgcgtgcggcagttttttaagatactcccaaaatatagtcctagctaggctgtagctacatagaacagaacagtgttttataatgacatggaccgttgctttttgatccatcatgagtgcatcaccatcagccaaccggccgcgactgctggctagctggtgcatggatctcaatcctaggttgcagcttggctccagttggacttcatttctccaaagtattgatacaaaatcccgcagtaacgcgtggggttttaactagtttaaattatttataagtcatggtcaggttgatcgtacatagtttcttattcaccttttcttttttttctcctgaggctaatcaatctattcgaacagggatatggatacttggcttgcattgtgacaaattaacaacaatcttatcgcccacatgcataccaattaactaattaattaatcaattaagtgtgtccatcattagtctgtgagattgttggaacttcttgttttgcatcactcatatttgtaactggatataaaataaggagatgcatggatatttaaagatcgatacatgccagagaaaaacagtgaagtatataaaagaaggaatgtttagttgtttacgtgtacaaaggagtatacatcaggattagatgaatggatggaccttttacagtgaaagcatcagaaattgcttgaatgcagtaaagcatattcagctacatgaaagatggaccacgtcgtatgtacatgcaattgcctaatgcagatgccattgcttcatcgcttgctgcagcattgtatgttatagaggacttctatggcatgatacagatctgcaaacggtgcagcacgcgctgttgttggctaccggcaacacatggtcgctgagtgaaatttcgatgattatagctcattgatgatatcgcgtcgacggctagggatttaatttagggactaactaatttggattgagttaagcgtattgaaaactaactctaactgtttctacttgtgattaaaactaatccactttttcggataaaaataaatctagtccgttattttgttttcatcgaatgctggttgaagtccattaatctgcatgtactccggtgcgtaaaaaaaaatacaaggacttgacattagatgggctttgttccacctgattaaaagcatgttagatcgacgatcatgattatatcatctgtctaattaatggttagatttctctggttaatgtaagagctcgtagaaagtgcccaattagtataggtatagattagagctgcggttttgaagcttagttctaaacttctaatgtgttcttggctttagtttttcattaattgggtataaacaaggcaagcaattagcatataattaaattggttttaatatatcttctattatatactaactttctataaacacttctaaactgacatcatacacaatcgtttttcttattatagtctcttatataacgaatagagcgagatactacttcttttaatattcttttttaaacaataaataagatgccgtgtatttgcgtgaatttcctttctcgttgttataaacatgaaacatatatgtttattagattttataaacaaagttcaatatatataaaaagttttttttgcaaaaaaaactaacatttaatagtgtgggaggtgttctcacaataaacgacaaaacgaacgaacgcataagagctgcggtttacagcttttatattgtcccaatatgcactctgtttcgcttatgcgtaagaacatgacacctactgtaggtggtgtcatgtacaaaacgatggctctctcgttgttccggatgtgtccccctacctataaatgacctaatacactgtatgttctcgtttgatttcttctattgaaaactagcacaagaaaatgtacacatggaagagatatttctcgtataagttcgtggcatgcattagcttggtcgtcgatcatgtgttggtgttaataaggaaattgttaacaaaaacagttctggctagttggctctacagtttttcactaatagagaaacgatttcctactaccagactaccagacccataaatcttgagaacttttacgatacattctactgctagtatatatttggtatttgttaaaaatctgaaaagggttgtttagccatttataaaatagatattgttttagtttttttatcacaaatagagattaactttcccgtggtttttttttccctggatatcgtcatcctcgtcttcctggcgaccccagcgacgtcgctcccaccccggcgcatctctgttgttgtacctctgttgtgctaaagccatgacagtgctttcttccatcggcagcttcggtatagggcttgttcacgccgtggcatagctatggccagagccatagcattcaacaagagggtctgctctgcgacagccatgccctgctgctgctgcggcatgctgccctcttgctgctgcgccatgctgctctgccgctgccacctaccgccggccggcttcccttgtcgctgcggcaggcaaggtccctagcaagcgtcgccctcccgtagacccagcagcccgcgccgattttggctcccagtggcagcggtgattgtggctgtcggcggcgggggcggcgccgacagaagccagtggcggcggtcgcccatgcgagcggagcagattcggtttagactctgtatggtcaaacggatctgactaagtgagatagcatgaatttaccaaaataccccccaacgcaaaaagatagaaagacaaatataccctattcaatttatactgcagcataattggaaggaaaatcagataaatttacaccgtcagatcaaatatactgctagtatatactagcagtagaatgtaccgtaaaagtcctctaaatctttgcaggtgggtcttatttttggctgcggttgcttgcatgcgtagatgtgggagaggagaccgatggccagccgcatgccgagatcaatttttgtagtgcggatggcttaagggggcccatctgcgataatatctcttctcttcacagtcgagcctctttagacctgcttgtgaaaatcgatttttataatcgcgatggcaggagcaccgattgtgttaatagtgagggtgttaaaatagaatatgctgatcaagccagccaagaggaaaccaaggaaacacctcaagtccctgatatcatccctccttgctccctgaaaattttggtttttaaatacggaattaaaaattcggaataaccaaaaaatattttgaacttccttgcatactggaatttattgtattttatttcccgttttcttgttatgcatggactaaaggagtgtattttgatttcaaatattatttacttaaagaaccatgattatgaaatatattaatactagttattttctgtcacgtcctgataaattcatcccgaattaaaaatcattctctaaaaggaataatagaattaattaaaattcgaaaagaaattggcaaacactaaaatatgtacaagaaaaattcaaatgtgacccggagaatttttgttaaattctccttggtctaaaaggagccctcaaattttagtggaattttcagagcacaaataataattattaagaaataaacaaagttgaaaaggttttataaaaagaaaaccctaaaagaagtcttcttttccccccttcccttcttgggccggctaggcccacttctctccctctctctcctctcccccgcggcccatcggcctcccccgcgcgcgcgccgctgacaggcgggcccgcccgccgccctcgctgacgggtggggcccacctgtcatcgccttcctcccgccgctcccgccgctcgcccgtgccctagcgccgccgccgccgccgaatccgccgcatcccgccgtccccgcgcgccataatgaggggggaatcattccccgcgattccctctcccgattcccccgcttttccctctctctctccctcggattcgttcggagttaatcccgcaagtttcgccggcgtcttcaagggcggccgagatctccgcggccgattcctccccctccggccgtcctctctctctcccggcgctatataagcgttccccgtgctctcctcctccgtttccgccactcgccgcctctcctccccgtcggaatcgagcccgcaccgtcgcaccttctctccgccgtcgccgccgagctccggttcgccgccgtcgtcgctccggacctcctccccactcggcgtcacctccttcggcttcgccgcgtcgtcgtcgaccccgtccgctcctccgatttgctcgccgaccgccggagcaccgtcgccctcgccgtcccgaaccgcgccgccgccttcctccgcttcggccgccgttcccgtcgtcgccgtcgacccggggtgagccgaagaccgccctttcgcttccctctcctctccgctctctcgggcgccgctccgccgcgccggtggtcgccggcggtgaccatcggggcgcggtcgtgccgcctcccgtcggccgtgccggcgaggccgccttcgggcgcgccctcgcggctgccaagtgggcccggccgtcagccgcccgcgcccgcgggtgcggctgacgcgtgggacccacggcgccgaccgccgccagccgcgtgctcccgatccaccgtggaccgagaggctgacgcgtgggccccactcccgtggacccggtccgcgcgccctctccctcggctgacgcaataaatgagatttttaattaaaatttaaatgaagaaattcgtaaatatccatttaaagagcatataaacttcaaatggccatatttggccatttgaactcggaattggaccgttcaagtctctaatttttccttaagaagtcaagaacccatttttgtgctttgtttctgctgttatttggagtttattagagtaaaagccttttcttttccgttggtcgtgtagacgctgcagcttcggaagatccgctcttcgtggaagttgaagccggcgtttgggaaagcgagcaaggcaagtcacatcatccttgatcatattgaatcccagtttgtaaaattatgttgatttaaattattgcattaccgctttatttaaattcccgcgttatcactgttttatctagccatacctatttacctttgttatgaccttattattattgttattgttattattactttgttcaccctaggttaaacaaaaccccaactagtgagtactctattcatggttccactagtataaatttaggtagatgcttcgctgattaattaggcaacattaggtggttttataactttagactttgggaattctcatatcatttggacactatggaatggttggcttatgttggaattggacacacacctccccctcttttcaaaacccccaaaatggtttaggctgggctcgaggtgcgtggttgggttttgttagtcgtacctcgggtactataaggattaagcttgggcctctgttgcaaagcactaccgtacttccacatgtctagtgggtaaggcttagtttgtggctcagcctggttataaacaaaagtacacggattggagatggatgaagtcgggggtcgatggacattctccagggcaaatgaaggctacacgagctgcggcccggtagtcgagatgtcatggcagagggttggtgccctgctgctagggggctcagtcctgcctgcctgtcccgggtgtcccggccgtagggggattgggtcggtactcttgtttatggctaggatgggttgggaactatgtcacgtcttccgtccgtataccgtggtggtatgtggcacgtggttacacgtgaggaagatgtgtcttgtgggtaaagatgtacacctctgatcagagtataatctattcgaatagccgcgccctcggttatgggcaagccgagcaatgtacccaagtcagtgtttcaaattcttaaaatttgctcaacaactaaaatgtggaatggttggcctgggttggcttgggacgagctgggacccagggtcgggttgccagttcggtctgaatcatcgtaggccttgggttaaggcaggttcgtgagggttcacggccttgtttaataatactgtgtagctctaggatcgtctttataaaatggctttgggcaactaagtgacttttaaaggctgttactgcaaaacttaacccctatattattacccccttgtactcctttgcattaattgtgcatctccggtgtggcttgctgagtactgtggttgtactcattcttgctctatctttctcccctcttcagtaagagaagctttggagaagatgtcttaggtggagtcctggcttataccccagttgagcgcctgtgaagatggagccgtaggcccgctagtccgctgctgtttatttttgtttgtcaggcctgaagtgcctttgtaataatgtaaatattatcgatataataaagatgtgtcctttatatcatgtttgtgtggtgtaccccggcttttcctgggacggggattaatacactggcgttcgggaaaaaggcaattttcccggtcgcgacattttcctaaaaaccgttctctatataatagaacccctctgacatatttgctctgtaaaaaaaattgtatactactattatgaatgaacactacgggataattcattagaacgaaaactattttacaaagggaatgtgattccgattattttctaaagaataacagctattaaaaactattttacgggataattcctgaaggctattttaaaaagaaacggcattctcagataaagtctggttttcctatggaaaggcctagcctgatttgcataataggaggatttgttatttatttgtgtgtgcttaggtactgtgccaaaagatttctattaaattcttttccctaaatgggctgtcttctgttcgacatccttccgtttccttatcatctctgacagttgattaagcgcttcggtgcgaaattaatcaccactactacaaaaatcgtttttctgtacgagggggtcggtaggttccatgcgggccgcttgtggcggcgcctgcaaaaaccgcccccccggggcgggttgattagccgcatgcgaagatccattatcgcatgcggctggttaagacagccgcatgcgataataggtctattttcgcatgcggctggcttaagggaccgcatgcgatgatcggccatatatgctcctccaggcccgagcttgaccatttgaaaacgaagctttctctctcctaaagcaagcaccaattagggggggaggttttcaactcgaaatttttacttgaactctatacgaaaggtgaagaactctctatcttgcttcatttggctccatttttgttatatttcgttggtggaaagtggagtttttttaatattttgacaaggtttgttccaactatttt
